United States Patent Application Publication US 2005/0196754 A1 - sequence listing, part 5

SEQ ID NO: 8836 - DNA, 2955 bp, Homo sapiens
  SIMILAR (2955)..(2389): 1001254mologous to Escherichia coli HISTIDINE-BINDING PERIPLASMIC PROTEIN PRECURSOR (HBP),accession number D90862,Smith- Waterman Score=941.
ttaccgatgacgaggaacacggccgccaccatcaacacgccgatcatcgccgaatacgcgcccgaccagcccggtcaacgccgccagacgggcaaaccagctgtcatccatccgcacttcgtcaatgccgttaatctgcgtgatacgatcacgcagcgtattcagtgattccgtcccctggaaatcgagtttcgggatcaccaccgccactgccggaagcgggttttcttccagcatatccagcgcaccaccaaaaccagaccagttacggaactcacccagtgcgtcttcacgagaaagatagttcactttctccacgccttgctcggcctgcaactgtgccaccacgcccgcagcagcgtcatcgtccagcgttttttgcagataaacagtgatttgcggtgacggataatactgcgtcgacgcctggttaacgtttttgtacaccatataacagacgctgggcagcgtcagagaaatggcgataaccatcaccgttaaaaacgtggcgaacggcttgcttttcagatcctgcaatgcgccgtggaaggcatagcgcacctgttcgttgaaaacgttgggttcatgtcggtcgtagccatcaataaggttaccccaatgcgggttaaaatcttgaaaccaacggtaaaatacctttcgaaaacccatggtccaaggttccaatccggtttggccgccagaatttaaggcgggtttgcttaacaacgggcgggcaaatcccaacaggccggtgggtgacagcgacggattcgcgtggtgctggcgattatcgcctttgcctccatcatcttcggtaacctgatggcgctcggctatctgctggtagcgctgattgcgctgcaaaccggcgagatgtcgatggaagcggtaggggtttacctggccggttatctgttcagcagcctcggcgcgttcggcgtggtcagcctgatgtccagcccgtatcgtggcccggatgctgattccctgttctcttaccgcggtctgttctggcatcgtccgatcctcgcggcagtgatgacggtgatgatgctgtctctggccggtatcccgatgacgctgggctttatcggtaagttctacgtgctggcggtcggtgtccaggcacacttgtggtggctggtgggtgccgtggttgtcggttcggcaatcggcctctactacatcaaactggcagtacagcgcgggcggtatcgttgtgctgatctctgcactgttggtactggtgctgggtgtatggccacaaccgctgattagcattgtgcgtttggcaatgccgctgatgtaatctgttactttgtaagtcagaaagccgccgacatgctcggcggtttttccaaaggctaaaccgctggcggagtcatcaatcccgtcggaagcactgacagcggtttctgaggcgcttccggcagcgaccgccgatgacgatgacagccagcagttgctgctgagcggcatgagctgcgccagctgtgtcacccgcgtacaaaatgcgggcgcggaagcgattgaagatgacgctaaacgccgcgagcgccacaagaaaccgccgtcgctacgatgaagcgcttccgctggcaggcaattgtcgcactggcggtgggtatcccggtgatggtctgggggatgatcggcgataacatgatggtcaccgctgacaaccgcagcctgtggttggttatcggcctgataaccctggcagtgatggttttcgccggcggccatttttaccgcagtgcatggaaaagcttgctgaacggtgcggcgacgatggatacgctggtggcgctgggtactggcgtggcgtggctttattcgacgaaacacttgcccacgagtaaaaccgaacgccgtcgccgcctcgatatgtcctttcggcactgccataaaagcaccacggaacgtttcggtaaaataagcaccgtagataaaaccgagagtgataataccagcgaccatcggatcgatatcaatctgcccgacgcccatcgcctccgtcaccgtgtttagcgcaatctgcaaaccgtagaaaatcagcagcatcaacactaagtccggcacgccacgaatcagcgtggtgtacccttcgaaaatcagccccgaaagccgattttgcgagagcttaccgccagcgccaattaaaccgatgattacagcgagcactacagagctgatagccagctccagcgtgacgagcgcaccctgtaaaataacaccataaacatcaaaatcgaagtactttttcgctaatttctcgtaagtaccgtcagcgcgcatttcggcaaaggctttgttcagtgcttcgcgcagttcgttatcttctttacgcaggcccatgccggtccctacgccaaacagtttttcatcttcgctggcagcgacctcatcctggaacgcggcatcaatacgtccggcagtcaggtcagaataaatgttgtcctgcccctgatacgagacgatttcaatgccttttggtgcccaatgttcattaccgaacgtctcctgggtggtgccctgcaatacgcctacccgtttgcctttcagcgactcgactgtcggctgaatgtcagaatttttcgccaccaccaaacgagaatcggcagcgtacagtttgtcggtgaaggctatttcttgctgacgtttttccgtaatggaaagcgatgacatgatggcgtcaatcttcttcgcttttaaggacgggattaacgcatccagcggattttcgacaaacgtacattgcgtattgatgcgtttgcataattcctttgccagatcgatatcgaagccaaccagttcgccttgtgaattttttgattcaaatggcgcataggtcgggtcggtaccgatgcggatgttttgcggaatcgcagcaaacgccgcagttgcgctggagaaggccagaaccagagagagcgatagcaccagttttttcat

SEQ ID NO: 8837 - DNA, 3414 bp, Homo sapiens
  SIMILAR (3414)..(2320): 1001254mologous to Escherichia coli UNKNOWN PROTEIN FROM 2D- PAGE (SPOT M92) (FRAGMENT),accession number D90883,Smith-Waterman Score=1867.
  misc_feature (1)...(3414): n = a,t,c or g
atttgncacgcgttagctgcccggatgtaggaatccaggttgccaactggggctaaagctaaactttgcattttgtcagtcattcaaatcctctcaatcgatatcttctggcgcttcagtggtagcaacaactgtgccagagcttaagagcaacgaggttatcattcactgttttatcagaccgtgattttatccacaagttcaatgcaagcttgtgaataaattacgcacaaaatgtgacatagagatgaaataccgggaagagacaacggtgtctctttccctgctacggaacccattgcagggaaagagtataacacgcttttattattcaggcgtaaagtggcgtaaatgttgtaccgtggcaagccacgctgccacccagccaatcatcgagcataccagcagcaatagcaggcattcatcgaatgataagccattgatatcaaacttcgttccgaaaacctgtgccacttccgcaaccgccgatgacaatcgcagcaccagaatttctgacaaaattaatgacaacaatgcgccagaaaatcccagcagtgcgccaccatacaggaacgggcgcaggatgaatccatctgtcgcaccaatcagtttctgtacgttaatggagtcacggcgagcaaagatactcagacgcacactgttaccgatgacgaggaacacggccgccaccatcaacacgccgatcatcgccgaaacgcgcccgaccagcccggtcaacgccgccagacgggcaaaccagctgtcatccatccgcacttcgtcaatgccgttaatctgcgtgatacgatcacgcagcgtattcagtgattccgtcccctggaaatcgagtttcgggatcaccaccgccactgccggaagcgggttttcttccagcatatccagcgcaccaccaaaaccagaccagttacggaactcacccagtgcgtcttcacgagaaagatagttcactttctccacgccttgctcggcctgcaactgtgccaccacgcccgcagcagcgtcatcgtccagcgttttttgcagataaacagtgatttgcggtgacggataatactgcgtcgccgcctggttaacgtttttgtacaccatataacagacgctgggcagcgtcagagaaatggcgataaccatcaccgttaaaaacgtggcgaacggtttgcttttcagatcctgcaatgcgccgtggaaggcatagcgcaccaacatacggatgcgaagatcaataaccatatgctttgccagctgttccgtaagtgagttggtaattgccactgcatatatcaacacgacgacaaaaaaggcgatgaagtacagcgtggtaatcagattaccaatcttcttgccatagtagtgtgttaccgcgcccgttatcccttcacctgctgatgtttttgatgagaggatgaactggcacaaggctttatgtggccaatatgttaaaggccaggcgaccagagcagtaataaacaggaccacagcccctgccgaacctaactgaataggaaggaagagcgtgcctgcaccaacggctgtgccgtagagcgcgaaactccacagagtttcttctttagaccaaatattagacgggtaccgagctcgaagcggagcttcagtctgcagaccaacgattttctcaagctgcttgttgatgtagccagcgtcgtgagaggtgatggtgaaagcaacagcggtgtcaaagtcaactggcgcgtgagtgcggttttccagtttaacgccttccattactttgtcccacagggtggtggtcgcttcagtagcgccagccaggaaggactcgtcaccctcgtacggagtgtagtttttctgaatgaagtcacggacgtttacttcattctgccagtcaccaccaccgataatgttgccgatcgtaaccggaatcaggttatcagtgatgaaattcatcacggtcaggtgagaaaaattttccggtgcagaaccgactgcggtccaaaattccggggatgcgaagtcgcggattacaatacccatcgggatcataaacatgtttgcgatactgtgctcaaaaccgctggcaacaaacatcgcgaccggcagcaccataatgaacgctttgtccatcaggctgcggccagaataactcatccatactgccagacataccatcaggtttgccaggataccaagacagacggcctcaataaaagtatggtgcactttgtggtcggcggtttgtaggacgtttagtccccattgaccatttgcggtcatatacgggtgaccgaagctagaatgaccctgtacagaaatgactgtaccctcttcttcagtagtaaaacgacctaaagagaaacggatagagctatgtgccagctcgtcgttcagccccagcgcgcgcagcacgtaggacggttcgaggcttgctgacgtacaggcggaacctgaagaaactgcgaggtctttcagcgccataatcagcgactcaccttcaacgtagttgaagctgacgttgagaatgttcggcgcaccgtgttccaggtcaccgttcaggtaaacttcttcgatatctttgatgccgttccacagacggttacgcaggccgcgcagacgttccatctcggtcgccatctcttcttttgcgatgcgataggcctcgcccattccgacgatctggtgaacaggcagagtgccggaacgcataccgcgctcgtgaccgccgccgtgcatttgcgcttcgatgcgtacgcgcggtttacgacgtacatacagcgcaccgatacctttcgggccatagattttgtgaccggagaaagacatcaggtcaactttcaactggctcaggtcgataggcagtttacccacgctctgggttgcatcaacgtgatagataatgccacgagcacggcacatttcgccgatagccgcgatatcctgcaccacgccgatttcgttatttacgtgcatgatggacacgaggatggtgtcgtcacgcatcgctgcttcaagttctttcaggtcgataatgccgttacgctgcggtgccaggtaggtgacttcaaaaccttcgcgctccagctgacggcaggtatccagtaccgctttgtgttcggttttgctggtgatgatgtgcttgccttttttctgataaaagttggctgcacctttgatcgccaggttgtcagattcggttgcaccagaggtaaagacgatttcacgcggatcagcgccgaccagatcggcaatctgattacgggcgatatctaccgcttcttcagcctgccagccgaaacggtgagaacgggaggccgggttaccaaaggttccgtccatcgtcataaactgcatcattttctcggcaacacgcgggtccaccggcgtggttgcggagtagtcgagataaatcggtaatttcat

SEQ ID NO: 8838 - DNA, 1777 bp, Homo sapiens
  SIMILAR (1)..(768): 761254mologous to Salmonella typhimurium inner membrane lipoprotein,accession number AF035376,Smith-Waterman Score=1023.
atggaaataagctttacccgcgtggcactgctggctgccgcgctcttctttgttggttgcgatcaaaaaccacaacccgccaaaacccacgctactgaagttaccgttcttgaaggcaaaactatgggtaccttctggcgtgccagcatcccgggcattgacgccaaacgcagcgccgaacttaaagaaaagattcagacccaactggacgccgacgatcagctgctttcgacctataaaaaagattccgcgctgatgcgctttaacgactcgcaaagtttatcgccgtggccggtaagtgaagcgatggccgatatcgtcaccacctcgctgcgcattggcgcgaagaccgatggcgcgatggatataaccgtcgggccgctggtgaatctgtggggctttggcccggaacaacagccggttcaaattccgagccaggaacagatcgatgcgatgaaagccaaaaccggcttacagcacctgacggtcatcaatcagtcgcatcagcaatatctgcaaaaagacctgccggatttatatgtcgatctctccaccgtcggcgaaggctatgcggccgatcatttggcacgcttgatggagcaggaagggatttcccgctatctggtgtcggtgggcggcgcgctgaacagccgtggtatgaacggtgaaggcctgccgtggcgggtagcgattcaaaaaccaaccgataaagaaaacgcggttcaggctgtggtggatatcaacggtcatgggattagcacctctggctagctcgcgaggcgattaagatgggtacggccagggtctttcccgtgttatcgatccgcaaaccgggcgttccatcgaacacaatctggtatccgtgacggtgattgctccgacggcgctggaagccgatgcctgggatactggcttgatggtactcgggccggagaaagctaagacgtgttcgccgggagggctgagggggacggaatcactgaatacgctgcgtgatcgtatcacgcagattaacggcattgacgaagtgcggatggatgacagctggtttgcccgtctggcggcgttgaccgggctggtcgggcgcgtttcggcgatgatcggcgtgttgatggtggcggccgtgttcctcgtcatcggtaacagtgtgcgtctgagtatctttgctcgccgtgactccattaacgtacagaaactgattggtgcgacagatggattcatcctgcgcccgttcctgtatggtggcgcactgctgggattttctggcgcattgttgtcattaattttgtcagaaattctggtgctgcgattgtcatcggcggttgcggaagtggcacaggttttcggaacgaagtttgatatcaatggcttatcattcgatgaatgcctgctattgctgctgtcctctatggtcacattttggtgccgtaatttattcacaagcttgcttgaactgtggataaatcacgctgataaacaggatgataactcgtgtctaagctcggccagtgtgtacctgaaggcgaaaatgatgaaggtgatgctgccaatgcagttattatccagtggaactggattctatcgggatcgcttagagaatagcgggggccgctacgaatcccggcgctcattgaccaggcagtttcgggaggagccgactgcgccaattccccgcgagtgctctcagagaatagacttcttgctcttcgaaacaccaagtgtatccgcgagctcttctgcaggcttctggctgcggtttggatcgactgcaggctga

SEQ ID NO: 8839 - DNA, 609 bp, Homo sapiens
  SIMILAR (267)..(193): 681254mologous to Escherichia coli flagellar protein FlhA,accession number U88319,Smith-Waterman Score=82.
agtcgataacccacttccattcccagagaatcttccagtggtacatggttccaggtcgcttcgacaacggtattattctcggccattttagccggtttgggttcggcaagcgctttttgtttgggtccgggtatcccccaggccaggccgaacaattcggcagtgaacagcaaaaattccaggttcggcattcccaggccccaggccgagtaacccgagcagggcggcgtttaccaccatacggctggggtactgaaaaagctgattccaccatctgctcgccaacatcctgatcggtgctgacacgcgtaacgatgacccccgcggcggtagaaatcaccagcgccggaatttgtgccaccagaccgtcgccaatggtcaatagcgcataactttccgccgcgtgtcccatgctcatgccatgttgcagcacgccgaccaacaacccgccgacaatgttaatgaccatgatgaggatcccggcgatggcatcgccgcgaacaaagttacttgccccgtccattgagcccggaaaatcggcttcctgagtcactttcgagcggcgtttttttgcctcattttcaccaacaatccggcgttaagggcgca

SEQ ID NO: 8840 - DNA, 2061 bp, Homo sapiens
  SIMILAR (2037)..(1687): 961254mologous to Escherichia coli Hypothetical protein 126: PIR:Q3ECTC,accession number D10483,Smith-Waterman Score=581.
ttatgggttcgtgcctcttttcaggccaggtgtaacagcaacccccggatgcccgggtcccacaaggtttgtcggggtcagcgggtagagtttttccgggatgccatcttcctgccagcgacgaacgatttccatcgcccggcggtccgaggacaaaatagcattcccgagcggtttgtcgtttttatccagcaaaaacaagccctttccctgtgcggagatgccgataccgacaatttgttccccgctaacaccagaatgagtaagcagggcgcgaatgacagccatgcagcattgccacagttctgccatatcgcgctctgcccagcctggctcatccacggctttcagcagatcagctccctgcggcacatctttaacaaacatgtcgcgaacctgattccccagtgcgtcgctaaaggctttgcggtcgagatcggtgatgacttccacgcccgcttctttcatgccgtcgatgattttttgctgatcttcagcaaccagtttgcgctgatagttacccgcttcttgtgcagatgaaactagcgcctcacaaaagttgaaatgccgttttatggcaaaggtccgcaacaaagagcttctctgtgcttcacaaggtctgaatgaccatatcaatatgccatgggtgatcctctcttccggtgtcgacgaaaaactgttcccgcgtgccgtacgcgtggcaatgacggcgggcgcatcgggattcctggcaggccgtgcagtctgggcatcggtcgtcggtttaccagacaacgagctgatgctgcgtgacgtttgcgcaccgaaattacaacaacttggcgatatcgtcgacgaaatgatggctaaacgccggtttattccgttgctgcggcgatgggtcgacctggcgcttactcgttggttgatcacggtatcaaagccatgaacggcgcactgcgtgataaaaaatatggcggctggtatgccgaagaacatattaaaggcatggtagtgcctggcacgttgtttgaagagctgggctttaactacatcggcccggtggacggtcacgatgtgctggggcttatcaccacgcccgccaaaaggcgaatgggcagcaataatgcgaccattatgtgcttcaacaatgttcaggcaaatcgccagccccagcccggaaccgccgctggcacggttgcgggaaccttcggtgcgataaaaacgttcaaacaatttttgtagctgatcgtcactgacacctggcgcactgtcggcaaaggtcaggcgcaccgttttgtcgcgctccgcgctaaagcatatctcgtggggcaagacggtgtcgctcatcaccgatgcgcgcttctcgggcgtgtcgacgggcgcctgcttcgcaaccaacccccggttggttttttccccgggaaagggcccaaccggaaactcatccagtttgcgctcttccagccacttacgcacaatcgcctgatgttcttcggtgcatttgccgatttcctgcatgcagatcagaccttcccaggccagataaccgctgccgtcaaaggccagtttgttcggttcgataacaaggaccgccgccaccgccgcgccaccataagaaagctcctcatgatcatcacggcggtcatggtccaggcaaacatcaccgctaaatgacaaatgccgggtaacaatccggcattcagcgcgctgctcgtagcgtttaaacaccagttcgccattgctggaggaatcttcatcaaagaagtaaccttcgctattaaaaccagtcagttgctctggtttggtcagccgattttcaataatgaaacgactcatcagaccgcgtgctttcttagcgtagaagctgatgatcttaaatttgccgttcttctcatcgaggaacaccggcttgataatctcggcattcaatttcttcggcttcaccgatttaaaatactcatctgacgccagattaatcaccacattatcgccttgtgctgcgagcgcctcgttcagcttgttggtgatgatatctccccagaatttgatgaactcgagctccgtttcagcgaagtccat

SEQ ID NO: 8841 - DNA, 2704 bp, Homo sapiens
  SIMILAR (686)..(1615): 811254mologous to Escherichia coli arginyl-tRNA-synthetase (AA 1-577),accession number X15320,Smith-Waterman Score=1227.
ctgattagccgagttccctgtcatcatggtgactgtgatggccatgtttaccccccgcacgctcgagtttgatgcgtttccgaccattctgttgtttaccacgctgttgcgtctggcacttaacgtggcttcaacccgtatcattttaatggaagggcataccggcgcggcggcggcagggaaggtggtcgaagcgttcggtcacttcctcgttggtggcaatttcgctatcggtatcgtggtgtttgtcattctcgtgatcatcaactttatggtcattaccaaaggtgccgggcgtatcgcagaagtgggtgcgcgctttgttctcgatggtatgccgggtaagcagatggcgattgacgccgaccttaacgccggattgattggtgaagatgaggcgaaaaaacgccgctccgaagtgactcaggaagccgatttttacggctcaatggacggggcaagtaagtttgttcgcggcgatgccatcgccgggatcctcatcatggtcattaacattgtcggcgggttgctggtcggcgtgctgcaacatggcatgagcatgggacacgcggcggaaagttatacgctattgaccattggcgacggtctggtggcacaaattccggcgctggtgatttctaccgccgcgggggtcatcgttacgcgtgtcagcaccgatcaagatagactggtcgacatcaccatgacgcagaaccagatcacctacgatcgtctcaacgtgacgctgacccgtgatgacgtgatgggcgaaagcctctacaacccgatgctgccaggaattgtggcggatctcaaagccaaaggtctggcagtagaaagcgaaggggcgaccgtcgtattccttgatgagtttaaaaacaaggaaggcgaaccgatgggcgtgatcattcagaagaaagatggcggctatctctacaccaccactgatatcgcctgtgcgaaatatcgttatgaaacactgcatgccgatcgcgtgctgtattacatcgactcccgtcagcatcaacacctgatgcaggcatgggcgatcgtccgtaaagcaggctatgtaccggaatccgtaccgctggaacaccacatgttcggcatgatgctgggtaaagacggcaaaccgttcaaaacccgcgcgggtggtacagtgaaactggccgatctgctggatgaagccctggaacgtgcacggccgtctggtggcagaaaagaacccggatatgccagccgacgagctggaaaaactggctaacgcggttggtattggtgcggtgaaatatgcggatctctccaaaaacgcgcatccacggtatctacatctttcgactgggacaacatgctggcgtttgagggtaataccgcgccatacatgcagtatgcatacacgcgtgtattgtccgtgttcgcgtaaagcgagaaatgtgagcgaaggaggcacaactggcgtgcaggcgccggggttatcatccgtgaagatcgtgaagcgcaactggcagctcgcctgctgcagtttgaagaaaccctcaccgtggttgcccgtgaaggcacgccgcatgtaatgtgtgcttaccagtacgatctggcctgtctttctggggtttgggtggggggtggagggggtggttggtggggggggcgagtggggggggggggtggggggctggtgggggcctgtaggagctagtccgatccgggtattcccccggttacgccgctgccccgggggtctccggggccacccggggagggcgcccgccatccgatgggggaagcttttccccggggggtacaaccggccgtggttatgaccgcggaaaccgtgcgttacttcctgatgtcgggccactatcgcagccagttgaactacagcgaagagaaccggcgtggaatgtgatcgggtctttttctgccggttcataaccacgacttttttggtcatgatatgcaggaactgcgggcctttcaggtcgcgcatgttctttagcgtggtgataagccccagcacatcgtgaccgtccaccgggccgatgtagttaaagcccagctcttcaaacaacgtgccaggcactaccatgcctttaatatgttcttcggtgcgtttgagcagctctttaattggcggcacgccagagaaaacttttttcccgccttcgcgcagtgaagagtaaagcttaccggaaagcagctgtgccagatggttgttgagcgcgccgacattttcggaaatcgacatttcattgtcgttgacaatcaccagcatatcacgacggatatcgcccgcgtgattcatcgcttcaaacgccatgcctgcggtaatcgcgccatcgccaatgacacagacggtgcggcgatttttgccttctttttcggcagcaaccgcaataccaattccggcactgatggaggttgatgaatgcccgacgcttaatacgtcatattcgcctttcgccgcgccacgggaacgggtgcagacccgcccttttctgtgtacccggggatttgtggcgttgcccccgcggaatgtgtcttggtgtcccgcctgtgccgtttcccggttccaaagagctggtcgagtaaatagtcggcgcagttcgtcgcagagtttcggtaaactctctttcggcaacagtcgtaactcctgggtggagtcgaccagtgccagggtcgggtatttggcaatatcaaaactcat

SEQ ID NO: 8842 - DNA, 4392 bp, Homo sapiens
  SIMILAR (1)..(654): 981254mologous to Escherichia coli K12 citrate-dependent iron transport, periplasmic protein,accession number AE000499,Smith- Waterman Score=1060.
  misc_feature (1)...(4392): n = a,t,c or g
atgtgggcattaatccgttttctttttgcagccctgctgctggtgatcagccacgcctttgccgccacggttcaggacgaacacggcacgttaacactcgaaaaaacgccacaacggattgtggtgctggaactctcgttcgccgatgcgctggccgccgtggacgtcatcccgatcggtattgccgacgataacgatgcaaaacgcatcctgcccgaagtgcgtgcgcacctgaaaccgtggcagtccgtcggaacgcgcgcgcagccgagcctggaagccattgccgctctgaaaccagacctgatcattgccgacagcagtcgccatgcgggggtttacatcgccttgcagcaaatcgcgccggtactgctgcttaagtcccgcaacgaaacctacgctgaaaatttgcaatctgcggctatcatcggcgaaatggtgggtaaaaagcgagagatgcaggcacgtctggaacaacataaagagaggatggcgcagtgggccagccagcttcccaaagggacacgcgtggcctttggcacatcacgcgaacagcaattcaacctgcatactcaggagacctggaccggcagcgtgctggcctctctggggctgaacgttcccgctgcgatggcgggtgcgtccatgccgtcctcgcctggtccgctgggcgcttcatgtccaccgcgatgttctatccatgcaattacggttacatcaaccacaccctgtctctggacgccgggttctgtgatccgttgccgtccggttggcgttctgaaaatgaccgacgaagccggtgaagatgcgaaactggttgcggttccgcacagcaagctgagcaaagaatacgatcacattaaagacgttaacgatctgcctgaactgctgaaagcgcaaatcgctcacttcttcgagcactacaaagacctcgaaaaaggcaagtgggtgaaagttgaaggtatcgaaaccgatcagaactgtgaaacccgcattaaaggtctgttcgccgtgggtgaatgttcctctgttggtctgcacggtgcaaaccgtctgggttctaactccctggcggaactggtggtcttcggccgtctggccggtgaacaagcgacagagcgtgcagcaatcatcctcgttctccgggcacagcgcggctgggtacgtcccattccccgcaaagaacagcaagagattgccgaacgctttatccgccagcttggcattcgcacaccttcaactgaacaaccgattgaatttctctccggcggcaatcagcaaaaagtgttgctttcacgttggctactgacccgaccgcaatttctgatcctcgatgagccaacccgcggcattgatgttggtgcccacgccgagatcatccgcctgattgaaacgctatgcgccgatggtctggcgctgctggtgatctcctccgaactggaagagctggtgggctatgccgatcgggtgattatcatgcgcgatcgcaaacaggtggcggagatcccgctggcagagctttccgttccggcgatcatgaacgccattgcggcgatcatctcggcacgttttggtgtcccccgaacccaggtcaggacatgggttgccctctatgaaaaacatggagaaaaaggtttaattcccaaacctaaaggcgttagtgctgatccagagttgcgtattaaggtcgtgaaagctgtgatcgagcagcacatgtcccttaatcaggctgctgctcactttatgcttgctggtagtggttctgtagccaggtggctgaaggtctatgaagagcgcggagaagctggtttacgcgcgctcaagattggcaccaaaagaaacattgcaatatcagttgatccagaaaaagcggcatcagcattggagctgtcaaaagaccgacgcattgaggatcttgaaaggcaagttcgatttcttgaaacgcggcttatgtatctaaaaaagctgaaagccttagctcatcccacgaaaaagctctcagcaagccttgacagtatgcggacggttaaaagcgtattagtgagatttatcacgagaataaaaggcgatacggatacccgagggaacgctgtctcttctcgagaagggaacgattacataagtgttacgcctagtgactctcctagcgcgatatgcagggatcccttaaaggagtggaacgcccttttcaaaaatagggggcacaaaggtaaagttcgtcttcattatcatgcttatctgacagctgcttcacgtaatgatagccatgcccgtgccacgatggctggcgaactcaccatgattcacggcgtcccggcaggctgcgacgaacgtgagtatttgcgtgagctgcaaaatgcattgctgtggattaactttcgtttttatcttgcaccgctgttctggctgattgtggggggaacctggggacccgttacgctgatggggtatgcgtttttgcgtgcatggcaatactggctggcgcgatatcagacgccgcatcatcgtttacagtccggcattgatgccgtgcttcatgtactggattgggtgccggttcgtcttgcgggtgtggtatatgccttgatcggtcatggtgagaaagcgttaccggcctggtttgcttcgctgggtgatttccatacttcgcagtatcaggtgttaacgcgtctggcgcagttctctctggcgcgtgaaccgcatgtcgataaggtggagacgccgaaggcagcggtttcaatggcgaagaaaacctcgttcgtggtcgtggtggattctaacgacaacttcctcgctaacatccagaaagacggcacctactcggtgatcccgcgttctccgggcggtgaaatcaccccggaagggctgatggcggtaggtcgtatcgcgcgtgaatttaatctctacaccaagatcattacccggttaatagatgtttgtggccaataccgcctgctttgcccccggcttccgccaacagatggccgatatcaccggacgtccgtcgttgatgacgaccttcacctttggcaaataccgtggcaaagcggtttccgacgttgccgaacgcgatccgggctatctgcgctggtcgtggaaaagcagcagcaggaaaacgccggtgaaatggagctggctgaccttgaaggtttctaccgcgatgcgaaaaagcattacgatgaagatgaagagttcgccgagcgcgcacataaaagtgatgccagtgatatccgggaagtcgaaacccgcgcatttggcttcagcaaagaagccgatttagtggcctctttacttgaggatgaaagcgcgcgccccgcgggaaacaaattctcccgagggatatacccttccggggaagcatggtctccctgtcgaccaatctggtctgacgtgaaaanggtaaactatcagctgatggtttatctatacaaaaaaggagtcgggatgaacgaacaatcccaggccaaatcactttaccaaacatattggtataaacagcagccccgttaccttccaccggaacatcggcaacgccatcggcatcaatcagcaggcgtgtctggcattcgccattacgttccgctccgccctcacgttatacagcccatcacagccaacatcagcacaatgactgcctcactaccgccaacaatatgcagcgccagatcgataatcggcgtacgcagcagcgcaattaacgccccagcccccaacgccaacagcaacggttgcaccagccaacagcataaagagaaagctggtcgccgttgcaccaaccgccacgccgcccaaataaaccgggctatcaagatgaccaattaccgccgtatcgaccagtcccagcaacggaacggtgatattggagaaaatcatggagatatgttacagccagtcgccgttgcgaataaccccaaccgccagcccttcaatggtgaagctctgctgacgaaggtcaacgacaattggtttaaactcgctattttctggcaacagttcgactttattgccctgttttttcaggcgcttaacggtaacttcgtcatcaatacgtgcgacaacgacctgaccgttacgttgtcctttgagatagctgtacactgccttttccgaagtggtgttaagtgcagatcatgtttcacggttaatcagcagggtgttcggtacatgtgtgtgcgcatccgagggagctgtctcaggcttgcaacaatggttgcttgttgcacttggcagtttattgcccccctggattgctggtttggattgaaaccggtgatttaccacggcactgtgtggatgtcgatcttggatgacacggctgcagcacgcaatgccagaaacagacacagaagcagcaagcagagtgcaagtggagcagagggaatgcaggaatga

SEQ ID NO: 8843 - DNA, 3525 bp, Homo sapiens
  SIMILAR (2341)..(3150): 881254mologous to Escherichia coli deoxyribopyrimidine photolyase,accession number K01299,Smith-Waterman Score=1253.
atgtcgggacatgctgaagccgccatatcgcagaaattaagtgctgaggtggtggttcggcaaacaaagaggtcatctctatcaggcaaacaaagcgttactgacgccggggcacacactgcaaaacattacctggttgcagaagatgcgcacgctgggtcacggcggcctgtcctccgtcatcatattgcgttcgttattggtggccacttctgccgcacacacgcaaccttaaacacgggcctgcagcacggtcaggcgtaccgcgatgtggccactggcacacaacagcaattgctgatcgaagcgcacacatctttggtctgggtgcgccagtttggtggtcaactacttcgctcacgacatccgcgtgcattcgcctgccacgtcacggcgcatcctgcccggtcggtcatgggcgtctcctgctctgctgaccgtaatatcaaagcgaagatcaaccgtcaggggatctggatcgaaaaactggaacataatccaggcaaatatatcccggaagagctgcgcaaagcgggagaaggcgaagcggtgcgcgttgaccttaaccgtccgatgaaagagatcctcgcacagttgtcgcagtatcccgtttctacacgcttatcgcttaacggcacgattatcgtcggtcgtgatattgctcacgccaaactgaaagagcggatggataacgtgcgatcggaaaccgtcgatttctttggcgataaaatggagtgggtggcaccgcacatgggcaccgatgttgcgctgatgctggggatcgcccatacgctggtggaaaatggttggcacgacgaagcgtttctggcgcgttgcaccacaggttatgccgtcttcgcctcttatttgctgggcgagagtgacggaatagcgaaaaccgccgaatgggcagcagagatttgtggtgttggcgcagcgaaaatccgcgagctggcggctattttccaccaaaataccaccatgctgatggcagcaagggcgcccattccgcccattccaaggcttgccgcaaacttgtttgggaaagggccgaatccggtgccgggccctcttccgcttaattaccgccaattctcctgcgtcagcctcccaagaagtcgtggtgtatgggctagcgtgaatggtgaaggtcagcgcgttcctggattccgggtgcaggctgtcgaaccattgctgccggagatacctttaacgcttgaatgcctgacgaaagaagatgatggtgacgacgatggagagaacaatcagcaccagattggcgacttctacgttgtgcatcagccatgcgcatacgaagatcatcaccacgctgccaatttgctgaagctcattggccggaagtcgggttcagaaccaatgtctttcaccattccacgaacatggcgatgtaaaccaggtgaatgcgccatcaagccgcggatctttcggcggatagcacttcgaaagcaagctggctgggttagctttaaacaggccgttaccgacagcgatagtccccagattgatcatttggcaattgaaaaactgaccagcgccagctttgcttttactgtcgaacagccgcagcaatggtcagcagaatccccttatctttaccatctggtcatgacgctgaaagacgccaacggcaacgttctggaagtggtgccacaacgcgttggcttccgtgatatcaaagagccggaagactcggggagcgatgaagtccccgaccgttggggtgactgtattgcggcacgcaatcttggcatcaccacatttctgagcacgccaattcacttaccggatggatcattctatggcacgctttgcgccgccagcagtgagaagcgccagtggagtgaacgcgcggaacaggttttacagttattcgccggactgattgcacaatatattcaaaaagaggcactggttgaacagctgcgcgaagccaatgctgcgctgattgcgcaatcgtataccgactcgttaaccgggctaccgaatcggcgggcgatttttgaaaatctgacgacactgttttccctcgcccggcatcttaaccataagataatgatcgcgtttatcgatctggataacttcaaattaatcaatgatcgttttggtcataatagtggcgatctgtttctcattcaggttggcgagcgccttaatacgctccagcaaaatggcgaagttattggtcgtctcggcggtgatgagtttttagttgtttcactaaacaacgagaatgcggatatttcgtcgctgcgagaacgcattcagcagcaaatacgtggagaatatcacttaggtgatgttgatttgtattatcccggtgccagtcttggcatagtagaagtcgatcctgaaacaaccgatgcagacagtgcccagcatgctgccggtccagttgtgctcggaaacagcgttacccacctgttttataactatcagtatgaagtgaatgagcgggcgcgggatgtggaagttgaaagagcgctgcgtaacgtggtgtgtgaaggatttgatgacagcgtgatcctgccgcctggcgcggtgatgaccggtaatcacgagatgtacaaagtctttacgccttttaagaatgcctggctgaaacggctgcgggaagggatgccggagtgcgtcgctgcgccaaaagttcgtagtagcggatcgatagagccctcgccatccattacgctgaattatcctcgtcagtctttcgatactgcgcattttccggtggaagaaaaagcggcgattgcgcaattacgccagttttgccagaacggtgccggagaatatgagcaacaacgagattttccggcagtggaaggcaccagccgtttgtcggccagcctggcaacgggcgggttatcgcctcgccagtgcttgcatcgcttgttggctgaacagccgcaggcgctggacggtggggccggtagtgtctggcttaatgagctgatctggcgcgagttttaccgtcacctgataacgtatcacccctcgttgtgtaaacatcgtccatttattgcctggacggatcgtgtacagtggcagagcaatcccgcacatttacaggcctggcaggaaggcaaaacggatacccgattgatgatgccggctatgcgtcagctaacagcaatgctggtgggtacgcggtgttcccacccagagggcgcgatttgttcccagagccgttaccggcgctttcctgtgttatggcccaaccttggctttaactttcctcgctcacgcacgaggacgccgacgttaagaacccatcagtcgcgttcagacgggttcggtggtgtactcgatcccaccaaaagcagcggctacttgatcgtcgatatttataatgaaatcctgcgcatgctgtcaaccgcagtggatccaggctattacttctattccaccaagcgctccgagcccagctcaaaactcgggtcacctgtcggcaccggcctgggcctggcgctcacgcgcgagatgaacaaggtagtgaagaggttttga

SEQ ID NO: 8844 - DNA, 1728 bp, Homo sapiens
  SIMILAR (46)..(2): 931254mologous to Escherichia coli O157:H7 putative fimbrial usher,accession number AE005465,Smith-Waterman Score=72.
tcaccccagccagatagacactaccgtcatcatcgacaaggcccactggtctgcatcgttatcattttttacttctgcgccaaacggtggatggctgccatcttgtaaacgcagcaccgccatcgctttttgaccactgatgacggcaaatttgcggtagccaatggctccttcagttagcgtggcttgcaccaccgactgggttgcttcggcgttttccgccaatttgttgaggtcgatatacgcctgattgcgataataattgttaacgtcagaaacgacggctttaccaaacatattggtataaacagcagccccgttaccttccaccggaacatcggcaacgccatcggcatcaatcagcaggcgtgtcccgccaatattctgggtacggtgaagtgcgccgccgtgggtagtaagcgttgcgccgccctgtaacgacaagcccgcagaggtgtattgcccttcatggtagttcgcactgaggtcaacctgcgccagcgaaccatcatggctgtagtagccatcaacgctggtgtgtttgtcactggtgccgatgttcaactgatagtgagtcgcgtcatcgacacggctaaaataaccgacctggctgctgtccgtcccactgccatagttgccgttatagctaacggtaatgcccttatccgcccggttgtcatactcgtagcggtagccagtcagggaaacgctcatattacgaatgctgcccatattgaaatagtgggagagcatgatgttgtagtttgtctgctcctcacgatcccagtaggtatggcgggtatagttgagataaaccgaaacacccgcatcgcggaagttctggttataagtggcggtgtacatctctttgtcgttgcccgtacggaccatttcgctgtcactggcatccagatactcgctcatggtcataaagttctcttccgagaagcgatatccagcgaaagtgacgcggctgttgagctggtcaaagtctttggaataactcacacggaaggagttaccgtccagcgaacctttgccataagcggtgtctttatccagtttggtatgcgaatgagtaacttcaaacgtctgagtcgaaaaatgcaagcagcaatcgcgggtttgatcagatccaccgcggaagatcgacgcatattcacagccgatcactccagcaccatagataggtacatggcgccggtcgtggtgcatgctgagaattgagtcgctgtcgtaaatgcgtggatgggtgaaatcaacatctgtcggatgatatggacgagagccgcaggcaataacaaatttttcagcggttagtgtttcaacgctgccgtccgggcaatccagcgccaacgtatgctcgtcaacaaagcgagcgtttccctgcaatatttcacagtgattacgttcgtaaaatccctgacgcatgcgcgtttgttgattaatcacgttatcggcatggttaaggatatcggcaaaagaagagcggagcagtcgggaatggtcgctgtaaagtgggttttgattgaattctataatgcggctgacggcgtgacggagagctttcgacgggatggtgccccagtgggtgcaaccgccgccaacattttgataacgctcgataactgcgacgcgcgcaccttgcttaaccaggcccattgcagcgccttcgccgccggggccggaacctattactatggcatcgtaatcgtaggaatgtggcat

SEQ ID NO: 8845 - DNA, 960 bp, Homo sapiens
  SIMILAR (448)..(906): 981254mologous to Escherichia coli similar to,accession number D90889,Smith-Waterman Score=804.
atgcatgaggtcactctagaagatccctcatcggcacagatactgattactgtaatcaccggtcatggtgagatcattacgctcaaaagaagtagtcgcaggcagaacgatatccgcatgtattgccgccgccgtccagaagcattcagagatcaccaccagctccggtttttgccaggcacggatcaggcgattggtatcctgatgatgagtaaagttggcaccgcccgcccaccagataaaacgaatatccgggaaatgtcggttcataccgttgtgttgatatgcgccaccagggttttccagtgcttcaacaatgcgggcaacagggattttatccaccgcatcgcagccacccggcaagctgccctgcatggaagagagcaccgcagaacgccgcgtggggttaccaccattggcaaaatggtaagaaagaccaaaaccgccgccggttgggaacatgaaagtggtttctatctggacggtgtcgtgaagctgaaccgttttaaaagtaacgtagcaggtaaaatgagcagcggtggagccgccaatggcagttaccacagcaacgggctgggcggtcacattgaaaccgggatgcgatttaccgatggtaactggaacctgacgccgtatgcatcgttaacggggttcaccgctgataaccccgaatatcatttatccaatggcatgaaatcgaaatcagtcgatacccgcagtatatatcgtgaactgggcgcaacgctgagttacaacatgcgtctggggaacggtatggaagttgagccgtggctgaaggcggctgtgcgcaaagaatttgtcgatgataaccgggtgaaagtgaatagtgacggtaatttcgtcaattatttgtcgggcagacgtggaatataccaggcagccatagtgccggtgtggaatcccgtggaaccggtagctggtgtgaactggtcgttctga

SEQ ID NO: 8846 - DNA, 2618 bp, Homo sapiens
  SIMILAR (348)..(199): 921254mologous to Escherichia coli biotin sulfoxide reductase (bisC),accession number M34827,Smith-Waterman Score=228.
atgagtaaagttggaccgtccggcaccgagataaacgaatttccgggaaatgtcggttcataccgttgtgttgatatgcgccaccagggttttccagtgcttcaacaatgcgggcaacaggattttatccaccgcatcgcagcgacccggcaagctgccttgcatggaagagagcaccgcagaacgccgcgtggggttaccaccattggcaaaatgcatggtggtattttggtggaaaatagccgccagctcgcggattttcgctgcgccaacaccacaaatctctgctgcccattcggcggttttcgctattccgtcactctcgcccagcaaataagaggcgaagacgggcataacctgtggtgcaacgcgccagaaacgcttcgtcgtgccaaccattttccaccagcgtatgggcgatccccagcatcagcgcaacatcggtgcccatgtgcggtgccacccactccattttatcgccaaagaaatcgacggtttccgatcgcactggatcaatgcagatcagctttttcccgctgtcacgcagtgcagaaaagtaagaaagcccctgctcatcggatgcattccacgcaattttcagcatgcccggtatacagttgtaagatctgtttcgacagcccagttagcatgatcatcatcaacgatgattcggccgccaggtcaaagttaggcccgccggtgtctgttgtcgggtttatccagcagcaggttgctcattggcatccactccgcaagattttgctccatgttgaccatcgagcggtgtggctgacagacccagcgcgacttactcaccgccgaaggtgtcacgtttatcgcgttcgccgctttggtatcctgcgctcctgcatcagcagttgcagacaaagcagcagattgagatcaagcgtggtgatggatttcttcatgagcggcaacggggcgtccaggcgcgacgaacataatcagcaacaggctcactatgctacaggcaatcagaatcccgatcagcatattccatgcgccgataccaaccaccgctgccagccaaatccacagtgacgaaccgcaaacctgcgcaatacctaaggtcgagctggctacgcccgcgcgtaatgaaaacggccctaacgcctgactcatcgccacaccaaaacctaccgagaaacgacggctttaccaaacatattggtataaacagcagccaagttaccttccaccggaacatcggcaacgccatcggcatcaatcagcaggcgtgtcccgcccatattctgggtacggtgaagtgcgccgccgtgggtagcggcatgagttatgtcgactggtgctgtaagtgtcaggtcgtgtgggtagctttccgctctccccgtactatatttaaacccgtggtcaccaagcccctgccccctttctcctaccctccctttcttgcctggtcttttcctacacccctctaccccgactctgcggtcttgtctgccggcttttcttatgtaaatgacttttcattgccggttaggcgtccccctagctacacccacaccgccggcttgaacgcggtgacgctcccgccctccaatcaacaacttgccgaggctcgaacaccgcgcagggcgtgccgggcaaagaaactttctacctgtcgcccccccccacccacccccaccaatatgtatacggcccagcgacgtggaactctttttatatggggtttctataagatttcccacttaagccaattctacttccgagatctagtaacacccttaagatttggtcggagacttatggatatgtggggacatattagacgcgcacccgtgaccacgttcccagagttagacccgggttgccatactaaaattatccgcatgggagttattcggcggagcatgggcaccatcacgggccacacgaccgggatacggcgaacctttgtgcgattgtacagtcgcgccacgggggctatcggagcaccgcgtggtgccgcgccgtcctggggcggcggcgctgcattagtggccccggtgtctctcctaggtgggtgttttatggttgttacccacattctccccggtggttgttcttcttatcactattgctggcagtggaagaaggctgtaaccgtcgtgagtcttcctgcggtccgtttcttcttatcccttctcactgttatgaaaaatcggtgctaccgctgtgagagtggagacatgcgggcgggcaccgccagcccccccgagaagccacgacgaagtgaagacagccagcagcccccgaacacgccccagcttagaggccagagaaagcatcacagtcccaccaacacacaagaagaagtggacgacggctattctgcagctacgcagccacccaatcacctgacaacactcgacaacactccccatagaagagcacacacgacgccgagcgcgtgtagatgtggcagacacgagccgccacacacccacagacacagacaggcaacaactgcacagggacagaactcgcacgccgagcgagcgaacgaccggagcgttcaccaaatcgcgctggcaaaaacagtcccccatctagagtacacggcagcagcccgcgcgtgcccacgagccccttag

SEQ ID NO: 8847 - DNA, 503 bp, Homo sapiens
  SIMILAR (1)..(288): 861254mologous to Escherichia coli yejZ,accession number U00008,Smith-Waterman Score=433.
atggggctgtcggcacgcggcgcgctgcttattctcgcgctgtttttatttgatctactggtcgttgaacacggctggtgcgggcacatttgtccggttggcgcgctgtatggcgtgctgggtagcaaaggtgtgattaccgttgcggccaccgatcggcagaaatgtaaccgctgtatggattgttttcatgtttgcccggaaccgcatgtgctacgtgccccggtgctggatgaacaaagcccggtgcagtcaccaccgcgattgcatgacgtgcgtcgctgcgtgatgtctattctgaggggggatcctctagagtcgtggttgtacaggctcggttcaatctggtggttttgcccggagcggtgtgtggagttggtgttctggttgcccttggttgggatcgtgcgcgatgacggaattgatacgtgctccactcgtgtccacgccagtgctacgacgtcgcaattggcgtcgtccgactgctctggtgctgcgaacgt

SEQ ID NO: 8848 - DNA, 3747 bp, Homo sapiens
  SIMILAR (3504)..(2521): 921254mologous to Escherichia coli No definition line found,accession number U00039,Smith-Waterman Score=1604.
acccgccgcccggcgaggcgcaggcgcgacagcccagttcgcggcctcctgcagggagagttcgtggttggcgaaacgcgcgccgatggtctgcaccttgcccgcgtcttctacgacgtcgcgcagctcgccccctacccaggatgtcggctcgcagaggaagtagtggtttaccgtaccgttgtaacggttttcgatacgacgcagttcgccgtaacgttcaccggggctgatgttacagccgatggaacattgctggcagatgctcggcgcaaactgcatatcccatttacggttgtaacgctcggagtgcgttttgtcggtaaatacgccggtcgggcaaatttcgaccaggttaccggaaaattcgctttccagcgtgccgtcttccgggcgaccgaagtagacgttgtcgtgcgcaccgtaaacgcccagatctgtaccgtcagcgtaatctttgtagtaacgcacacagcggtagcaggcgatgcagcggttcatttcgtgagagatgaatggccccaaatcctgattacggtgggtacgtttggtgaaacggtagcgacggaagctgtgtccggtcatcacagtcatatcctgaagatggcagttaccgccctcttcacataccggacagtcgtgcgggtggttggtcatcaaccactcgaccacgctttcacggaactgtttcgcttcttcgtcgtcaatggaaataaaggtgccatcggaagccggtgtcatacaggacatcaccaggcgaccacgcgtgtcttccgcgttttggtattgcttcaccgcacactggcggcaagcaccgacacttcccagcgccggatgccagcaaaagtcgggaatatcaaggcccagagacagacaagcttccagcaggttgtccgctccgttgacctcgtattctttgccgtctacatgaattgtagccattagcatgcttccacagcgctctttcagcaggttcggctgaatcccattaatcaaatgggtattgctgaacggctgtttgattcccgcctcaaattcttcgcggaaatatttgatggcgctctgtaacggctccactgcaccaggtgcgtgggcacagaaagttttacccgggcctaagaatcgacacagttgctcaagtgtttcgatatcgcccggctgaccttcaccacgctccagcgcacgcagaattttcacgctccacggcagaccgtcgcggcacggcgtacaccagccgcaggactcacgggcgaaaaactcttccaggttacgcaccagcgacaccatgttgatctcatggtcaaccgccatcgccagcgccgtacccagacggctgcccgctttaccgatactttcgaattccatcggcagatcaaggtgcgcttcggtcaggaagtcagtccccgcgccgcctggctgccaggctttaaatttcagaccatcacgcataccaccggcgtaatcttcgaggatctcgcgtgcggtggtgccgaacggcagttcccacagtcccggatttttcacccgaccggagaagcccatcagcttggtcacggtgtcgaaagctatcgcaccactggcgcgccgcgtatcagtcctactcactttatggacagcgacggcaaagtgggcgcggaagtggctccgcgtcgttatttctgtctgcaatgtcacgtaccgcaggccgataccgcgccaatcgtggggaatacccccagccgtctggcgctggggacgctgctgttgatcggttttgttggcggcatcgtcttctggggtggccgggcttgccgattcgaagatattcctgtaaatcagctctcgccgggcaacaacgccgcgtcgctttagcgcgtctgtgctacccgtgccacgtatgatggcagagccaacaatcccgcaatcaatgccgatatatttcgggttttccgggtgttcatagcttacgaagatgttgccaggtgcatatcggcatggaaaaagctgcacgccgcgttccgccagcaatttcatgttagtgccgtttttctccagcgccgcaacatcagacaccggaatgccgtaaatgcgctccatcaccatcatcccttcactacaatagtcagggtaaacttccgggatgtagagcatcgggctgtcttcaaaattgcgccgaagctgaatggcgttggcagattcccgcagcaaattcagttcatcaatcaatgtcttttcgtactcgcgcaccacttcggttgggcgcagacggcgaccatccggcagcaaacgcggcacccagcgagccagacggtagataagtttcagatccgctttaataaccggcaaaatatccgggcggatgactttaatcaccacctctttaccattcgatttcaatcgcgcggtatgaacctgggcgatagaagcagaagccagcggcttgatttcaaaatcgtcaaaccacgcttctaccggcaagccgcccattgcagcttcaatctgctgcttcgccagcttgccatcaaacggagcaactttgtcgaatagggcgatcatcaacgctggcgcatagatgatgtaggcatgaagcagcaggaacgccagcggcgcagtcaggaagatcagccgtggaatgcccgacaagaagtggaacatggcgttgacgtaacatagccgctgagcaaacttcagccctttaccggtgagcgggttatcgagacggaagatttgtaccatcccgcgcgcccagcgaatacgctgaccgatatgcgccgacagactttcggtcgccagccccgcctgcctgccggaatacgcattatagcgctggcaggtattaggccacggagggttatcgacagcaatgccgccaatttcatccagcggcttacgacgaatcaccgcacaggaaccgcagaagaaagtggcgtcccacatatcgttgccatcctgcaccagaccatagaacagcgtgccttcgttcggcgttttacggaaacgccccaggttgcgttcaaacgggtccggtgagaagaagtggtgcggcgtctgcatcatcgccagctgtttttctttcaggaaccagcccatggtcatttgcaagaacgatcgcgttggtacgtggtcgcagtcgaaaatcgacacgaactcgccttgggcatatttcagcgcattgttgatgttgcctgctttcgcatgttcatgagtggtgcgggcgatatatttcacccccacgttttgcgcaaactggcgaaactcttccctgccgccgtcatcaaggatccagatattcagcttatctttcggccagtcgatacccagcgaggcgtaaatggtatttttcaccacgttgagatcttcgttgtaagtcgggacaaagatatccaccgacggacacagcgacatatctttcggcaatggcaccggctgacgattcagcggccatactacctggaagtagccgagcaccagcacaatccacgcgtacgtttcagggaagagcagaataagcccgcacaccagggaagcgatgatcgaatgatcatagcaagcgggcatggctttacgctcttcggcgccgagctgggagaactcgccaccgctgcccaggaagaacaggccgtcaacgcctgctttgatcagatcgtcgatcagcgcggcggtgcccggcttatcgagctggccgtcggcggtaaaaatggtggagacagggggaatgattcccgtgaacaacgcggactgcggcatgagatctccttgctgaatcat

SEQ ID NO: 8849 - DNA, 1163 bp, Homo sapiens
  SIMILAR (7)..(714): 881254mologous to Escherichia coli yejZ,accession number U00008,Smith-Waterman Score=1111.
atgaagtggatgacacggcgaagcaccggcgcagggactcttttccacaatgagatcctccatgaatatccgatacgctccctctcctatctgcctgccacggtggcgttgaccggtgcggtgattatcaccgtgctctacgccctggcgggaaagcgattattttgcagctgggtctgcccgctgaacccgattaccgacttagcgaactggttacgcaggcgctttgacctcaatcagtctgcgacgatccctcgccacattcgctacgtgctgttggtggtcattctggtgggatcagccttaactggcacgctcatttgggaatggatcaaccccgtttctctgatggggcgtagcctggtaatgggcttcggcagcggcgcgctgcttattctcgcgctgtttttatttgatctactggtcgttgaacacggctggtgcgggcacatttgtccggttggcgcgctgtatggcgtgctgggtagcaaaggtgtgattaccgttgcggccaccgatcggcagaaatgtaaccgctgtatggattgttttcatgtttgcccggaaccgcatgtgctacgtgccccggtgctggatgaacaaagcccggtgcaggtcaccagccgcgattgcatgacgtgcggtcgctgcgtggatgtctgttctgaggatgtatttccaataactacacgatggagttcgggagcgaaatcatgaaaagccatgacctgaagaaagcgctgtgtcaatggacggcgatgctggccctggtggtaagcggcgcggtttgggcggctaatggcgtcgattttagccagtcgccggaagtatccgggacacaggaaggggccattcggatgccaaaagagcaggatcggatgccgctgaactatgtgaatcagccgccaatgatcccgcatagcgttgaaggttatcaggtaacgaccaataccaatcgctgcttgcagtgccacggtgtcgaaagctatcgcaccactggcgcgccgcgtatcagtcctactcactttatggacagcgacggcaaagtgggcgcggaagtggctccgcgtcgttatttctgtctgcaatgtcacgtaccgcaggccgataccgcgccaatcgtggggaatacctttaccccatcaaaaggttacgggaaataa

SEQ ID NO: 8850 - DNA, 323 bp, Homo sapiens
  SIMILAR (3)..(227): 1001254mologous to Escherichia coli K12 putative regulator,accession number AE000300,Smith-Waterman Score=392.
aaatgacagcagaaatgcgcagtgaatttgcacagctttttgccgattacgaaattatgccgccttttcgccagttgtcgcgccgcacggtgctgctcacacctgacgagtcaaccagtaacagcctgactcgctgggaaggtaaatccgctaccgttgggcaacttatgggaatgcgatacaaaggctgggagtcaggctatgaggacgcatttgtctataacctggcgggcagtgatgcaactgcccgttatcaacacgacttaccagcggggaaagcgatgatcgtgcaaaaagagctggttgctatttacgattatgag

SEQ ID NO: 8851 - DNA, 2205 bp, Homo sapiens
  SIMILAR (7)..(2181): 531254mologous to Rattus norvegicus SCOP,accession number AB023624,Smith-Waterman Score=1954.
ttctccaaggccttaaatctcagatacttgaatgcatctgcaaatagtctggagtctttaccatccgcctgcactggagaggagagtttgagtatgctgcagctgctttatctgaccaacaatctcctgacggatcagtgcatacctgtcctggtagggcacctgcacctgcgaatcttgcaccttgcaaacaatcagttacagacctttcctgcaagcaaactaaataaattggagcaattggaggaactgaacctaagtggcaacaagcttaaaaccattcccacaaccatagcaaactgtaaaaggctgcacacccttgttgcacactccaacaacatcagcattttcccagaaatactgcagttgcctcagatccagtttgtagacctaagttgcaacgacttgacagaaatcctgattccagaggctttgcctgctacattacaagaccttgacctgactggaaatacaaatctggttctggaacacaagacactggacatatttagccatatcacaaccctgaaaattgatcagaaacctttgccaaccacagattctacagttacgtcaaccttctggagccatggactggctgagatggcagggcagagaaataagctgtgtgtctcagcacttgctatggatagctttgcagagggggtgggagctgtgtatggcatgtttgatggagaccgaaatgaggagctcccgcgcctgctgcagtgtacgatggcagatgtgcttttagaagaggtacagcagtcaactaatgacacagttttcatggctaacaccttcttggtatctcacaggaaattaggaatggctggccagaagttgggctcctccgctctcctgtgctacatccgccctgacactgccgatccagcaagtagctttagcttgactgtagccaatgttggcacgtgccaagcagtcctgtgccgaggtgggaagccagtgcccctctctaaagtcttcagcctggagcaggacccagaggaggctcaaagggtgaaggaccaaaaagccatcatcacagaggacaacaaagtgaatggggtaacctgctgtacccggatgctgggctgtacatacctctacccttggatcctccccaagccccacatatcttccactccgctgaccattcaagatgagttgctgattctgggaaacaaagcattgtgggaacacttgtcctacacagaagctgtcaatgctgtacgtcacgtacaagacccattagcagctgctaagaagctgtgcacattagcgcagagctatggctgtcaggacaatgtaggggcgatggtagtttatttgaatattggtgaagaaggctgcacttgtgaaatgaatgggctcaccctcccaggtcctgtgggatttgcttcaaccaccactatcaaggatgcccctaagccagccactccatcctctagcagtgggattgcctctgagttcagcagtgagatgtccacctcagaggtgagcagtgaagtggggtccactgcttctgatgagcataatgctgggggcctggacactgccttgcttccgaggccagagcggcgctgcagcctccacccaacacccacctctgggctgtttcagcgccagccttcttctgctaccttctccagtaaccagtctgacaacggcctggacagtgatgatgaccagcccgttgagggggtcataaccaatggcagcaaggtagaggtggaagtagacatccactgctgcagggggagggatctggagaactcaccccctctcatagagagttctcctaccctgtgttctgaggaacatgctagagggtcgtgttttgggatccgaagacagaacagtgtgaatagtggcatgctcctgccaatgagcaaggacaggatggagttacagaagtctccctccacctcctgcctctatgggaagaaactctccaatggctctattgtgcccctagaggacagcctgaacctcattgaagtggccacagaagtgcccaagaggaaaactggctattttgctgcccccactcagatggaaccagaggaccagtttgttgtgcctcatgacctggaagaagaagtgaaggaacaaatgaaacagcaccaggacagccggctcgagcctgagccccatgaagaggatcggaccgagcccccggaggagttcgacacagcactatga

SEQ ID NO: 8852 - DNA, 972 bp, Homo sapiens
  SIMILAR (163)..(828): 1001254mologous to Escherichia coli 3-deoxy-D- arabinoheptulosonate 7-phosphate synthase,accession number M38266,Smith-Waterman Score=1156.
atggtggtactggtcaccgcctgcggtatgttgctgttgctggcacaggtgcaggtgggaatgcgtcagcgtcatcaggagctggtggtgtggcgcacactcggtgcggggaaaaaactgctgcgtacccgttgtggttggaccgcccgcgtactcgcgctacgaattgaaaaaatactgaatggtgaagataagcgactgttggtcattattggcccctgctcgatccacgatctcaccgctgcaatggagtacgccacccgtctgcagtcgctgcgcaaccagtaccagtcacggctggaaatcgtaatgcgcacctattttgaaaaaccacgaactgttgtcggctggaaaggactaatctccgatccagatttaaacggcagctatcgggtaaatcacggtctggagctggcgcgcaaattacttttacaggtaaatgagctgggcgtcccaaccgcgaccgagttcctcgatatggtgaccggtcagtttattgctgatttaatcagttggggcgcgattggcgcacgtactaccgaaagtcagatccaccgcgaaatggcttcggcactctcctgtccggtaggttttaaaaatggtaccgatggcaatacgcggattgctgtggatgctatccgcgcagcccgcgccagccatatgttcctctcgccagacaaaaatggtcagatgaccatctatcagaccagcggcaacccgtatggccacattattatgcgtggcggcaaaaaaccgaattatcatgccgatgatatcgccgcagcctgcgatacgctgcacgagtttgatttacctgaacatctggtctcaggatgcggatatgcggaagtcggacaggagccaaaattggagccccccaatggaaccatcaccggttgggggaaaaaccggagtaaccgccggcagatcccagaaggcctacgaagggcccggggcgcaaaagtgggctaa

SEQ ID NO: 8853 - DNA, 2039 bp, Homo sapiens
  SIMILAR (163)..(1254): 811254mologous to Escherichia coli K12 putative regulator,accession number AE000300,Smith-Waterman Score=1467.
atggagtacgccacccgtctgcagtcgctgcgcaaccagtaccagtcacggctggaaatcgtaatgcgcacctattttgaaaaaccacgaactgttgtcggctggaaaggactaatctccgatccagatttaaacggcagctatcgggtaaatcacggtctggagctggcgcgcaaattacttttacaggtaaatgagctgggcgtcccaaccgcgaccgagttcctcgatatggtgaccgcagtggatgtctacttccacctctaccttgctgccattggttatgaccccctcaacgggctggtcatcatcactgtccagcccgttgtcagactggttactggagaagatgtatggtctgccctggagcagttgcttaaacagggtccaatggacatttacccggcacgcattccaaaagcccctgatttctggcatccgcaaatgtggtccaggccgcgccttatcactaataatcaaactgttaccaatgacgctctggaaattatcggcgaaatgctgcgctttacccaggggggacgtttttatagcgggctggaacaactgaaaacgttctgccagccacaaacgctggcagcttttgcctgggatctcttcactgcgtggcaacaagctggtgcccccgcaaaagacaactgggcatttctggcgttaagtctctttggtgacgaaagcacggcacgggatctgacgacacagatcctcgcctggccacaagaaggcaaatctgcccgtgctgtcagcggcctgaacatccttaccctgatgaataatgatatggcgctgatacagctgcatcatatatcgcaacgggctaaatcccgccccttacgtgataacgcggcggaatttcttcaggtggtcgcagaaaatcgcgggctaagccaggaagagctagcggacagattagtcccaaccctgggccttgatgatccgcaggcgttgagttttgattttggtccccggcagtttaccgttcgcttcgatgaaaatctcaacccgcaaaacgttcgccagaaaagcgttccccgtttgcgcgccgatgacgatcaactgaaagcgcccgaggcactggcccgactaaaagggctaaaaaaagatgctactcaggtgagcaaaaacctgctcccgcgtcttgaaacggccctacgtaccacccgacgctggtcgctggcagatttcattctctgtttgttaatcatcccttacccgtctgaaatgacagcagaaatgcgcagtgaatttgcacagctttttgccgattacgaaattatgccgccttttcgccagttgtcgcgccgcacggtgctgctcacacctgacgagtcaaccagtaacagcctgactcgctgggaaggtaaatccgctaccgttgggcaacttatgggaatgcgatacaaaggctgggagtcaggctatgaggacgcatttgtctataacctgggtgagtaccggctggtccttaagttttcacccggttttaaccactacaatgttgatagcaaagcgctaatgagcttccgttctcttcgagtgtaccgtgacaataaatccgtcacttttgccgaacttgatgtgtttgatttgacgggcagtgatgcaactgcccgttatcaacacgacttaccagcggggaaagcgatgatcgtgcaaaaagagctggttgctatttacgattatgaggtccctgtacctgaagatccgttttccttcagacttgagatccataaatgctctgaattatttacaggttccgtctatcgactggagcgattccggctacgtccaacatttcatcaacgtgatcgagaagatgctgacccgctaataaatgatgcgttgatttatataagagatgagtgtattgatgagcggaaattacgaggtgaatcacctgaaactgtaatagcaatttttaatcgtgaactacagaatatgttccaccaagaaatagatgtggtatcctcatggatattcccagtcggtccgatctccgggtcggacgattgaatctcgta

SEQ ID NO: 8854 - DNA, 619 bp, Homo sapiens
  SIMILAR (3)..(188): 791254mologous to Escherichia coli aminomethyltransferase,accession number X73958,Smith-Waterman Score =250.
tgtttatcgccacccctggttataccggtgaagcgggctatgaaattgcgctgcccaatgaaaaagcggccgatttctggcgtgcgctggtggaagcgggtgttaacccatgtggcttgggcgcgcgtgacacgctgcgtctggacggggatgaatcttatggccagagatggcgaaaccgtctctccttaggcgcatccgggctgcagaagatagagcgagccgccgttcaggtcaactactgacgaacaaatcttttgcgaaggggattgcaaatccgacaaaaagtggggtttttcagaccaaaacgcgttatgccattcgtcgccttgttcttaattcccgctaggtctccactctttgcgtgaacggggcctaggagagagcactgagggggggcatcccaatggaaaggggcccccgcaggaagtttctcagagggaagacctagatcgtttgtgtggctacatttactcggtgttggaacaaagccccctgggtagtttttaacgtcagcagaagggtatacatcaattctagttaatcgcgcccgggtgccaattgtgtttcggttgttatgacggtgcccaaggttatggatacccacacgggtagacat

SEQ ID NO: 8855 - DNA, 621 bp, Homo sapiens
  SIMILAR (13)..(594): 971254mologous to Escherichia coli Flagellar M-ring protein (fragments),accession number D90834,Smith-Waterman Score=941.
atgtggcccagtgtcagccacctgacgcaaatgaatattccttcccgcttcagcgaacccagcggcgctattgaagttccgccagataaagttcacgaactgcgtctgcgcctggcacaacaaggtttgccaaaaggcggcgcggtcggtttcgaactgcttgatcaggaaaagtttggtatcagccagttcagcgaacaggtgaattatcagcgggcgctggaaggcgagctttctcgtaccatcgaaactatcggcccggtaaaaggggcgcgcgtacatctggcaatgccgaaaccgtctttattcgtccgtgaacaaaaatccccttctgcatcggtgacggtaaatctgttacccggccgcgcactcgatgaagggcaaattagcgccattgtgcatctggtttccagcgccgttgctggtctgccgccgggaaacgtcacgctggtggatcagggcggacatctgttaacccagtccaataccagcgggcgcgatcttaatgacgctcagttgaaatatgccagcgatgtcgaaggccgtattcagcggcgtattgaagcgatcctgtcgcctattgttggtaacggttacggcgcagctggacttcgccagtaa

SEQ ID NO: 8856 - DNA, 2277 bp, Homo sapiens
  SIMILAR (811)..(1947): 931254mologous to Escherichia coli Flagellar M-ring protein (fragments),accession number D90834,Smith-Waterman Score=1781.
atggccacccatgtcgaaaccgacagccctttcgccattcctgtagagggaagcggcgagggctatttcttattacatatattttatttcagatcagttttcagtgcttcaccgatatccgccaggctgcgaacggttttcacgcctgccggcttccagaccagcgaatttctcatccgcagtccctttcccaccggcaatgatggcacccgcgtggcccatacgtttgcctttcggcgcagtcacaccagcgatgtaacccacaactggcttggtaacgtgctctttgatgtacgcagctgcttcttcttcagcgctaccgccgatctcaccgatcatcacgatcgcttcggtctgcggatctttttcgaacatttcgagaatgtcgataaagttagagcccgggatcgggtcaccgccgataccgacacaggtcgactgaccgaaaccgtaatccgtggtctgtttaaccgcttcataggtcagtgtaccggaacgggaaacgatacccactttacccggtttgtgaatgtgaccaggctggataccgattttgcattcacccggagtgataacgcctgggcagttcgggccgatcatacgaacgcctgcttcatccagcttcactttcacggtcagcatatccagcgtcgggatgccttcagtgatggtgataatcagtttgatgcctgcgtcgatggcttccagaatggagtctttgcagaacggtgctggtacgtagataacagaagcggtagcgccagtggcagcaacggcttcacgcacggtgttgaacaccggcaggccgagacttctttagaggagacgaacgcagagcttaatcgcctgcgtgcgaatccgaaaattccattgattgttgccggttccgcggcagtggcggtcatggtcgcactgatcctgtgggcgaaagcccccgactaccgcacattattcagcaatctttccgatcaggatggtggcgcaattgtcagccaactgacgcaaatgaatattccttaccgcttcagcgaagccagcggcgctattgaagttccggcagataaagttcacgaactgcgtctgcgcctggcacaacaaggtttgccaaaaggcggcgcggtcggtttcgaactgcttgatcaggaaaagtttggtatcagccagttcagcgaacaggtgaattatcagcgggcgctggaaggcgagctttctcgtaccatcgaaactatcggcccggtaaaaggggcgcgcgtacatctggcaatgccgaaaccgtctttattcgtccgtgaacaaaaatccccttctgcatcggtgacggtaaatctgttacccggccgcgcactcgatgaagggcaaattagcgccattgtgcatctggtttccagcgccgttgctggtctgccgccgggaaacgtcacgctggtggatcagggcggacatctgttaacccagtccaataccagcgggcgcgatcttaatgacgctcagttgaaatatgccagcgatgtcgaaggccgtattcagcggcgtattgaagcgatcctgtcgcctattgttggtaacggtaatattcacgcccaggttacggcgcagctggacttcgccagtaaagaacaaacggaagaacagtatcgccctaacggtgatgaatctcatgcggcgcttcgttcacgccagcttaatgagagcgagcaaagcggttccggttatccgggcggcgtaccgggggcgttgtcgaatcaaccggcacctgcgaataacgcgccaatcagcacgcctccggcaaatcaaaataaccgccagcagcaggcgagcaccaccagcaatagtgggccgcgtagcacacagcggaatgaaaccagtaactacgaagtcgatcgcaccattcttagagcacagggcgtgatacccgccttgcgacgtctgaccatcgccacctgcgtgatcgcgtcgctccatcataaacgcctgatttgccgcccgcaggttattaagataaccgccaactttggcattcaacaccggctgataccagtcgttgttatcttccaccagcgtgtagtcatacgctcccatattgacgtagccgctgcctgccagactgaactgcgcattgttttgaaactgcgtgggatcagctgcgaaatcaaccactttaatgcctgtcgatgtcggctcaccaatccctgtaatggagttaaccaccacagttgtgttgccagcagtattaccgttcatcaccaattgatcgcttaccgagtcatcgccgtttaa

SEQ ID NO: 8857 - DNA, 1067 bp, Homo sapiens; identical to SEQ ID NO: 7732
  SIMILAR (5)..(274): 331254mologous to Schizosaccharomyces pombe putative glucoamylase,accession number AL031262,Smith-Waterman Score=90.

SEQ ID NO: 8858 - DNA, 1245 bp, Homo sapiens
  SIMILAR (165)..(296): 591254mologous to Escherichia coli Flagellar M-ring protein (fragments),accession number D90834,Smith-Waterman Score=102.
atggatgggttaaatacagataaaggttctagtgtcttccacaccccaacagaccgccttgtaatatgttgtcccgtggatgctgatgaacggatgacaactcctcctaggctgtgggaccacgagccaagtaaacctcttttctttacaaattacccagtctcagcgccgtttgttggtctgcgccggggaaacgtccccagggggggttcagggcgggtaatctgtaaaccagttccaaaaccatcgggcgcgatctgaatgacgctcagttgaaatatgccagcgatgtcgaaaggccgtattcaccggcgtattgaagcattcctgtcgcctattgttggtagcggtaatattcccgcccaggttcgggcgcagctggacttcgccagtaaagaccaaccggaagaacagtatcgccctaacggtgatgaatctcatgcggcgcttcgttcacgccagcttaatgagagcgagcaaagcggttccggttatccgggcggcgtaccgggggcgttgtcgaatcaaccggcacctgcgaataacgcgccaatcagcacgcctccggcaaatcaaaataaccgccagcagcaggcgagcacccccagcaatagtgggccgcgtagcacacagcggaatgaaaccagtaactacgaagtcgatcgcaccattcgtcataccaaaatgaacgtgggcgatgtgcaacgaaaattggggattattggacaagggaagaatgaaaaacctttgaaacaattggaaagggtagaggagaaacccaatggggagggctgggaaaaaaaatggcaagggaaggaagtttggaaaaaggaagatgggaccatctacttgcagaaaaacaagctcagggctcccactgattctacattatggtttgccaagaatgggagggttgcaaaaatcgccaaagctctggttgaaccggcaaacaactttaacccgggtgtggatgaagatgacactgagaagctcctagaggtggttcctgaggaattaactaatgagaagttggacctggagcagaaatgcatacacatctatgatgacaaaaggaaacaaaccaagcaaaccccccaggacgtgtttctgaaaagagtgacatctcctcaagagcctcagccaggtccttcaggagggattccagaagaagggattgttatcataggagaggacagctccgtgcaagttcttgcccctgaagatcttccagtggaaaagttgtga

SEQ ID NO: 8859 - DNA, 1511 bp, Homo sapiens
  SIMILAR (1407)..(1508): 611254mologous to Escherichia coli phenylalanyl-tRNA synthetase beta-subunit,accession number K02844,Smith-Waterman Score=87.
tcacccatctgatgccccagggatgccaaggcacttaggagacccaagagagtgtgtaatccgacatgacagctcaacgttatatgcagcatgacgaatatccgccggcagtggcgcaaaatcctgtgaataggctggctgcccacccgcactgacagtaaacagcgtgcgaccatgaaacgcatttttgaacgccacgatgccgctcttatggctgccgtagcggtcgtgagcgaatttacgcgccagttttagcgccgcttcgttggcttccgcaccggagttacaaaagaagacgcgatcggcaaacgtggcgtcgatcaattttttcgccagtcgcagtaccggctcgttggtgtaaccgttgccggtatgccagaacttactcgcctgttcgttcagcgcttcacgcagttccggatgcgcatggcccagcgcgttcaccgcaatgccacccgcgaagtcgatatactctttcccctgctgatcccacaagcgcgaaccttcgccacgtaccggtataaagggtgccggagcgtaaacaggtatcatccattcatcaaagttttcacgcgtaattggcgtgaagctgacctgtcgctcaagcgagtgtgaacgctgctcaacgacacaggctatcaggaagtgatcacctacagcttcgttgatccgaaagtgcagcagatgatccatccaggcgttgaagccttactgctgccaagcccgatctctgttgaaatgtcagcaatgcgtctttctctgtggactggcctgctggcaaccgtggtgtacaaccagaaccgtcagcagaaccgtgtgcgcattttcgaaagcggtctgcgtttcgtaccagatactcaggcaccgttgggcattcgtcaggatctgatgttagccggtgtgatttgcggtaaccgttacgaagagcactggaacctggcaaaagagaccgttgatttctatgatttgaaaggcgatcttgaatccgttctcgacctgaccggtaaactgaatgaggttgagttccgtgcagaagcgaatccggcactgcatccggggcaatccgcagcgatttatctgaaaggtgaacgtattggttttgttggggttgttcatcctgaactggaacgtaaactggatcttaacggtcgcactctggtgttcgaactggagtggaacaagctcgcagaccgcgtggtgcctcaggcgcgcgagatttctcgcttcccggcgaaccgtcgtgacatcgcggtggtggtcgcagaaaacgttcccgcagcggatattttatccgaatgtaagaaagttggcgtaaatcaggtagttggcggtaaacttatttgacatgtaccgcggtaagggtgttgcggaggggtataagagcctcgccataagcctgatcctgcaaggataccagccgtacacctcgaagaagaggagattgccggctaccggtcgccaaatgtgtagaggcattaaaagagcgatcccaggcatcattgaggaattga

SEQ ID NO: 8860 - DNA, 312 bp, Homo sapiens
  SIMILAR (2)..(157): 981254mologous to Escherichia coli X96,accession number M95096,Smith-Waterman Score=263.
cgccatcgctgaggtattaaatctgtggcccgatgccgatcgtcagcaactgcgtactgtgatccgcaacgcgaagaaagagaaagaagggaataagccgccgaaatccgcacgccagattttccagtatctgcgcgagttagcggagaacgaagggtaattttcgttgttgatgtgagtatggtttgccggatacggtgcacctgtaggcctgataagacgcatcaagcgtcgcatcaggcactatgctcaaatgccggatgcggcgtgaacgccttatccggcctacgcatactatatccggctaaggcc

SEQ ID NO: 8861 - DNA, 993 bp, Homo sapiens
  SIMILAR (313)..(498): 961254mologous to Escherichia coli flagellar protein FlhA,accession number U88319,Smith-Waterman Score=284.
ataccaggcatcgccttcctcttcggtcgaatcacatcctgcgcttacatcacgctacgcttaacaccatgtgttgccagtgttacttaccgttcctgtcaccttgtcgaaggaccatttaagaaattctcatgctcaatggcttcaccgccgagcatgatgacaaacgtttttccccgggtggcgcatttggcatcgacgcatgactgccggatgcggcgtaaacgccttatccggcctacggttcaggcacaggtttgtaggcctgataagacgcgtaagcgtcgcatcaggcaatggtgctcggatgccggatgcggcgcacaaattccggcgctggtgatttctaccgccgcgggggtcatcgttacgcgtgtcagcaccgatcaggatgttggcgagcagatggtgaatcagcttttcagtaacccaagcgttatgttgttaagcgccgccgtgctcggtttactcggcctggtgcctggaatgccgaacctgccattgcccaaacagcattgttcattgattctggtgttcagcgaacgccaggttgatgtactgggcgaatgggcaggcgatgctgactgcaccgttatcgcctacgccagtgtgttgccgaaacttcgcgatcgccagcagctatttactcgacagcacccggagctgcccgcggctgggaaaggggaggaggccgaaggggtggagttggggagggtccctcgcgggccccctcgccgcgccccctgcagggcgcacccccggcgggagcgcaaggagctggggcgctcgggacaagggcgcacggaacagccacaatgttatgacactaccacactgccgccgtacgtcgcggcgcaccaaactgcctgctgctggctgacctgccgtttatggcgtatgccacgccggaacaagccttcgaaaacgccgcaacggttatgcgtgccggtgctacggcacaagtctatttcggaaaaacggtcgaccaactga

SEQ ID NO: 8862 - DNA, 858 bp, Homo sapiens
  SIMILAR (96)..(281): 321254mologous to Escherichia coli hypothetical protein,accession number U73857,Smith-Waterman Score=58.
atgcggcgtaaacgccttatccggcctacggttcaggcacaggtttgtaggcctgataagacgcgtaagcgtcgcatcaggcaatggtgctcggatgccggatgcggcgtaaacgccttatccggcctattaagtatgcaaataggcaggccgaaacagcctagggacttgatgccctgcatctcagctgctccagccatggctaaaaggggccaacatagagctcaggccatggcttcagagggtgtaagccccaagccttggaagcttccatgtggtgttgagccttcagtagccagacttgcatataactgcaatctggaccaactgcgctggggcagacggcaggttatgctgtcattcgggacgctctatcacgcatatcctacgactacactagcacctcgactagcgactcgatgtcgtaccaggctcgccgtgcgcagcgtgctcatcacgcatcaactacacaacggccgtcggcgcatacagcgacagtgcaccacacacatagtcgaggccaaacagagcccagacacaaaagggaccagcgacaccgtcaaccacaggcccgccgctagctcggacgtacaaaaccaatcagggctaccgaacaccactggacagagccatcaacacaacaactcgaacgactcaacgatcaagaaggctggccgaaaaacaccgaacacggcacaactcacagcataccacagccgtaaacacactggaagagcaacccacagtgacgactctcacagctaccggaaccatgcccgcacaaccggcatacccagtccggcaagaaaacacacagaggaaaccgtggcggcagctgctgctgtatgtcgactctag

SEQ ID NO: 8863 - DNA, 816 bp, Homo sapiens
  SIMILAR (634)..(813): 1001254mologous to Escherichia coli No definition line found,accession number U00039,Smith-Waterman Score=316.
atggggccacgttcacccctgcgggagcacattaagaactggctttgcattcttgtcagccttgaattagggtcttacacggcaaacagtctggctgatgacacacgttacatgtgtaggagtactggaaggttccctcatggccctgtgcgctgtgtcgccgacggcgcctcgagccccggggtgacctcccacccatcgagcccggttaagccacgactacacggacccttgccgacacgaaaacacaagactgacagaaagaggaacgtgattatcatggggctttttgatgaagttgtcggtgcctttctgaaaggcgatgcggggaaatatcaggctattttaagttgggttgaggagcagggcggcattcaggtgctgctggaaaaactgcaaagtggcggcttaggggccattctctcaacctggctgagtaatcaacagggcaatcaatcgcggattgcgttcattggccaacgcttccagaacttcacgcggcggtgtttcaacgtgcagcaacgggcgttttttatcacgctgcgtgcgtgcaagttgcttttcgatggtcgtttcaagataaacgacaacgccacgagcggaaagacgaaagtggggatggtgcatgcaattaacgttgctttaacggcaccgtacttccatcgcggtgacgtgccgacgctggacggggcggtgaaactgatgctgcgctatcaggtaggcaaagagctgccgcaggaggatgtggatgatatcgtagctttcctgcacagtctgaacggggtgtacacgccgtatatgcaggataaacaataa

SEQ ID NO: 8864 - DNA, 1179 bp, Homo sapiens
  SIMILAR (535)..(1083): 1001254mologous to Escherichia coli exonuclease SbcD,accession number U73857,Smith-Waterman Score=953.
atgtctgaaggctggaacattgccgtcctgggcgcaactggcgctgtgggcgaagccctgcttgaaacgctggctgaacgtcagttcccggttggggaaatttatgcactggcacgtaacgaaagcgcaggcgaacaactgcgctttggtggtaagacaatcaccgtgcaggatgccgctgaattcgactggacgcaggcgcagctggcatttttggcaaagaagctaccgctgactgaggttgaagaagcgaccaacatcagagttgcctgggtgagtcgaacacagcaggtgggaattggtaatgggatcatccggaagcccggaacggccctggaaatctccaggcccttccggaccccaagaggggcaagaaaaacgccggatcgaactgccggattagaccgggcgccagacactggcgcacaactaggcgtccacagggacacataccagcaatggaaggaaccaaaggaacgactagaataccggggcccagtccagccgggccggttccaaccaaatgccgacccgaacttctacagtaaaagccgcgaagctgaacatcaggcttttcttgactggctgctggagacagcacaaacccatcaggtggatgcgattattgttgccggtgatgttttcgataccggctcgccgcccagttacgcccgcacgttatacaaccgttttgttgtcaatttacagcaaactggctgtcatctggtggtactggcaggaaaccatgactcggtcgccacgctgaatgaatcgcgcgatatcatggcgttcctcaatactaccgtggtcgccagcgccggacatgcgccgcaaatcttgcctcgtcgcgacgggacgccaggcgcagtgctgtgccccattccgtttttacgtccgcgtgacattattaccagccaggcggggcttaacggtattgaaaaacagcagcatttactggcagcgattaccgattattaccaacaacactatgccgatgcctgcaaactgcgcggcgatcagcctctgcccatcatcgccacgggacatttaacgaccgtgggggccagtaaaagtgacgccgtaggcaaagagctgccgcaggaggatgtggatgatatcgtagctttcctgcacagtctgaacggggtgtacacgccgtatatgcaggataaacaataa

SEQ ID NO: 8865 - DNA, 621 bp, Homo sapiens
  SIMILAR (49)..(618): 981254mologous to Escherichia coli No definition line found,accession number U00039,Smith-Waterman Score=993.
aggctggtggaccgccgttgaacccgattgaaatggcgtagaaatccgtgggacgaaattattgttaagctggaaaaagatccgcagcttaaaacgcagttcctcgaagtctatccgcaaggtttcagtggcgaaaatattactgatgccattgctgaatttgagaaaacattaattacgccggattccccatttgataaatggttgcgcggagatgaaaatgcgctgacggcgcaacagaaaaaaggctatcaattatttaaagataataaatgtgcaacttgtcatggtggtattattctcggcggacgttcctttgaaccgttggggctgaaaaaagactttaactttggggaaattacggcggcggatattggtcgtatgaatgtgactaaagaagagcgtgataaattgcgtcagaaagtacccggtttacgtaacgttgctttaacggcaccgtacttccatcgcggtgacgtgccgacgctggacggggcggttgaactgatgctgcgctatcaggtaggcaaagagctgccgcaggaggatgtggatgatatcgtagctttcctgcacagtctgaacggggtgtacacgccgtatatgcgggataaacaataa

SEQ ID NO: 8866 - DNA, 915 bp, Homo sapiens
  SIMILAR (73)..(441): 1001254mologous to Escherichia coli Phosphotransferase system enzyme II (EC 2.7.1.69) MalX,accession number D90805,Smith- Waterman Score=623.
tcagtatcctggtctggatctccacggcgctaaagggctgggtgatgggctcgcgggaaaaagataccgacagcttttagtttcctgcctgtcatgttctgtatcgccatcccgctgggcctggcacgcgaaaataaaggcgtagcggcattcgctggcttcatcggttatgcggtaatgaacctcgcggtaaacttctggttgaccaataaaggcattctgccaaccacggatgccgcggttctgaaagccaataacatccagagcattcttgggatccagtcgatcgataccgggatcctcggtgcggtgatcgccggtattatcgtctggatgctgcatgagcgtttccataatatccgcctgccggatgcgctggcattcttcggcggtacgcgcttcgtaccaattatctcctcgctggtgatgggccttgtcggcgcaggcggcacgcaggaagtctgcggtcaaaccgtcagcggcgcactgaccatcttccagcatcgacacctcgatcgcaccggcgttgttcatctcttcacgcacgatgttttcgacttttttcagaacgcgcacgccggtcggcagccaggtatataacccggaggccagcttgcggatcatcccggcgcgcagcatcagctgatggctgatcacctcggcgtcggcaggtgtctccttgagagtggagagcaggtattggctagtacgcatgttgttacggttccagttggaaggtagaacaggcttacctttcttcgcaataagcacgccattagcgtcatagagatcttccagcgcgtagccgttgttctctttagccacttcgtcagattgcggttcgtgcggctgcttgtagttccagctcatcttcatcagcggttctacgcctttaccaccttcggactggtacag

SEQ ID NO: 8867 - DNA, 913 bp, Homo sapiens
  SIMILAR (1)..(501): 941254mologous to Escherichia coli GAD alpha protein,accession number M84024,Smith-Waterman Score=836.
atggaccagaagctgttaacggatttccgctcagaactactcgattcacgttttggcgcaaaggccatttctactatcgcggagtcaaaacgatttccgctgcacgaaatgcgcgatgatgtcgcatttcagattatcaatgatgaattatatcttgatggcaacgctcgtcagaacctggccactttctgccagacctgggacgacgaaaacgtccataaattgatggatttgtcgatcaataaaaactggatcgacaaagaagaatatccgcaatccgcagccatcgacctgcgttgcgtaaatatggttgccgatctgtggcatgcgcctgcgccgaaaaatggtcaggccgttggcaccaacaccattggttcttccgaggcctgtatgctcggcgggatggcgatgaaatggcgttggcgcaagcgtatggaagctgcaggcaaaccaacggataaaccaaactggtgtgagcgagctggagcgtattggcgacgtggcggacaaaatctgccgtactgcgctggagaaattctcccagcagcatcagccgttgctggtaagtctggagtcgctgggccgtcataccatccagatgctgcacgacgtgctggacgcgttcgcgcggatggacattgacgaagcggtacgtatttatcgtgaagataaaaaagtcgatcaggaatacgaaggtattgttcgtcaactgatgacctacatgatggaagattcgcgtaccattccgagcgtacttactgcgctgttctgcgcgcgttctatcgaacgtattggcgaccgctgccagaatatttgtgagtttatcttctactacgtgaaggggcaggatttccgtcacgtcggtggcgatgagctggataaactgctggcggggaaagatagcgacaaataa

SEQ ID NO: 8868 - DNA, 1041 bp, Homo sapiens
  SIMILAR (1)..(663): 1001254mologous to Escherichia coli ORF235,accession number D15061,Smith-Waterman Score=1152.
atgagcagtttccagttcgagcaaataggcgttattcgctcgccctataaagaaaagttcgccgttccgcgccagccaggtctggtaaaaagcgccaacggcgaactgcatctcattgctccctacaaccaggccgacgccgttcgcggcctggaagcgttcagccatttatggatccttttcgtctttcatcaaacgatggaaggcggctggcgtccgactgtgcgtccaccgcgcctcggcggtaacgccagaatgggggttttcgcaacacgctctactttccgccctaacccaattggcatgtcgctggtagagctgaaagaggttgtttgccataaagacagcgtgattctgaagctcggcagtctggatctggtcgatggtacgccggtagtggatatcaaaccgtatctcccctttgccgaatcgcttcccgatgccagtgccagctatgcgcaaagtgcgccagctgcagagatggcggtgagttttaccgcagaggtcgaaaagcagcttttgacgctggagaagcgttatccgcagttaacgctgtttatccgcgaagtactggcgcaggacccgcgcccggcctatcgtaaaggtgaggaaacgggcaaaacctatgccgtctggctacatgattttaacgttcgctggcgcgctcgccttgagcctgttctaccttccaactggaaccgtaacaacatgcgtactagccaatacctgctctgcactctcaaaatagaacctgcaggaatgcactttgcaaagaatagcaacgacgaaaatgtccaggaaaaatcctggagtcagattcagggttattcgttagtggcaggattacgaagcgtggggcacaggagatacatctccaatcaaaagattgcggggcaaagagccagttttccattgctgcatttcgtgcagcggaaatcgtttgactccgcgatagtagaaatggccttgcgccaaaacgtgaatcgagtagttctgagcggaaatccgttaacagcttctggtccatttcgaactccttaa

SEQ ID NO: 8869 - DNA, 502 bp, Homo sapiens
  SIMILAR (251)..(129): 601254mologous to Homo sapiens Human secreted protein sequence encoded by gene 11 SEQ ID NO:72,accession number B24447,Smith-Waterman Score=111.
atgcccagagaggaggaatctagagaggcagtctggctacagcaggtttgcgaagctttggtgggctccacccaattcgaacttcccagcagttttgtttacactgtgaggggaaaaccgcctactcaagcctcagtaatggtggatgcccctcactccaccaagctcaagcatctcaggtcaatttcagattgctgcactggcagcaagaatttcaaacccgtggatcttagcttgctgggctccatgggggtgggatccactgagctagaccacttggctccctggcttcaggccccctttccaggggagtgaacagttctgtctcgctggcgttccaggtgccactggggtatgaaaaaaacctcctgcggctagctcagtgcctgcccaaatggctgcccagttttgtgcttgaaaccctggccccttgtggggtaggcctccaagggaatctcccagtctgcagcttgtgaagaccatgggaaaagtgtaatatgtg

SEQ ID NO: 8870 - DNA, 2376 bp, Homo sapiens
  SIMILAR (2049)..(1360): 941254mologous to Escherichia coli put. mal G protein (aa 1- 296),accession number X02871,Smith-Waterman Score=1099.
tcaaacctgtaatcccagcactttgggagccgagtgggtgataccctgcaacggaatggttttcagcaccgcttccgcatcttcagaacggttcagcgcaatcagcgtttctgccagcagcaggccgatctccccgttctgattcgacaactgccaggcgtctttcagcaatggcagggcatcggtgtaattgctttcctgcatcagttgcatcgcctgctgcgctttcagctcttcttcgcgcggcagcactttatccagcagggcgcggatcgcctcttccggttgcggcccctggaagccatctaccggttgcccgttctggaacagatacacggtcggaatcgcacgcagaccaaactgcgcggcaatcatctgctccgcgtcgcagtccagcttcgccagaataaattgcccgttgtactgcgccgcgaggctttccagaattggggttaactgcaaacagtgctggctacgttcagaccaaaaatagaacagcaccggagtggtcatcgactgttcaagaacatggagtcgctctctgttgtcgatattttctttgacatgggccgccatcggacggtcgttgatggagtcaaagcctacatccggccccagcagtttgaactgacgcaggttgttattacgcagcgcgccaatgtggtactgctgtacccagccgcgacgtgcatattcggcaccaaggaacaccagtaccgcagttttgaactgcgccacttcgtgctcgctcaggggtttcgccagccagacggcgcgccagaatgctgtccagttccgcttcgttcgcgccctcttcaataatgtgtacgatttgcgcgaataaactgttcggatcggcgatcgcgttgttttgcaggctttaaccatgtcctgaacaaagcgctcggagtgcatataaaccactttggcattcggcttgcgcgccataatgccgttacccaccgcatgcagcaggtgagttttacccagacccgtgccgccataaaggaacaacgggttataggcaccgccagggttatccgccacctggcgagccgccgccgcgcgccagttggttagatttacgttagaacgataggtcggttctgccggggccgggacgttatcccaacctgagcgcgtagaaggcgcagcacgttgcggctgcgtttgcgccacctgtgcaggggccgcgacgttgctcgtcactgccgcttgtggcgtttgcgtcaccggtttggtgccgacttcaaaacgcagctgtggggcatccgctccgcagaaactggttagcagtccattgatattattaaggtacttgtcccgtacccaatcgaggacaaaacggtttggcgcgtacagggccagcgtgttatcgctcagttccgcgtcacgcagtaacagcgacgcgaccggaacttcagtaatggcagcgataaacgacaggatgaataccaccgccagaatcggtactgacagcggcaacaggacaaggcggaaggcctgccacggtgtcgcaccatccagcgcagcagcttcttccagcgaactgtcgatggtttcgaaatagcctttgatggtccagacatgcagcgcaatcccacccagatacgcgaaaattacgccgccgtgagtattcaggccaatgaatggaatgtactcacccagacgatcaaacaacgcatacaacgcgaccagtgaaagtactgccgggaacatctggaaaatcagcattcctttcagcagcgtcgctttgcctggaaagcgcatacgggcgaaagcgtaggcgcaggtggtggagagcgccacaatgccaatcgcggaaatcccggcgacctttaccgagttccacagccacagcagtaccgggaatggcggtggcgtaatgcgaccatcagcctgttcaacgctaaaacctaacgccagtttccagtgatcccaggagatttgctccgggatcaggctgccggtcgcaaagtttccctgacgcagcgagatagcgacgaccatcagcagcgggaacataatcgccaccagcaggaagatcagcgtggcaattgctgccgccagaccgaagtcctgacccccgccgccttcaaaagcgatgcggtaggtgtagttaacaagcaggtcggtataaccggctggcgtggtcgtgccaagacgatccgggccgccgttggttaacagttgaatcagcacgaagttgttaaagttaaaggcgaagctggcgatcatcagcggcgtcagcggtttaatcagcagcggcagcgtaatcttaaagaagttctggaacggacctgcgccatccattgctgaggcttcatacaaatcgtccggaatcgctttcagcaagcccatgcagaggatcatcat

SEQ ID NO: 8871 - DNA, 969 bp, Homo sapiens
  SIMILAR (415)..(729): 1001254mologous to Escherichia coli HyfG,accession number M63654,Smith-Waterman Score=573.
atgaacgacgcgcactttgtcaacaatctgacgttagcatcagaagtgggtgtttacgctcatataccacgtatacgccccggcaccggcgatatagttggcccctgccaaatcgcccgtggtctgggcattacccgcacgccacaaacgtttgtcgaacagattgtccacgccgccggtcagactgacatacttcgtcacatcccaggtcgcgctcaggccaacaatgctgtgaaggtcgttagcatcgacaaatcttcccgtggctgccagctcagcgttgagtcaacgtatatccgggatgatgaaaaaggtcgccgtggtttggttccctcttcaaatatagtgaagtatggccaaacacgggtcgtaacggtagttaagacacgcagtgctgctgaccgaaggctttactataaacctcacgcattcgcgctgggctttgttgaagcgccacgcggtgaagacgtgcactggagcatgctcggtgataaccaaaaattgttccgctggcgctgccgtgccgccacctacgccaactggccggtgttgcgttacatgctgcgcggcaataccgtttctgacgcaccgctgattatcggtagccttgatccctgctactcctgtaccgaccgtgtgacgctggtagatgtgcgcaagcgccagtcaaaaaccgtgccgtataaagagatcgaacgctacggcattgatcgtaaccgttcgccgctgaaccgatctctatacccgcgcgaagttccatctacaacgttgcagccgttgcgaacgccccgttgccccggaaaaaacctcgcactggctgtgaatgttagcacaggaacaaatgggcagaaaccggaaagttgtgggccaggacgttgccgaatgaaaaagggcgagtataagagaacaatttcggggggtaggaccataatccgggttcacattgcccgccttctgagaaccttctga

SEQ ID NO: 8872 - DNA, 2196 bp, Homo sapiens
  SIMILAR (982)..(1566): 891254mologous to Escherichia coli rpoC,accession number V00339,Smith-Waterman Score=875.
ttagcccggttgttgtccaccccgctgatggctgaacaacgccagcaccggcgcaacgcccagttccagcagcgcgaaaaaggaaagagacaattcatcgacgttacccaattgtaccagcgcgggttcaccaggtttaatgccctgacggcgtaaactacacgcgaggttatccgccgcctgattcagctcccgataactcaactgtcgctcgccgtcgataaccgcgatgctgtcactcgcagcatgtcgcgtcagaatgtcagtcagcggcaaatcctgccagtagcctttttcccgatagcgacgggcaaactcttccggccagcgggtgaatggaatgctcatcctcgctcccaacggtgacgacgcaggcacaatccccgctccggcaaacagacgcacctgattttcccgcagcttcgcgcagcggatggtcaccacccattcgccgttaccttcgctgtcacaccaacccacaatgccgccaaacagttcgcggtcgaacggttccagttcaaccactctagaggatcccctgggagatatgcagcgcctgaactcttgatttgttcggtggcttacagtgtgctggaacagccggatgaagatgaaggacgggacgagtattaatattgtgaatcctgtaggcctgataagacgcgtcaagcgtcgcatcaggcatgtgatccagttaccttccggtagaccaataatcgtcagttctggcgcgacgaccagcagttcgcgaatacgctgctcacgggtttcacctttatggccttccggcagcgcgttggtgaagtgcgggttgatttgcagcgggaacagatttagcgcatcgaaaccttgcggatcgacaatcggcatatcgttggtggtacgaatagttgggcaagcaaggttagcgcctgcgctccagccaatatacagagcgccacgtttaaccacgtcagtaattggtgccagcagcccgcgctcgcggcactggaagtgactatccgtactcggacccagcatcaagctcagcagcgtgaagtcggtttgaactccagcggtaaactggttatcacttcccgtaatactgaactgaaactgatcgacgaattcggtcgtactaaagaaagctacaaagtaccttacggtgcggtactggcgaaaggcgatggcgaacaggttgctggcggcgaaaccgttgcaaactgggacccgcacaccatgccggttatcaccgaagtaagcggttttgtacgctttactgacatgatcgacggccagaccattacgcgtcagaccgacgaactgaccggtctgtcttcgctggtggttctggattccgcagaacgtaccgcaggtggtaaagatctgcgtccggcactgaaaatcgttgatgctcagggtaacgacgttctgatcccaggtaccgatatgccagcgcagtacttcctgccgggtaaagcgattgttcagctggaagatggcgtacagatcagctctggtgacaccctggcgcgtattccgcaggaatccggcggtaccaaggacatcaccggtggtctttaccggcggcgatgttttctcccgcgtgatggtccgtgtcaaagagacgttgattcgctggcaatgctggaatttgccctcgacaacatgccggataccccactgctgaccgaaggctttagctataaacctcacgcattcgcgctgggctttgttgaagcgccacgcggtgaagacgtgcactggagcatgctcggtgataaccaaaaattgttccgctggcgctgccgtgccgccacctacgccaactggccggtgttgcgttacatgctgcgcggcaataccgtttctgacgcaccgctgattatcggtagccttgatccctgctactcctgtaccgaccgtgtgacgctgatgcccagccaatgtattgcctgcggtgcctgcgcctgtgcttgtccggcaaatgcgctgactatccagaccgacgaccagcaaaattcgcgcacctggcagctctatctggggcgttgtatttactgtccctcgtctaccaacaacaatggtcctgtcatcagtttcaattagagtcctaaagtcagcagtttcaatgaaagcattactcaacatctttttatcattttctgctgtcggatcaccaaacggattagactttgaagtaatattcaattccat

SEQ ID NO: 8873 - DNA, 1129 bp, Homo sapiens
  SIMILAR (358)..(489): 771254mologous to Escherichia coli HyfG,accession number M63654,Smith-Waterman Score=176.
atgaaaaagcggaaaaccgtgaagaagcgttacgttactgcgctggtgatagtcatcgccggactgatgacgttatggagaattcgtaacgcacccgtgccgacttatcagacgctgattgtgcgccccggtgatttacagcatagcgtgctggcgcccggaaagctagcacgcactagcaaaaattttgcccagtgttatcagggtgcggtattccgcattctcccttgccggcgaaaaaaaaaaacggtaatagcctcgggtgcatggcgtccagaacgcttcaagcggccgatatcggggaaccggatgtcggcttggcagcgattctcggaagaagctggtagaaattcttgcttgctaccgccgaatatggaacaacgcactcagggcattggcattctcgacccacaaatcgcccgtgatttgcgctttgatcacccatacgccgaatacgacaatattccaaaaaacactgtttacctttaccgccgccgatgttttctcacgcgtgatggtccgtgtcaaagagacgtttgattcgctggcaatgctggaatttgccctcgacaacatgccggataccccactgctgaccgaaggctttagctataaacctcacgcattcgcgctgggctttgttgaagcgccacgcggtgaagacgtgcactggagcatgctcggtgataaccaaaaattgttccgctggcgctgccgtgccgccacttacgccaactggccggtgttgcgttacatgctgcgcggcaataccgtttctgacgcaccgctgattatcggtagccttgatccctgctactcctgtaccgaccgtgtgacgctggtagatgtgcgcaagcgccagtcaaaaaccgtgccgtataaagagatcgaacgctacggcattgatcgtaaccgttcgccgctgaaccggaggtgcacaggggaagggtggaccagggcctggattacgctgccgctgctgattaaaccgctgacgccgctgatgatcgccagcttcgcctttaactttaacaacttcgtgctgattcaactgttaaccaacggcggcccggatcgtcttggcacgaccacgccagccggttataccgacctgcttgttaatatttaa

SEQ ID NO: 8874 - DNA, 2469 bp, Homo sapiens
  SIMILAR (1444)..(2088): 991254mologous to Escherichia coli elongation factor Tu,accession number J01717,Smith-Waterman Score=1087.
atgctgcgcggcgtaaacgtactggcagatgcagtgaaagttaccctcggtcccaaaggccgtaacgtagttctggataaatctttcggtgcaccgaccatcaccaaagatggtgtttccgttgctcgtgaaatcgaactggaagacaagttcgaaaatatgggtgcgcagatggtgaaagaagttgcctctaaagccaacgacgctgcaggcgacggtaccaccactgcaaccgtactggctcaggctatcatcactgaaggtctgaaagctgttgctgcgggcatgaacccgatggacctgaaacgcgccagccgtagccgcaaaggttatggacctgcgcgtattcgccaggaactgaatcagaaaggtatttcccgcgaagcgacagaaaaagcgatgcgtgaatgtgacatcgactggtgcgcactggcgcgcgatcaggcgacgcgaaaatatggcgaacctttgccaactgtcttttcagaaaaatcaagaaaacttatcgccggagtcaaacgggcttttacgcaccaggcggtgaacgccggtttctgtacgcagccagccgtaagcgtaatcgccggagattttgatcgtcacggatttaatacccgccacttcaccttccgactcttcgatgatttcagttttgaaaccacgcgattctgcccagcgcagatacatacgctcaagcatgctcgcccagtcctgtgcttccgtaccgccagaccccgcctgaatatcgaggtagcagtcggcgctgtcatattcgccagagaacatacggcggaactcaagctgcgccagtttttccagggcgccccgcaaaaagcggttatttctattcctgtggtcccacaggtgactggtgtggtgattgaagtgacggataagaaaaatacgctgattaaaaaaggtgaggtgctatttcgactggacccgacgcgttatcaggcgcgggtggatcggctgatggcggatatcgttaccgcagaacataaacagcgggcgttgggcgcagagttagatgagatggcggcgaatactcagcaggcaaaggccacgcgggataaattcgctaaagagtatcagcgttacgcacgtggcagccaggcgaaagtaaacccgttttcagaacgcgatatcgatgtggcgcggcaaaattatctggcgcaggaagcctccgtgaagtcatcggcggcggaacaaaaacagatccagagccagctggatagcctggtgttgggtgaacattctcaaatcgccagcctgaaagcacagctcgcggaagcaaaatataaccttgagcagacgatagtgcgtgcgccgagcgatggttatgtgacccaggtactgattcgtccgggtacctatgccgcgtcgctgccgctacgtccggtgatggtgtttatccgatcagaaacgtcactacgcacacactgcccggggcacgccgactatgttaaaaacatgatcaccggtgctgctcagatggacggcgcgatcctggtagttgctgcgactgacggcccgatgccgcagactcgtgagcacatcctgctgggtcgtcaggtaggcgttccgtacatcatcgtgttcctgaacaaatgcgacatggttgatgacgaagagctgctggaactggttgaaatggaagttcgtgaacttctgtctcagtacgacttcccgggcgacgacactccgatcgttcgtggttctgctctgaaagcgctggaaggcgacgcagagtgggaagcgaaaatcctggaactggctggcttcctggattcttatattccggaaccagagcgtgcgattgacaagccgttcctgctgccgatcgaagacgtattctccatctccggtcgtggtaccgttgttaccggtcgtgtagaacgcggtatcatcaaagttggtgaagaagttgaaatcgttggtatccaagagactcagaagtctacctgtactggcgttgaaatgttccgccaactgctggacgaaggccgtgctggtgagaacgtaggtgttctgctgcgtggtatcaaacgtgaagaaatcgaacgtggtcaggtactggctaagccgcgctacgccgattatcttccgtttaaagacgccgacggcagcgtgctcgatcaggggattgcgctatggttctctaaccgtaaggccgagcactacttcctcaacggtaaactcgctgctgtgcgtatggatgagttcaagtatcacgtcctgattcagcaaccttacgcttatacccagagcggatatcagggtggattcaccggcacagtaatgcaaacggcgggatcgtcggtgtttaacctctacaccgatccgcaggaaagcgactccatcggcgtgcgccatattccgatgggtgtaccgctacagaccgaaatgcacgcgtatatggagatcctgaaaaaatatccaccacgcgcgcagattaaatctgactaa

SEQ ID NO: 8875 - DNA, 2907 bp, Homo sapiens
  SIMILAR (2389)..(2904): 1001254mologous to Escherichia coli BIOC,accession number A11534,Smith-Waterman Score=913.
atgctcgataagctcgacgccgccttacgttttcaacaagaggcgctcaatctgcgcgcccagcgtcaggaagtgctggcagcaaacatcgccaatgccgatacccctggttatcaggcgcgcgatatcgattttgccagtgaacttaaaaaagtcatgcaacgtggacgggatgcaaccagtgtggttgcactgacgatgacctcaacgcaacacattccggcgcaggcgctgacgcctcctaccgcagaactgcaataccgtattccggaccagccttcgcttgacggtaataccgtcgatatggatcgcgaacgcacccagtttgccgataacagcctgcaataccagatgagccttagcgcgttgagcgggcaaatcaaaggcatgatgaactcccagcgcctgaacgtggcggccagtaatctggcgaatgctgatagcgtgaccggtcccgatggacagccatatcgggcaaaacagtggagtggtcaggaagtggaaacgaaacgctttgataaagtcagcaaccgaatgcgtcttcaggggatgaaaatggtttcagcctcttccatctctgatccgatcattcagctgatcgcctctttggcgctggcgtttgttctgtatgcggcgagcttcccaagtgtcatggatagcctgactgccggtacgattaccgttgttttctcttcaatgattgcactgatgcgtccgctgaaatcgctgaccaacgttaacgcccagttccagcgcggtatggcggcttgtcagacgctgtttaccattctggacacagccacggagaaacgagtgaagggacatatgttcgtggactattttgcactgggagtgcttattttcgtatttctgctgatcttctatgggatcattatcttacatgatattccctacctgattgccaagagacgtaatcatcctcatgccgacgccattcatgttgctgcttggcagaaatacattcgtggcctgttctgcggcggcacgctgtgcgacgaaaccatggttacgcccggggctcgaaacttggggataaaaaaaaaccccaattgggggcccgggacttggttgcctaaccacgcaaacattcagcccgatccggaattccgcctgaaagatatcaaccgcagcatcaaacacaccttcctcgactttggcgatgacgacttcaccaatggcaagccgcacccgatgattgaccccaccaaccgcatcagtcgcttgatcgaagaggcgcgcgatccagaagtggcggtgatcgtgatggattttgtgctcggatttggatcgcatgaagatccggtcggctccaccatcgagacgatcaaagaagcgaaagcgatcgccgctgccgaaggacgcgagttgatcattctcgcctatgtgctgggtaccgatcttgatacgccatcgttagaacaacaaagccagatgctgcttgatgccggagtgattctggcgagcagcagcaccaataccggattgctggcgcagtggagccgtgaaaaagcagcatgtagaagtgactcaactcgactggacgccgccgggcaggcaatatgcaggccctataccgtgttctcgtcgcggctattgcccgttgccccgttcgggcagtgttcgatgggccgatctctccctccggcgcggatctgccggccatcctggacgaaagtggcgaatttagtgccgaaaaccacctttatcgatggtgtggaccagacatccttcttcctgggaacaaatggtcagtctaaccgtaaggccgagcactacttcctcaacggtaaactcgctgctgtgcgtatggatgagttcaagtatcacgtcctgattcagcaaccttacgcttatacccagagcggatatcagggtggattcaccggcacagtaatgcaaacggcgggatcgtcggtgtttaacctctacaccgatccgcaggaaagcgactccatcggcgtgcgccatattccgatgggtgtaccgctacagaccgaaatgcacgctcccggtttgccgctggcatcgagcatgaagcggtggattcggcgtgcgaccggctttatattcggcaaggaacagttcgaagacgttgtcccagtactcggcagcaaagttaacggtgtgcagttcaatgccgagcttgtcgcagacagcctgggcatcagccagatccgctgccgctgtgcaatattcctcaccgtcgtcttcttcccagttcttcataaacaggccttcgacctgatatccctgttgttgcaacagccaggcagaaacggaggaatcgacaccgccggacatgccgacgattactttttttgcggtttcagacattggatcactcacgacattgaacttcaaggcggcgcacgccagaaggatgccgcagaccattatctggcgggagatatcgaatccctgccgttagcgactgcgacgttcgatcttgcatggagcaatctcgcagtgcagtggtgcggtaatttatccacggcactccgcgagctgtatcgggtggtgcgccccaaaggcgtggtcgcgtttaccacgctggtgcagggatcgttacccgaactgcatcaggcgtggcaggcggtggacgagcgtccgcatgctaatcgctttttaccgccagatgaaatcgaacagtcgctgaacggcgtgcattatcaacatcatattcagcccatcacgctgtggtttgatgatgcgctcagtgccatgcgttcgctgaaaggcatcggtgccacgcatcttcatgaagggcgcgacccgcgaatattaacgcgttcgcagttgcagcgattgcaactggcctggccgcaacagcaggggcgatatcctctgacgtatcatctttttttgggagtgattgctcgtgagtaa

SEQ ID NO: 8876 - DNA, 922 bp, Homo sapiens
  SIMILAR (521)..(919): 1001254mologous to Escherichia coli similar to arylsulfatases of Klebsiella pneumoniae and Homo sapiens,accession number M87049,Smith-Waterman Score=702.
atggcacgggccgacacagtttctgtcccaatgttcatgggactggcggcgaagccttgttggagggacacggagccgaatacgggttatcgtggccctcatgtccgcaatattcaactgacccacgaccctcggctagattacagatcgatccgattgatatcaacgatatcggccagaccttccacgaacggctgcaccccgacgcctgccgtttccaatgccatcctggttcacaataaaaaaggtggcccgctggcagacggtatcgtgattacaccgtcccataacccgccggaagatggtggaatcaaatacaatccgccaaatggtggcccggctgataccaacgtcactaaagtggtggaagacagggccaacgcactgctggccgatggcctgaaaggcgtgaagcgtatttcccttgacgaaagcgatggcatccggtcaaaaaacgatgtcatcgacactagtgacgatgacatgtgatgacaatgtttatcgcgaaggagcaatgaggcatcctggagcgaaagtggcgaatttagtgccgaaaaccacctttatcgatggtgtggaccagacatccttcttcctgggaacaaatggtcagtctaaccgtaaggccgagcactacttcctcaacggtaaactcgctgctgtgcgtatggatgagttcaagtatcacgtcctgattcagcaaccttacgcttatacccagagcggatatcagggtggattcaccggcacagtaatgcaaacggcgggatcgtcggtgtttaacctctacaccgatccgcaggaaagcgactccatcggcgtgcgccatattccgatgggtgtaccgctacagaccgaaatgcacgcgtatatggagatcctgaaaaaatatccaccacgcgcgcagattaaatctgactaa

SEQ ID NO: 8877 - DNA, 1584 bp, Homo sapiens
  SIMILAR (1042)..(1569): 991254mologous to Escherichia coli Transposase,accession number AB024946,Smith-Waterman Score=924.
atggtgcctaaagccattaacagtgtgatttggcgtattggcctgttttacgtcggctccgtggtgttgctggttatgttattgccgtggagcgcgtatcaggcggggcaaagtccgttcgtgacgtttttctctaaactgggtgtgccatatatcggcagcattatgaacattgtggtgctgaccgctgccctctccagcctgaattcaggtctgtactgcaccggacgtattctgcgctcaatggcgatgggcggttccgcaccgagttttatggcgaaaatgagtcgtcagcatgtgccgtatgccgggattctggcgacactagttgtgtatgtcgtcggcgtattcctcaactatctggtgccgtcgcgcgtatttgagattgtgttgaacttcgcgtcgctgggaatcatcgcttcatgggcgtttatcatcgtgtgccagatgcgcctgcgtaaagcgattaaagaaggcaaagcagcggatgcccactttacgccctaccacgcgacgcccctgcgcaacgtcatgttgcacatttatgtgctgaatggcgtaagccgcttcagcgttatcgataccaatcagatcgcgcagcggtgcaatcgcttcgccctgctctgcggcgcggcggcgtgcgaggaaattcagcaccagttgattgaaagcgtcggcatgttcccactgcgcccagtgaccacagtcgcggaagatatgcagttcagaaccggcaatgccggacagcagacgcagacccgcatccatcggcacaaagcggtcgttgcgcccccagacaatcagggtttgcgctttgatttccgccagacgtgggccaaaatccgggaactgtttcggattagcttccaggctcttaacgaagttttccaggtgatcgcggcgcgacagcatattattcaggcgcgcttcaaacagggcgtcggtcaaatcgctgggttctcaaacgccacgctggcagaacgggatgaagagctggctatcctccaaaaaggccgcgacatacttcgcgaagcgcctgaaatgaagtatgtctttattgaaaaacatcaggctgagttcagcatcaaagcaatgtgccgcgtgctccgggtggcccgcagcggctggtatacgtggtgtcagcggcggacaaggataagcacgcgtcagcagttccgccaacactgcgacagcgttgtcctcgcggcttttacccggtcaaaacagcgttacggtgccccacgcctgacggatgaactgcgtgctcagggttacccctttaacgtaaaaaccgtggcggcaagcctgcgccgtcagggactgagggcaaaggcctcccggaagttcagcccggtcagctaccgcgcacacggcctgcctgtgtcagaaaatctgttggagcaggatttttacgccagtggcccgaaccagaagtgggcaggagacatcacgtacttacgtccagatgaaggctggctgtatctggcagtggtcattgacctgtggtcacgtgccgttattggctggtcaatgtcgccacgcatgacggcgcaactggcctgcgatgcctcttgcgatggttga

SEQ ID NO: 8878 - DNA, 1236 bp, Homo sapiens
  SIMILAR (1)..(657): 851254mologous to Escherichia coli No definition line found,accession number U00039,Smith-Waterman Score=880.
atggcgcatatcgttaccgcagaacataaacagcgggcgttgggcgcagagttagatgagatggcggcgaatactcagcaggcaaaggccacgcgggataaattcgctaaagagtatcagcgttacgcacgtggcagccaggcgaaagtaaacccgttttcagaacgcgatatcgatgtggcgcggcaaaattatctggcgcaggaagcctccgtgaagtcatcggcggcggaacaaaaacagatccagagccagctggatagcctggtgttgggtgaacattctcaaatcgccagcctgaaagcacagctcgcggaagcaaaatataaccttgagcagacgatagtgcgtgcgccgagcgatggttatgtgacccaggtactgattcgtccgggtacctatgccgcgtcgctgccgctacgtccggtgatggtgtttatacccgatcagaaacgacaaatcgtggcgcagttccgtcagaactccttgctgcgactggctcctggcgacgatgcggaagtggtgtttaatgctctgccagttcttcagctggcctacgcagtcatccatccacgccccgccgcgcttgttttcacgggcatacagatcgaggtagaagctaccgcgcagttcgttattttcgtcatacagttcgaccgcatcccacggcacaccgctgataccggaaacaccagcggtttcgatgcgggtcagcatatggtgcaggccgtgaccgaactcgtggaagagggtgatcacttcgtcgtgagtgaacagcgccggtttaccatttaccgggcggttgaaatgtattgctggtgtgaaggtctggcggtattactgcatctgaacccacaccttcaatgggaagttcacgggctggaagggttaagtaagaagaactggtatctgcttatttgtaaccaccgtagttgggcagatattgtcgtactgtgcgtgctgtgtattcgccccagaatttctccgcatcaaataccggctgtttttccagacgaccaaaatagaggccacagcgacgagcgctgtcgactttattcaataaaactaaaggaaggaaggttcccttccacaaagccagagctgacaaagcatggcaagataaatggtacaggttcctacaacatttttaggagcagctcaggttctggggtgagcctgaaagctcagggaaatagttacattagctcctgccagcagcagctgctgctgctgtag

SEQ ID NO: 8879 - DNA, 1548 bp, Homo sapiens
  SIMILAR (721)..(1386): 961254mologous to Escherichia coli UNKNOWN PROTEIN FROM 2D- PAGE (SPOT M92) (FRAGMENT),accession number D90883,Smith-Waterman Score=1099.
atgtttctgaaaaatctgccggaaatagccaacgtcattaaaccgtattgcatggagcaggccgacaacgtcgagtcactgcataacctgttgctgcccgccgatgcgccatttacgacatttgaagggcaaggattgttcagccataagatcctgattcagacgcaagttcccgggtatgacagagcaatccagagcaacaacctttgtggcattacgacggggcaccagcgcaccgacatccaccggttaaactctcatttcggcaaattgcagtgctgcaggtcagctttacgacgtggcggccaggcggctgtatacccgagatcagaacgcgataccgatgtggcgcggcaaaattatctggcgcaggaagcctccgtgaagtcatcggcggcggaacaaaaacagatccagagccagctggatagcctggtgttgggtgaacattctcaaatcgccagcctgaaagcacagctcgcggaagcaaaatataaccttgagcagacgatagtgcgtgcgccgagcgatggttatgtgacccaggtactgattcgtccgggtacctatgccgcgtcgctgccgctacgtccggtgatggtgtttatacccgatcagaaacgacaaatcgtggcgcagttccgtcagaactccttgctgcgactggctcctggcgacgatgcggaagtggtgtttaatgctctgccaggcctgcaggttcgcgtaaggtatgtaatcacctacctggtacctcagcgagacggcattatcgacctgaaagaactagaagcagcgatgcgtgacgacaccatcctcgtgtccatcatgcacgtaaataacgaaatcggcgtggtgcaggatatcgcggctatcggcgaaatgtgccgtgctcgtggcattatctatcacgttgatgcaacccagagcgtgggtaaactgcctatcgacctgagccagttgaaagttgacctgatgtctttctccggtcacaaaatctatggcccgaaaggtatcggtgcgctgtatgtacgtcgtaaaccgcgcgtacgcatcgaagcgcaaatgcacggcggcggtcacgagcgcggtatgcgttccggcactctgcctgttcaccagatcgtcggaatgggcgaggcctatcgcatcgcaaaagaagagatggcgaccgagatggaacgtctgcgcggcctgcgtaaccgtctgtggaacggcatcaaagatatcgaagaagtttacctgaacggtgacctggaacacggtgcgccgaacattctcaacgtcagcttcaactacgttgaaggtgagtcgctgattatggcgctgaaagacctcgcagtttcttcaggttccgcctgtacgtcagcaagcctcgaaccgtcctatcgttgcgcgcgctgggtacggcagttttgggatgaacccgacgagagactgatacgtagtccccggggtaccgagtctgagaatcgagacattcccgtcgtgcctcgcgcgggtcgtacgtgcgcgctggtgccgcatgccgagcgtgagaagtggaagtag

SEQ ID NO: 8880 - DNA, 1263 bp, Homo sapiens; identical to SEQ ID NO: 7094
  SIMILAR (646)..(1251): 911254mologous to Escherichia coli RhsC protein precursor,accession number D90709,Smith-Waterman Score=1003.

SEQ ID NO: 8881 - DNA, 1468 bp, Homo sapiens
  SIMILAR (406)..(906): 881254mologous to Escherichia coli adenylosuccinate lyase,accession number M74924,Smith-Waterman Score=794.
atggtttataccaacggtagcccagtgaataccggctttactgagaacgccgatctgtttggctggtttggtattggtcgtccgctgggcgaaccgacgccagtctggatcatggggattgtcttcctcgcggcctggtacatgctgcatcacacgcgtctggggcgttacatctacgcgctgggcggcaacgaagcggcaacgcgtctttctggtatcaacgtcaataaaatcaaaatcatcgtctattctctgtgtggtctgctggcatcgctggccgggatcattgaaatggcgcgtctctcctccgcacaacccacggcggggactggctatgagctggaaaaatggcttcgtagcttcctggctgtctgtcacattcggaatataaaccagaacgttcatgactgcttacagcatctcgccgttcagtatcgcgatatcccgctgctgtctcgtacccacggtcagccagccacgccgtcaaccatcggtaaagagatggcaaacgtcgcctaccgtatggagcgccagtaccgccagcttaaccaggtggagatcctcggcaaaatcaacggcgcgttgactggcatcagtttcagcgaagagttcgtcacctcgctgggtattcagtggaacccgtacaccacccagatcgaaccgcacgactacattgccgaactgtttgattgcgtagcgcgcttcaacactattctgatcgactttgaccgtgacgtctggggttatatcgcccttaaccacttcaaacagaaaaccattgctggtgagattggttcttccaccatgccgcataaagttaacccgatcgacttcgaaaactccgaagggaatctgggcctttccaacgcggtattgcagcatctggcaagcaaactgccggtttccgtggttcatcagaaccgctgtataccggacagcctgcccgccgtggaatggctgacctacggcagcggctggctgtcaggcatgaaactcggcgacacaccgctggtggagtacacccgcgaccgcctgcaccgggaaacgctgcgcagcttcggccgttatgaactcaccaccgcttatacccctgccgggcagttacagagccagcacctgaacagcctgctgtctgaccgcgattacacctggaacgacaacggcgaactcatccgcatcagcagcccgcgccagacccggagttacagctacagcaccaccggcaggctgaccggcgttcacaccaccgcagcgaatctggatatccgcatcccgtataccacagacccggcaggctccaaaaaggcgggtaaacgcctgggtcgtggtatcggttctggcctcggtaaaaccggtggtcgtggtcacaaaggtcagaagtctcgttctggcggtggcgtacgtcgcggtttcgagggtggtcagatgcctctgtaccgtcgtctgccgaaattcggcttcacttctc

SEQ ID NO: 8882 - DNA, 2469 bp, Homo sapiens; identical to SEQ ID NO: 8874
  SIMILAR (1444)..(2088): 991254mologous to Escherichia coli elongation factor Tu,accession number J01717,Smith-Waterman Score=1087.

SEQ ID NO: 8883 - DNA, 1359 bp, Homo sapiens
  SIMILAR (142)..(699): 721254mologous to Escherichia coli RhsD protein,accession number X60999,Smith-Waterman Score=684.
atgtctacccggtctgaagctggtgcggctgctgtacaggctggaggaacgaaatgcgcggcgcacgagcgcggcggtggatgccacgtgaagagccggggcgtggcttgcgcagtgcgggctgacggtggagcaactggccagacacggtggacgccggatatgacaacacgcgctcatctttatcactgcgaccaccggggactgccgctggcgcttatcagcgaagacggcaatacggcgtggagcgcggaatatgatgaatggggcaaccagcttaatgaggagaacccgcatcatgtgtatcagccgtaccgtctgccagggcagcagcatgatgaggaatcagggctgtactataaccgtcaccggtactacgatccgttgcaggggcggtatattactcaggacccgatggggttgaaagggggatggaatttatatcagtatcctttaaatccactacaacaaattgaccctatgggattattgcagacttgggatgatgccagatctggagcattgacctggtacggctgggacggcgaccggctgaccacgatacagaacgacaggagccgcatccagacgatttatcagccggggagcttcacgccactcatcagggtcgaaactgccaccggtgagctggcgaaaacgcagcgccgcagcctggcggatgcccttcagcagtccggcggcgaagacggtggcagtgtggtgttcccgccggtgctggtgcagatgctcgaccggctggaaagtgaaatcctggctgaccggaagagagcagcaaccacatggtcgcataaccactatgcaaataagaaggagggaatcaaagccaccggatatagactggcacagactttaggtttcaaatgtgaagaatcttcggtgttccgtgtcaccagaaagtcacattctagttttgtgtggttggataaggcggttacgccgcatccgacatccaacgtccgagccggttgcctgatgcgacgctggcgcgtcttatcaggcctacaccgctgtgaagtgctccacccccatacgccacatccggcataccatgccggatgtggcgtatcattacaacgcaatatccgccacttctttttgaacgggttgcggtttcaactgcggtttcggcgtactatctgctgcctgcggcttgtcgtagttcaaccccagcacttcgctggtgtactgcaactcgcgttctgttgccgctacatcaccgttcagcttgcgtccataagacggaacgatcgctttcaacgtagcctgccattgcgggctggaaacacgatcgccaaatactttttccagcagattcaacataatcggcgcggcggttga

SEQ ID NO: 8884 - DNA, 1179 bp, Homo sapiens
atgggccggcgcgtgctcacgcctgaatcccagcagtcattcacccgcgaatttagcaacttattcgactgctctccccgtgaataccgccaccgtgattattgggatctcgcaaatatcttcccgtcgtgtttaatacgtcaacagcaaaagacggagttggtctgcctgctgtgtccccattggccaaaacgtaaacagccggcaaactccaaactgggcgatccattggcactggtgaaagccgcgcacactttagtgctccagcattttgctatcgcaatgtgccagtcgggaacattctgctggacttcctgcaccgcaaccacttttacgcctgacgatcgaccgtgtactgatgaaaggcagtccagctttcgattcaatggacgcactgcagcgggcagtaacaatgctggggtcatggagatgattaacatcgacttactgacgacaatgctgcttgagccacaactgccgcaaatcagtagcgccagcttgacggtgaacaaccggcatttgctctatggtaatgggctgcctttgcttaatgcgcgcagccagcaatgtattggtgtagagattttgctgcgctggaacaatccgcgtcagggctggatttcaccggatgtgtttattcctatcgcggaagaacatcatttaattgtgccactgacccgctatgtgatggcagaaaccattcgtcagcgccatgttttcccgatgagtagtcagtttcatgttggcattaacgtcgcacccagccattttcgccgtggtgtgctgataaaagatctcaatcagtactggtttagcgctcacccgattcagcaactgatcctcgaaatcaccgaacgcgatgccttactggatgttgattatcggattgcccgcgagctgcatcgtaaaaacgtcaaactggcgattgatgacttcggcaccggcaacagctcgttttcctggcttgaaacattacgtcctgacgtgctgaaaattgataagtcatttaccgcagctataggttctgacgcggttaactcgacggtgaccgatatcatcatcgcgctggggcaaagactgaatattgaactggtggcggagggcgtggaaacgcaagaacaggcgaagtatttgcgccgtcatggcgtgaatttgcaaggtaatgaagaacgaacgtaa

SEQ ID NO: 8885 - DNA, 2847 bp, Homo sapiens
  SIMILAR (1537)..(2013): 951254mologous to Escherichia coli Transposase,accession number AB024946,Smith-Waterman Score=809.
  misc_feature (1)...(2847): n = a,t,c or g
atggctgaaacccagcagcaatttaaaaaaagaatggcagcaagcgggctggaaacacgtttcgatgaagtggggaatttatacggtcgcctgaatggcaccgaatatccacaggaagtggttctgagcggttcgcatatcgataccgtggttaacggcggtaaccttgacgggcaattcggcgcgctggcggcgtggctggcaattgactggctgaaaacgcaatacggcgcgccgctacgtacggtcgaagtggtggcgatggcagaagaagaaggcagccgcttcccgtatgtcttctggggcagtaaaaatatttttgggctggcgaatcctgacgacgtgcggaatatctgtgatgccaaaggaaatagttttgtcgatgcgatgaaggcttgcggatttactcttccgaacgccccactaactccgcgtcaggatattaaagcctttgttgaactgcatattgaacagggctgtgtgctggaaagaattaccgcctgggataaacctgattgccatcaccctgcaccatcatgcagatctttcggggcatttccccgaagaaatcggacctttattgttcgcgggtttctcttccgcgtggcaaaacggcccatcggcattttcttggcaaaaacacggttcagcccagacatcgtccatcgcggttttgcacagaacaccacgacatgctggatgtcttgcgcaatgcgacttcactcgggcgtttttccagattatgctgaaaaattacctcaggaagaaaagatggaaaaagaagattcatttccccaacgcgtctggcaaatcgtcgccgctattcccgaaggctatgtcaccacttacggtgatgtggcgaaacttggcgggatcgcacccggccgcgcgccaggtgggcgcgtcagcgacaggcattactggcagaaggagctggaactgccgaagacggattcacctgagttggtgaagtcgaagatgctgcaagagatgggccgtgaaccgacgccgaaagaactggctgaacgtatgctgatgccggaagacaagatccgcaaagtgctgaagatcgccaaagagccaatctccatggaaacgccgatcggtgatgatgaagattcgcatctgggggatttcatcgaggataccaccctcgagctgccgctggattctgcgaccaccgaaagcctgcgtgcggcaacgcacgacgtgctggctggcctgaccgcgcgtgaagcaaaagttctgcgtatgcgtttcggtatcgatatgaacaccgactacacgctggaagaagtgggtaaacagttcgacgttacccgcgaacgtatccgtcagatcgaagcgaaggcgctgcgcaaactgcgtcacccgagccgttctgaagtgctgctaaacagcaaaatcagcagacgtcttctgaacgtgaactggagatgtctaccgagattgcacgtctcaaacgccagctggcagaacgggatgaagagctggctatcctccaaaaggccgcgacatacttcgcgaagccatgaaatgaagtatgtctttattgaaaaacatcaggctgagttcagcatcaaagcaatgtgccgcgtgctccgggtggcccgcagcggctggtatacgtggtgtcagcggcggacaaggataagcacgcgtcacagtttccgccaacactgcgacacgnttgtcctcgcggcttttacccggtcaaaacagcgttacggtgccccacgcctgacggatgaactgcgtgctcagggttacccctttaacgtaaaaaccgtggcggcaagcatgcgccgtcagggactgagggcaaaggcctcccggaagttcagcccggtcagctaccgcgcacacggcctgcctgtgtcagaaaatctgttggagcaggatttttacgccagtagcccgaaccagaagtgggcaggagacatcacgtacttacgtacagatgaaggctggctgtatctggcagtggtcattgacctgtggtcacgtgccatggcgctgttgcggcgtaagagccccgggaacgttatcgttcacacggaccgtggaggccagtactgttcagcagattatcaggcgcaactgaagcggcataatctgcgtggaagtatgagcgcaaaaggttgctgctacgataatgcctgcgtggaaagcttctttcattcgctgaaagtggaatgtatccatggagaacactttatcagccgggaaataatgcgggcaacggtgtttaattatatcgaatgtgattacaatcggtggcggcggcacagttgctgctcgaggaggagtcccgtgagcagtaaagtcgaacgtgaacgacgtaaggcgcaactgcttagccagatccagcaacaacggctggatctttccgccagtcgtcgtgaatggctggagacaacaggcgcttacgatcgtcgctggaatatgctgctaagtctgcgctcctgggcgctggttggcagtagcgtgatggcgatctggacgattcgccatcctaatatgctggtccgctgggccagacgcggttttggcgtatggagcgcctggcgtctggttaaaacgaccctcaagcagcaacacgttcgcgaataccggaggcctggtatgagcaaccaaggcgaataccccgaagataatcgggttgggaagcacgagccgcacgatttaagtttgacccgtcgcgatctgattaaagtgaggcgcaacagcgcgaccgccgtggtttatcctcattctaccgctggcggcaagcgttccggcagctacacccgcgccagagataatgcccctgacactgaaggtgaacggcaaaaccgagcagcttga

SEQ ID NO: 8886 - DNA, 1695 bp, Homo sapiens
  SIMILAR (886)..(1419): 991254mologous to Escherichia coli RhsB core protein with unique extension,accession number U00039,Smith-Waterman Score=933.
atgcgctcggacccggatacttcagttaatgaaattgagacgaaactttctgccctactgggtagtgagaccactggtgaaatcctttttgacctcttgtgcgctaacggtccagagtggaaccgcttcgttacgctggaaatgaaatatggccggatcatgctggatacggccaaaattattgatgagcaggacgttccgacacatatcctgagcaaactgacttttactttacgtaatcatcctgaaggagtggtgatgaaaaattttgaagttctgcagccactacagaactccctttccggtctaccgctatgggtatctgaacgtatattgcagcagataaatcagttaacccactacgagccagtgatcggcatcatgggtaaaactggggcgggaaagagtagcctttgcaatgccctgtttgccggtgaagtatcgccggtcagcgatgtagcggcctgtacacgtgatcctttacgctttcgcctgcagattggagaacactttatgaccatcgtggatctgcccggcgtgggcgaaagtggcgttcgcgataccgagtatgctgcgctgtaccgcgaacaacttccccggctcgacctgattctgtggctgattaaggctgatgatcgggcactggcgactgatgagcatttttaccgtcaggtgattggcgaagcataccggcataagatgctgtttgttatcagccagtcagacaaagctgaacccaccagcggtggaaatatcctttccacagagcagaaacaaaatatcagccgcaaaatctgcctgctgcatgagctattccagcccgtgcatccggtgtgtgccgtgtcggttcgcctgcacccggtagtagcgctactgcaacaattccgcacggatgatgagcggactcaccggtaccattacgacagtcagcaccggctggtcgactacacgcggacacaatatgaagagccgctggtcgaaagtcgctatctttacgacccgctgggccgcagggtggcaaaacgggtgtggcggcgtgaacgggacctgacgggctggatgtcgctgtcacggaaaccgcaagtgacctggtacggctgggacggcgaccggctgaccacgatacagaacgacaggagccgcatccagacgatttatcagccggggagcttcacgccactcatcagggtcgaaactgccaccggtgagctggcgaaaacgcagcgccgcagcctggcggatgcccttcagcagtccggcggcgaagacggtggcagtgtggtgttcccgccggtgctggtgcagatgctcgaccggctggaaagtgaaatcctggctgaccgggtgagtgaggaaagccgccgctggctggcatcgtgcggcctgaccgtggagcagatgcaaaaccagatggacccgcacggaagggacaacagcgtggtaccagaatacgatgaatggggtaacctgctgaatgaagagaacccgcatcagctgcagcagcttatccgcctgccggggcagcagtatgatgaggagtccggcctgtattacaaccgccaccgctattatgacccgctgcaggggcgatatatcactcaggatccgattgggctgaaagggggatggaatttttatcagtatccgttgaatccgatctcagacatcgaccccctgggtttatctatgtgggag

SEQ ID NO: 8887 - DNA, 1398 bp, Homo sapiens
  SIMILAR (601)..(1143): 961254mologous to Escherichia coli Transposase,accession number AB024946,Smith-Waterman Score=915.
  misc_feature (1)...(1398): n = a,t,c or g
atgggcgcttacgctatcgatctgctgctggcaggttacggcggtcgttgtgtaggtatccagaacgaacagctggttcaccacgacatcatcgacgctatcgaaaacatgaagcgtccgttcaaaggcgtggctgcgaccagcaacccgccaatccaaccgtgcgccagcggactgccactgcggcccataatccgccagctgcgcgcactgtccaccgtgatgatgccagacggatacacaacagcggaaagaccgcgacaccggcccacgccgcacccacaccggcggcgaacccagcgcaatacagtccaggctaacggcacccccctgcggaacaccgacccccccgaccacgccaagacccggcacccgaccacagacaccctacatacaaatagtatcaccagtaaaaaccctgaagccctgaagcttgctgaacgcatcggtgttactgccgcagcccgtgaactcagcctgtatgaatcacaactctacaactggcgcagtaaacagcaaaatcagcagacgtcttctgaacgtgaactggagatgtctaccgagattgcacgccgcgacatacttcgcgaagcgcctgaaatgaagtatgtctttattgaaaaacatcaggctgagttcagcatcaaagcaatgtgccgcgtgctccgggtggcccgcagcggctggtatacgtggtgtcagcggcggacaaggataagcacgcgtcagcagttccgccaacactgcgacagcgttgtcctcgcggcttttacccggtcaaaacagcgttacggtgccccacgcctgacggatgaactgcgtgctcagggttacccctttaacgtaaaaaccgtggcggcaagcctgcgccgtcagggactgagggcaaaggcctcccggaagttcagcccggtcagctaccgcgcacacggcctgcctgtgtcagaaaatctgttggagcaggatttttacgccagtggcccgaaccagaagtgggcaggagacatcacgtacttacgtacagatgaaggctggctgtatctggcagtggtcattgacctgtggtcacgtgccgttattggctggtcaatgtcgccacgcatgacggcgcaactggctgcgggctgccntaagccgctttggggaacgccctctttcccggggcccgcttgtggcctggcaccctcttccgcgggggtgcttccccgaggctttgttcccgcggtgtggctcgactctgaggatcccgaggagtatgtgggcagcagtgatttcctgactaaaatgcaaagtatgaagaaagtggatttaaaaaaaaatagagccgccacagacgcagacgggcagttcagccccagatgctgcatgcctgagaaatatgcaggttcccacaactag

SEQ ID NO: 8888 - DNA, 1917 bp, Homo sapiens; identical to SEQ ID NO: 7097
  SIMILAR (814)..(1827): 761254mologous to Homo sapiens gonadotropin inducible transcription repressor-2,accession number AB021642,Smith-Waterman Score=1478.

SEQ ID NO: 8889 - DNA, 4770 bp, Homo sapiens; identical to SEQ ID NO: 4188
  SIMILAR (1525)..(2382): 981254mologous to Escherichia coli K12 putative general secretion pathway for protein export (GSP) (TYPE II TRAFFIC WARDEN ATPASE),accession number AE000409,Smith-Waterman Score=1388.

SEQ ID NO: 8890 - DNA, 2294 bp, Homo sapiens
  SIMILAR (1548)..(1730): 1001254mologous to Escherichia coli RhsC protein precursor,accession number D90709,Smith-Waterman Score=335.
atggggaaggtaccaggcctagaggagagagggcacagaaggggctcgtgtggcacgcagcagaggagctggcactcagtccttatagatcaggggaggtaccgagctcgaattgttcgtatgctgcaggtcgactctagaggatcccccgatgacttccaccatgttttgccatggcagaatctgctccatgcgggacaagaaaatctcttttctggtctgacggcgcttactgctgaattcactgtcggcgaagaaactagccatatgaaactcaccaacagaaaaaacatcaactctgtaactaaggatcctaaactgctgtcccacagtcaaaaggatggacagtattcccacttacttacctttctgctacaggatgacagacaccacatccggatggttataggcgatcgcatgtgcagtggcgtctgcagatggacgctgtcagccaagctgtgccatcaaggactggacctgtggggcacaggacagcttgcagctacactctatgccaagggcttcccagagaaggccgacccaggtggccaagggcagggcccaattgcccacccccagccaagtgccccagagaagaaggtggataacaagggccggaatttccttcatgtggcagttcagaactctgatattgaaagtgtgctgttcctgatcagtgtccacgctaatgtgaattcaagagtccaggatgcctccaagttgacccccctgcacctcgctgtccaagcaggctcagaaattattgtccgcaatttgagaaactgcccccagcgagaaaacatcctacttctagcttaccaagaacaaggctgtcacccaaacgcctccctcttctacccagcctccatcccatcattggggatctgtactccacaccttgtccctgccttcggcacttgttcctctcagtctaatgggacacacacagagcacatgctcaggagtgggctcactctagaggatccccctggtggagtacacccgcgaccgcctgcaccgggaaacgctgcgcagcttcggccgttatgaactcaccaccgcttatacccctgccgggcagttacagagccagcacctgaacagcctgctgtctgaccgcgattacacctggaacgacaacggcgaactcatccgcatcagcagcccgcgccagacccggagttacagctacagcaccaccggcaggctgaccggcgttcacaccaccgcagcgaatctggatatccgcatcccgtatgccacagacccggcaggtaaccgcctgcccgacccggagctgcacccggacagcaccctcagcatgtggccggataaccgtatcgcccgtgacgcgcactatctttaccggtatgaccgtcacggcaggctgacagagaaaaccgacctcatcccggaaggggttatccgcacggatgatgagcggactcaccggtaccattacgacagtcagcaccggctggtgcactacacgcggacacaatatgaagagccgctggtcgaaagtcgctatctttacgacccgctggggccgcagggtggcaaaacgggtgtggcggcgtgaacgggacctgacgggctggatgtcgctgtcacggaaaccgcaagtgacctggtacggctgggacggcgaccggctgaccacaatacagaacgacagaacccgcatccagacgatttatcagccggggagcttcacgccactcatcagaaggatccccgtattgggcggtggcgatacgacaatggattgtttgcggacttccatccgcctcaatgccgccagcgtgacctgcgcgtatcgtcgtgatcaaatcagtatgccgggctcgcgcaaagaggtggttaatgcgcgcgaggaaggtgtcgagtttcagttcaattttcaaccgcaatatatcgcttgtgacgaagatgggcgtttaactgcggtgggcctgattcgtaccgccatgggtgagccggggccggatggtcgccgtcgtcctcctccggtagcgggttcagagtttgaattgcccgccgatgttctgattatggcctttggtttccaggcgcatgcaatgccgtggttgcagggcagcggaattaaactcgataaatggggcctgattcaaaccggtgacgtcgggtatttacctacccagacgcatctgaaaaaagtctttgctggtggtgatgcagttcatggcgcggatctggttgtcactgcaatggccgcaggaaggcaggcggcgcgcgatatgttaactctgtttgatacgaaggcatcgtga

SEQ ID NO: 8891 - DNA, 3553 bp, Homo sapiens
  SIMILAR (1276)..(2208): 911254mologous to Escherichia coli core protein,accession number AF044502,Smith-Waterman Score=1490.
ctgactactcatcgggaaaacatggcgctgacgaatggtttctgccatcacatagcgggtcagtggcacaattaaatgatgttcttccgcgataggaataaacacatccggtgaaatccagccctgacgcggattgttccagcgcagcaaaatctctacaccaatacattgctggctgcgcgcattaagcaaaggctgacagaacaattcgaactcatgttgcgccaggcccagattgatttcgcgggaaaagctcattcgctcactgaagcgcaggccaacaccacccaggtttcagcggagcgcgaccgtctgtttaaaaattatcaacgttacttgaaaggcagccaggcggcggtgaatccgttctcggaacgtgacatcgacgatgcgcggcaaaatttcctcgcgcaggatgcgctggcgcagatccagagccagctggatagcctggttaacggcgagcaatcgcagattgtgagcctgaaagcacagctcgcggaagcaaaatataaccttgagcagacgatagtgcgtgcgccgagcaatggttatgtgacccaggtactgattcgtccgggtacctatgccgcgtcgctgccgctacgtccggtgatggtgtttatacccgatcagaaacgacaaatcgtggcgcagttccgtcagaactccttgctgcgactggctcctggcgacgatgcggaagtggtgtttaatgctctgccaggtaaggtattcagcggtaagctggcagccattagtccagccgttcccggcggagcttatcagtcgaccggcaccttacagacgttaaacacagcgccgggttcagatggcgttatcgcgaccattgaactggatgagcacactgatttgagcgctttaccagacggtatttacgcccagaacccaaaaaatctgaaaattgttgaactgaaagccccgcaactgccgcgttctctggacgacgcgcaaatcgctctggcagttatcaataccacctatgccagccagattggcctgactccggcgaaagacggtatctttgttgaagataaagagtccccgtacgtaaacctgatcgtgacgcgtgaagataacaaagacgccgagaacgtgaagaaattcgtccaggcttatcagtctgacgaaatcccctgtcgaacccgttcaaagcactgcaccccagccgaaagcggagcctgcaaaaccgaaagcgccgcgcgccacgccggtccgaatttataccaatgcagaagaattagatcggcaaaccgttccgcgatctcggtgaagggctggcgaaccccctgtataccggacagcctgcccgccgtggaatggctgacctacggcagcggttacctggcaggcatgaaactcggcgacacaccgctggtggagtacacccgcgaccgcctgcaccgggaaacgctgcgcagcttcggccgttatgaactcaccaccgcttatacccctgccgggcagttacagagccagcacctgaacagcctgctgtctgaccgcgattacacctggaacgacaacggcgaactcatccgcatcagcagcccgcgccagacccggagttacagctacagcaccaccggcaggctgaccggcgttcacaccaccgcagcgaatctggatatccgcatcccgtatgccacagacccggcaggtaaccgcctgcccgacccggagctgcacccggacagcaccctcagcatgtggccggataaccgtatcgcccgtgacgacaactatctttaccggtaatgccggtcccggcagggtgacagagaaaaacgaccctcatcccgaaagggggttatccgcacggatgatgagcgcacccaccggtaccattacgacagtcagcaccggctggtgcactacacgcggacacaatatgcagagccgctggtcgaaagtcgctatctttacgacccgctgggccgcagggtggcaaaacgggtatggcggcgtgaacgggacctgacgggctggatgtcgctgtcacggaaaccgcaagtgacctggtacggctgggacggcgaccgcctgaccacgatacagaacgacagaacccgcatccagacgatttatcagccggggagcttcacgccactcatcagggttgaaaccgccaccggtgagctggcgaaaacgcagcgccgcagcctggcggatacccttcagcagtccagacggcgaagacggtggcagtgtggtgttcccgccggtgctggtgcagatgctcgaccggctggaaagtgaaatcctggctgaccgggtgagtgaggaaagccgccgctggctggcatcgtgcggcctgacggtggagcagatgcaaaaccagatggacccggtgtacacgccggcgcgaaaaatccacctgtaccactgcgaccatcgcggcctgccgctggcgctcatcagcacggaaggggcaacagcacctcgagggtcccgcgacgtgccggtacccgacagtcgcgagtcgagagcgagctgcgaacaacggttcccccgcccgactcgcggtagacacacttacagtgccgtgacactaaccgcaacgtttcggacggaactgagagtctaccgagatgcacgtctcaaacgccagctgcaagaacggaaggaagagctggctatcctccaaaagcccgcgaaatacttcgcgaagcgcgtctttattgaaaaacatcaggctgagttcagcatcaaagcaatgtgccgcgtgctccgggtggcccgcagcggctggtatacgtggtgtcagcggcggacaaggataagcacgcgtcagcagttccgccaacactgcgacagcgttgtcctcgcggcttttacccggtcaaaacagcgttacggtgccccacgcctgacggatgaactgcgtgctcagggttacccctttaacgtaaaaaccgtggcggcaagcctgcgccgtcagggactgagggcaaaggcctcccggaagttcagcccggtcagctaccgcgcacacggcctgcctgtgtcagaaaatctgttggagcaggatttttacgccagtggcccgaaccagaagtgggcaggagacatcacgtacttacgtacagatgaaggctggctgtatctggcagtggtcattgacctgtggtcacgtgccgttattggctggtcaatgtcgccacgcatgacggcgcaactggcctgcgatgccctgcagatggcgctgtggcggcgtaagaggccccggaacgttatcgttcacacggaccgtggaggccagtactgttcagcagattatcaggcgcaactgaagcggcataatctgcgtggaagtatgagcgcaaaaggttgctgctacgataatgcctgcgtggaaagcttctttcattcgctgaaagtggaatgtatccatggagaacactttatcagccgggaaataatgcgggcaacggtgtttaattatatcgaatgtgattacaatcggtggcggcggcacagttggtgtggcggcctcagtccggaacaatttgaaaacaagaacctcgcttag

SEQ ID NO: 8892 - DNA, 1419 bp, Homo sapiens
  SIMILAR (563)..(709): 291254mologous to Escherichia coli Sensor protein BaeS (EC 2.7.3.-),accession number D90846,Smith-Waterman Score=46.
atgaagttctggcgacccggtattaccggcaaactgtttctggcgattttcgccacctgcattgtcttgctgatcagtatgcactgggcggtgcgtatcagttttgagcgtggctttattgattacatcaagcatggtaatgaacagcgattacaactgttaagtgatgcgcttggcgagcagtatgcgcagcatggcaactggcgcttcctgcgcaacaatgatcgctttgtctttcagatcctgcgttcatttgaacacgataattcggaagataaacccggcccgggtatgccaccgcacggctggcgtacccagttctgggtggttgatcaaaacaacaaagtgctggttggtccgcgagcgccgattccactgacggtacacggcgacccattctggtcaacgagaagcccgagggggggaaagggagggagcggcagggcggacggcgaaggggcggcaggggacaggcccgaaaagggctcgggaggggcctcaagcgcggaggggagagggagaagcgcgcgccaaagagcaggagccgaaaggaggcggaccagggggaacgaagcaaggcgagagcggcgggagggacccagcgaggcagagcgaaggggggagagggggaccgacagcgacgcgacggaacggggagagagccgaggaagcacgggagcaggggagcgcgaacaggagaacaggagggatcagaatagcccgccagcgccgagaaagcagcaggaggagaacgaccgcgggatgacgcaagcacagactcatcgcaccacgcctcaggaggagccggcggcgcaagcgcagtcccgctcggagaggaccctaggacaaaggagagatcggagggtgggcagcgcagacacaccggggcagccacgaacagggagcgcggagggtgccagaagaccgagacgcaagagcccggcggaaaaacgaagagccacgcggcacgaccgaggacgacaaacacaagaaacgggagcaggaaagggccagaaaggaaggggccgacggacgagggcacaaggcggaagcgggccgcaggaaaagacgaaagcgacagtgaaaagaggagatgcggaaaatccggcagcaggagagcgggggggaaaaaaaaagggggttgtgcggccgcccccccgggggggggaacaactgcatggagggacgggagagaagaggacggaaacgataaaagttcttccaatggccaataataccactggattcacccgaaaatatcaaagctgctggctattcctggaaaggtttacgcgctgcatggatcaacgaagcggcattccgtcaggaaggcgtagcggtattgttggcggtgccacctcccaggttcaagtgaccctctttcctcagccccccaaagtgctaggattacaggcatga

SEQ ID NO: 8893 - DNA, 1518 bp, Homo sapiens
  SIMILAR (1182)..(187): 921254mologous to Escherichia coli Sensor protein BaeS (EC 2.7.3.-),accession number D90846,Smith-Waterman Score=1512.
ttatccatgacatatacacatactgacatacacactagaaccatcctgacctaggacgacatactgagctccagtcaactgtggtttaactacacacacaaagacaaatacaacgagagagcattcaaacagaccaacgtgcaccaaaacacacacatcagttagcacgaccaacacaccagtgcacccaagcccaacacacaagggccccaaagacccaaacccttcggtgcgataaaaacgttcaaacaatttttgtagctgatcgtcactgacacctggcgcactgtcggcaaaggtcaggcgcaccgttttgtcgcgctgcccggcagagatttgcaggctgccgccgctgtcagtgtagcgcaggctgttttccagtaagttattgaataactgcattaaacggtcgcgatcgccaaatacggtaatactgtctggcagggaaaattgcagtttcaggccacgactggcgaatcgttcgcgaaatgcgccgcccgccacttccagcagtgggatcaaatctaccggtgctttttgataggcgagagcgccttcatcagacatcgacaactgatggagatcgtcaaccagtttggtcagtgtaccgacctccgcctgtaaagacgccaccgtctccggcgtgaatttacgcacgccatcctgaatggcttccagttcaccgcgcagcaccgctaatggcgtacgcagttcgtgagaaatatcggccataaaatcgcgccgcatttgctggtttttctccagtgtgctggcaagctggttgaagtcttgcgccagtttgcccagttcatcttcactggtgggcgttacgcgggtagtgaaatcgcccgccgccagtttgtgcgtgccatcgacaagtcgttttaccggtgccagtaaaccgcgcgccagcagaaaagtggcaagtgccgcgagtaacgttgccagggcgacaatcaaccagctggtttgccgctgttgtttatcgaaattgatatcagtattgcgcgttaaccgctcaacgggggaggcgatcaccgcgccaacttccgcaccgttgaccagaatgggtcgccgtgtaccgtcaggtggaatcggcgctcgcggaccaaccagcactttgttgtttataccacccagaaatatcccttggagcttccctctctcgcctggccttggcttaacccgcatccatagcctctgagcactactcggcctccgccccttcgcggcttgcctcttggaagcgcatagcgtgaccttgcgccggaagtcgctgagttcttcctgattctgcggggcttgcgcttgggctcccgtaccctcaccccctctgctggtgttcttcttgggcttcccctctttgtcccctgggccgctttctaggggctcttcgttatccgtagggcctcgttgtccccgtagggttgctcggctagggctcggcggctcactgggtggtcgtccattcttctgacgggctattcccctccctcgcggtgtgttgttccgccccat

SEQ ID NO: 8894 - DNA, 1065 bp, Homo sapiens
  SIMILAR (19)..(576): 1001254mologous to Escherichia coli MutL Protein,accession number Z11831,Smith-Waterman Score=983.
atgattaggatcccaggctgcgaagacaaactgggggccgatcagcaaccggcatttgtgttgtatctggagatcgacccacatcaggtggacgtcaacgtgcaccccgccaaacacgaagtgcgtttccatcagtcgcgtctggtgcatgattttatctatcagggcgtgctgagcgtgctacaacagcaactggaaacgccgctaccgctggacgatgaaccccaacctgcaccgcgttccattccggaaaaccgcgtggcggcggggcgcaatcactttgcagaaccggcagctcgtgagccggtagctccgcgctacactcctgcgccagcatcaggcagtcgtccggctgccccctggccgaatgcgcagccaggctaccagaaacagcaaggtgaagtgtatcgccagcttttgcaaacgcccgcgccgatgcaaaaattaaaagcgccggaaccgcaggaacctgcacttgcggcgaacagtcagagttttggtcgggtactgactatcgtccattccgactgtgcgttgctggagcgcgacggcaacatttcacttttatccttgccacattactggaatctggtgttcggactgacattgatagccaatgataccgcgtttgttgataccggcatcggtccgctcatcgtcaatggtcgagtccgcaaagtgattgcttcacatatcggcaccaacccggaaacaggtcggcgcatgatatctggtgagatggacgtcgttctggtgccgcaaggtacgctaatcgagcaaattcgctgtggtggagctggacttggtggttttctcaccccaacgggtgtcggcaccgtcgtagaggaaggcaaacagacactgacactcgacggtaaaacctggctgctcgaacgcccactgcgcgccgacctggcgctaattcgcgctcatcgttgcgacacacttggcaacctgacctatcaacttagcgcccgcaactttaaccccctgatagcccttgcggctgatatcacgctggtagagccagatgaactggtcgaaaccgcgcgagctgcaacctga

SEQ ID NO: 8895 - DNA, 1890 bp, Homo sapiens
  SIMILAR (22)..(1005): 1001254mologous to Escherichia coli hydrogenase isoenzyme hypD,accession number X54543,Smith-Waterman Score=1727.
atggcgaggaaaaataatgcgtttgttgatgaatatcgcgcgccggaacaggtgatgcagttaattgagcatctgcgcgaacgtgcttcacatctctcttacaccgccgaacgccctctgcggattatggaagtgtgtggcggtcatacccacgctatctttaaattcggcctcgaccagttactgccggaaaacgttgagtttatccacggtccggggtgcccggtgtgcgtactgccgatgggtagaatcgacacctgcgtggagattgccagccatccggaagtcatcttctgtacctttggcgacgccatgcgcgtgccggggaaacagggatcgctgttgcaggcaaaagcacgcggtgccgatgtgcgcatcgtttactcgccgatggatgcgttgaaactggcgcaggagaatccaacccgcaaagtggtgttcttcggcttaggttttgaaaccactatgccgaccaccgctatcactctgcaacaggcgaaagcgcgtgatgtgcagaatttttacttcttctgccagcacattacgcttatcccgacgttgcgcagtttgctggaacagccggataacggtatcgatgcgttcctcgcgccgggtcacgtcagtatggttatcggcaccgacgcctataattttatcgccagcgattttcatcgtccgctggtggttgctggattcgaaccccttgatctactacaaggcgtggtcatgctggtgcagcagaaaatagcggcccacagcaaggtagagaatcagtatcgtcgagtggtaccggatgccggtaacctgctggcgcaacaggcgattgccgatgtgttctgtgtcaacggcgacagcgaatggcgcggcttaggcgtgattgaatcttctggcgtgcacctgacgccggattatcaacgattcgatgccgaagcacatttccgcccggcaccgcagcaggtctgcgatgacccgcgcgcgcgttgtggtgaggtattaacgggcaaatggcgtttgactggcccactgcgtcaggcacaattgacgccgggtgaagcgcccgtttgcgcccagccgctgctgattccgttgcggctaaaagtttctgccgaagaaaaatcggcattagaaaaagcgcagtctgccctggcggaattgggtattgatttccagtcagatgcacagcatgtgaccatcagggcagtgcctttacccttacgccaacaaaatttacaaatcttgattcctgaactgataggctacctggcgaagcagtccgtattcgaacctggcaatattgcgcagtggattgcacgaaatctgatgagcgaacatgcgcagtggtcaatggcacaggccataaccctgctggcggacgtggaacggttatgtccgcaacttgtgaaaacgccgccgggtggcgacgaaagctgggtgaaaacaccgatgcgccagaccccgttccccggcattgtgccggacgagagcgatcgcgcggcagaaacccggtcaacgctgacctcttccggtgcgatggcggcggtgattggcttccagtcgccgtataacgaccagcgcagcgtgattgcgctgttggcagatagcccacgcggttatgaaatgcttaacgatgcggtgaacgatagcggcaaacgcgccaccatgttcggttcggtcgcggtgatccgcgagtccggtatcaacagcctacgtgttggcgacgtttattacgtaggtcatctgccgtggttcgagcgcgtgtggtatgcgctggcaaaccatccgattctgctggcggtgctggcggctatcagtgtgatattgctggcatgggtactgtggcgtctgctgcgaattattagtcgtcgtcgtcttaaaccggataacgagtaa

SEQ ID NO: 8896 - DNA, 1375 bp, Homo sapiens
  SIMILAR (369)..(587): 861254mologous to Escherichia coli BaeS,accession number D14054,Smith-Waterman Score=336.
attgtagatgagtatgggcgtcactatcgccgggctgttgctgggactttttggttcacagcatgtcagcgtcgacagcggcaccacacaaaccgtctttatgtacacctggcttagcatggcgttgatcatcgcccttccggcgttcatctttgccagagtgccgaacgatacgcatcaaaatgtagctatttcgcggcgaaaaaggagcgcgcaatgaagttctggcgacccggtattaccggcaaactgtttctggcgattttcgccacctgcattgtcttgctgatcagtatgcactgggcggtgcgtatcagttttgagcggggctttattgattacatcaagcctgggaaatgaacaggggattacaactgttaagtgatgcgcttggcgagcagtatgcgcagcatggcaactggcgcttcctgcgcaacaatgatcgctttgtctttcagatcctgcgttcatttgaacacgataattcggaagataaacccggcccgggtatgccaccgcacggctggcgtacccagttttggggtggttgattcaaaccaacaaagtgttggtttggtccgcgagccgccgatttccacctgacggtacacggcgacccattttggtcaacggtgcgaaagttggcgcggtgatcgcctcccccgttgagcggttaacgcgcaatactgatatcaatttcgataaacaacagcggcaaaccagctggttgattgtcgccctggcaccgttactcgcggcacttgccacttttctgctggcgcgcggtttactggcaccggtaaaacgacttgtcgatggcacgcacaaactggcggcgggcgatttcactacccgcgtaacgcccaccagtgaagatgacctgggcaaactggcgcaagacttcacccagcttgccagcacactggagaaaaaccagcaaatgcggcgcgattttatggccgatatttctcacgaactgcgtacgccattagcggtgctgcgcggtgaactggaagccattcaggatggcgtgcgtaaattcacgccggagacggtggcgtctttacaggcggaggtcggtacaaagaacaaattggttgacgatctccatcagttgtcgatgtctgatgaaggcgctctcgcctatcaaaaagcaccggtagatttgatcccactgctggaagtggcgggcggcgcatttcgcgaacgattcgccagtcgtggcctgaaactgcaattttccctgccagacagtattaccgtattggcgatcgcgaccgttaatgcagtattcatacttgcccaaccaaaggccacccctggaatccggtttgaaacgggaaaccgggccaaaaacacgctgccgggaatctga

SEQ ID NO: 8897 - DNA, 3552 bp, Homo sapiens
  SIMILAR (2821)..(3540): 941254mologous to Escherichia coli MaoC protein,accession number D90777,Smith-Waterman Score=1169.
atggccatctacaagcagtcacagcacatgacggaggttgtgaggcgctgcccccaccatgagcgctgctcagatagcgatggtctggcccctcctcagcatcttatccgagtggaaggaaatttgcgtgtggagtatttggatgacagaaacacttttcgacatagtgtggtggtgccctatgagccgcctgaggttggctctgactgtaccaccatccactacaactacatgtgtaacagttcctgcatgggcggcatgaaccggaggcccatcctcaccatcatcacactggaagactccagtggtaatctactgggacggaacagctttgaggtgcgtgtttgtgcctgtcctgggagagaccggcgcacagaggaagagaatctccgcaagaaaggggagcctcaccacgagctgcccccagggagcactaagcgagcactgcccaacaacaccagctcctctccccagccaaagaagaaaccactggatggagaatatttcacccttcagatccgtgggcgtgagcgcttcgagatgttccgagagctgaatgaggccttggaactcaaggatgcccaggctgggaaggagccagggggacagctcctccgccctgagtccacaggcgtggcgttccgtggccggttcttaaaggggggccttccgcaggcaccagctgtggccgcggccacaccatggttgtgcacccagggtgtcgctggggaaaccacgcccgccgtcaatgttaagtacaatgtacgcgtaagagtctctgagtatatatcaatgcacgtgcatcgtgaagtcacagcgcgtaacgtgtacgtcacacagacgcgtcgtcctatgaccaccttccctactctcgcatgggagaccccacactaccatcggcgctacggcgtttcacttctgagttcggcatgggttcaggtgggaccaccgcgctactgccgccagacaaatgctttgtctaatctgccgaactttaacctaaaaagtggtgctgatacccagagtcgaactggggacctcacccttaccaagggtgcgctctaccaactgagccatatcagcacgctaaatttgatgcctggcagttccctactctcgcatggggagaccccacactaccatcggcgctacggcgtttcacttctgagttcggcatgggccgtttggatggaggcatcgcgtgttgacggcaacagatcagagcggtcacacctagctttgcgaggcactttcgccaggttaagactacgtgcccggtcgtgcaggatgtcaaagacaccgttggtcatcaccactttttcaccatgtttacgcgctgccgctacggccagcttcagttcctcttcggtcatcacgctcaaagcctggtatcgtgcgacgtccacgctacagcgattttccagactcgatcggcgaaaccgtggaggttcccagtattggcgaccaccacgccaagtcgccagcatatgtctgaagaatgcagagcttcattccacgcggaattaccacgctgccagcggttgtcctgcagtgacgccatatcaccggctgcacctgttgggcgtagtcagaaagcaccagcgcgccaatcgaactcagcgcctgattaatccgctcgtgcagcggctgcggatcaacaccttcgaaaccttcttcaaaatccagacggatcagctgttggttgcgggaaaaacgaagtcgcatttgacgttgaacgtcaggcccaagaggactttaactcagcgcgcgcgctgcatcgtcaatgcccgtcaacccgaccaggcgtgcattagcaccgagagaagcgatattcatcgccacatacagcggcctgtaggtgaacgttcgaatgaactttcgctggcctggcggaccttcccgacgtatgccagtggcatgtcgccctttatgacaccggtttcctgcaaattggcctcgtttctcgccgtttcatgccggactgatgatgatcccgatggtgcttggcagcatgggaatgaagcgaattgtggtacaggtggtgaatcgctttggttatcgtcgggtactggtagcgaccacgctgggtctgtcgctggtcaccctgttgtttatgactaccgccctgctgggctggtactacgttttgccgttcgtcctgtttttacaagggatggtcaactcgacgcgtttctcctccatgaacaccctgacgctgaaagatctcccggacaatctggcgagcagcggcaacagcctgctgtcgatgattatgcaattgtcgatgagtatcggcgtcactatcgccgggctgttgctgggactttttggttcacagcatgtcagcgtcgacagcggcaccacacaaaccgtctttatagtgccgaacgatacgcatcaaaatgtagctatttcgcggcgaaaaaggagcgcgcaatgaagttctggcgacccggtattaccggcaaactgtttctggcgattttcgccacctgcattgtcttgctgatcagtatgcactgggcggtgcgtatcagttttgagcgtggctttattgattacatcaagcatggtaatgaacagcgattacaactgttaagtgatgcgcttggcgagcagtatgcgcagcatggcaactgcgcttcctgcgcaacagaagaacttcgaagtctgctgagtggcaatatatttccacgattggaacttggtgtacattcacagtacacatttctatccgtactgcagtctgtcgggccgtaccggttgatcaacacgctattagcggcgagcgttatgggaagtgaccatgaaagtcctgatatggcggctgcccgccagttggccattgaaaaagcggtcgctaaacatctgctgagtgaaaaagagcgtttctatgctctttctgcgcaaacaggcgcaacgcgggcagacagttggcttgatattgaaggtggcattgggacgttatttacttacgccagcctcggtagccgggagctgcctgacgatacgctgtggccggaagatgaattgatccccttatcgaaagaaggtggatttgccgcgcgccatttactgacctcaaagtcaggcgtggcagtgcatattaacgcctttaacttcccctgctggggaatgctggaaaagctggcaccaacgtggctgggcggaatgccagccatcatcaaaccagctaccgcgacggcccaactgactcaggcgatggtgaaatcaattgtcgatagtggtcttgttcccgaaggcgcaattagtctgatctgcggtagtgctggcgacttgttggatcatctggacagccaggatgtggtgactttcacggggtcagcggcgaccggacagatgctgcgagttcagccaaatatcgtcgccaaatctatccccttcactatggaagctgattccctgaactgctgcgtactgggcgaagatgtcaccccggatcaaccggagtttgcgctgtttattcgtgaagttgtgcgtgagatgaccacaaaagccggcacaaggtgttctgtcattgagtttttctga

SEQ ID NO: 8898 - DNA, 1801 bp, Homo sapiens
  SIMILAR (1)..(27): 1001254mologous to Escherichia coli MutL Protein,accession number Z11831,Smith-Waterman Score=48.
atgatgcgcgatcgcctgatcaatcactgcgatccgtccggcctgcgaatgacaactgggggccgatcagcaaccggcatttgtgttgtatctggagatcgacccacatcaggtggacgtcaacgtgcaccccgccaaacacgaagtgcgtttccatcagtcgcgtctggtgcatgattttatctatcagggcgtgctgagcgtgctacaacagcaactggaaacgccgctaccgctggacgatgaaccccaacctgcaccgcgttccattccggaaaaccgcgtggcggcggggcgcaatcactttgcagaaccggcagctcgtgagccggtagctccgcgctacactcctgcgccagcatcaggcagtcgtccggctgccccctggccgaatgcgcagccaggctaccagaaacagcaaggtgaagtgtatcgccagcttttgcaaacgcccgcgccgatgcaaaaattaaaagcgccggaaccgcaggaacctgcacttgcggcgaacagtcagagttttggtcgggtactgactatcgtccattccgactgtgcgttgctggagcgcgacggcaacatttcacttttatccttgccagtggcagaacgttggctgcgtcaggcacaattgacgccgggtgaagcgcccgtttgcgcccagccgctgctgattccgttgcggctaaaagtttctgccgaagaaaaatcggcattagaaaaagcgcagtctgccctggcggaattggggatggtcaactcgacgcgtttctcactccatgaacaccctgacgctgaaagatctcccggacaatctggcgagcagcggcaacagcctgctgtcgatgattatgcaattgtcgatgagtatgggcgtcactatcgccgggctgttgctgggactttattgcatgtcagcgtcgacagcggcaccacacaaaccgtctttatgtacacctggcttagcatggcgttgatcatcgcccttccggcgttcatctttgccagagtgccgaacgatacgcatcaaaatgtagctatttcgcggcgaaaaacggagtcgcgcaatgaagttctggcgacccggtatcaccggcaaactgtttctggcgattttcgccacctgcattgtcttgctgatcagtatgcactgggcgcgccgattccacctgacggtacacggcgacccattctggtcaacggtgcggaagttggcgcggtgatcgcctcccccgttgagcggttaacgcgcaatactgatatcaatttcgataaacaacagcggcaaaccagctggttgattgtcgccctggcaacgttactcgcggcactggccacttttctgctggcgcgcggtttactggcaccggtaaaacgacttgtcgatggcacgcacaaactggcggcgggcgatttcactacccgcgtaacgcccaccagtgaagatgaactgggcaaactggcgcaagacttcaaccagcgtgccagcacactggagaaaaaccagacccccatcacaagtcgtggtcacccgcggatctttctcgctcgtcacccagcgcccgcgcccacaactcttaccagtttggctttaaagataattcgcagtcccgcgtttcttcctgatactgccagcgaatgtgcaatggcgattgattgctacattttggccgcttccacacaggcgtacaaggctgccagttcactctcgttaagcgtggtcctggcgacatccgcgcgttttaaaacctcatcgaccagcatatgggtaaaatcttcgtccaccaactcttgtgaatga

SEQ ID NO: 8899 - DNA, 2193 bp, Homo sapiens
  SIMILAR (1)..(798): 1001254mologous to Escherichia coli PHTHALATE TRANSPORTER,accession number D90856,Smith-Waterman Score=1338.
  misc_feature (1)...(2193): n = a,t,c or g
atggggctgttctatatgggcgcaccgctggcgttaacactgggatcaccgctttccggcgcgctgttggagatgcatggatttatggggcatcccggctggttctggatgtttgtgattgaaggattgttggcagtcggtgctggggtattcacattcttttggcttgatgacacaccggagcaggcacgttttctgagtaaacaagaaaaaacgttgcttatcaatcaactggcaagtgaagaacaacagaaagtgacttctcggctgagcgatgcgctgcgtaatggccgagtctggcaactagcgattatctacctgaccattcaggtggcggtttacggattaattttcttcctgccgacccaggttgcggcattgctgggaacaaaagtgggctttacagcgtcggtggtcaccgccattccgtgggttgcggccttgtttgggacctggcttattccgcgctattccgataaaaccggcgaacggcgtaatgtcgcagcgctgacattactggcggcgggcattggtattggtctgtccgggctgctttctccagtaatggcgatcgtagcgctgtgtgttgcagctatcgggtttattgccgtgcagccagtgttctggacgatgccgacacaactgctttccggtacggcgctggctgcgggaattggttttgtaaacctgtttggtgcagtgggcgggtttattgccccgatcctgcgcgtgaaagcagaaacgttatttgccagcgatgcggcgggattactgacgctggcagcggtggcggtcatcgaccgacgtggcacatcattaaataggttaaggaacacgatgatcgcattattaagcaatccctttaaagaacgtttacgcaagggcgaagtgcaaattggtctgtggttaagctcaacgactgcctatatggcagaaattgccgccacttctggttatgactggttgctgattgacggggagcacgcgccaaacaccattcaggatctttatcatcagctacaggcggtagcgccctatgccagccaacccgtgatccgtccggtggaaggcagtaaaccgctgattaaacaagtcctggatattggcgcgcaaactctactgatcccgatggtcgatactgccgaacaggcacgtcaggtggtgtctgccacgcgctatcctccctacggagaactcatgatctggataatgctcgccacgctggcggtagtgtttgtggttggttttcgggtgctgacatccggggccagaaaagaaattcgccgtctcagcgatcggctgaacatcgatgtcgtacccgtggagtcgatggtcgatcaaatggnaaataactggcgagggtttccagatatcatgagttctgattacgcaggagaagtcatgctctggataatgctcgccgcgctgacggtagtgtttgtggttggttttcgggtgctgtcatgcggggccagaaaagcaattcgccgtctcagcgatcggctgaacatcgatgtcgtacccgtggagtcgatggtcgatcaaatgggaaagtcagctggtgactgtaaactggtgctcagggggggaggggaagggggggtcaagccacctagcccaatacaagtcgacattcgcatcatttctgcaactaatcagaatttggcccagttcattgccgaaggtaaattccgcgaagatctcttctaccgacttaatgttatcccgataactctgccaccgctgcgtgaacgtcaggaagatattgaactattggtgcattactttttacatctgcatacccgtcgtctgggatcggtttatcctggcattgctcccgatgtcgtcgaaatattgcgtaagcatcgttggcccggaaacctgcgcgagttaagcaatttgatggaatatctggttaacgtggttccttcaggtgaagttatcgacagcacgctattgccgccaaatctgctgaataatggcacaacggagcaaagtgatgtaacagaggtcagtgaggcgcacctgtcactcgatgatgcgggcggcacggcgctggaggagatggaaaagcaaatgatccgcgaggcgctttcacgtcataacagcaagaagcaagttgctgatgaactgggcatcggcattgctacgctctatcgcaagattaagaaatatgagttgttaaacacataa

SEQ ID NO: 8900 - DNA, 219 bp, Homo sapiens
  SIMILAR (34)..(93): 851254mologous to Escherichia coli sbp,accession number X02519,Smith-Waterman Score=89.
atgatccaacgcgcgaattgtcgaacagtacaacaggcattcagcgcccactggaaacagcaaactggtgataacgtggtgatcgtcagtcacacggtggctcaggtgaaggtggtcagctttcctctggggccaagccctggactggtttccccatcccttgtcagttccctgccctgtccacaagcccttaagctctcttctcagttataccacagg

SEQ ID NO: 8901 - DNA, 781 bp, Homo sapiens
  SIMILAR (217)..(780): 1001254mologous to Escherichia coli similar to,accession number D90870,Smith-Waterman Score=1070.
atgctgtgtacaaagtgggataaactgggcttggagaaaaacgcgggtaaaaataaaaacgcgtacaaatggtatgggtggcccgcaaatgcacctgatgaaccgcatattgaacaattggttggcgagtgccgtgttatgcggcaattaaaacgactcattagccgtattgcacccagcccatccagcgttatggtggttggtgaaagcggcacggcgatacctgttgtatctcatgcagaatttaaaggcggttttgcagatatcggcgtgcattatctggactggaccagccggactaccgaaaaatcgtcgaccaaatcacacaaagatgattttggttatcttgaatttgaaggtggcgctaactttagttggggagaaatgtacgggttcttcgactgggaaaacttctataacggtcgccataataaaccaggtagcgagcagcgttatacctttaaaaataccaaccgtatttacctgggtgacaccggatttaatctctacttgcatgcgtatggcacctacggttctgcgaatcgcgtgaatttccacgacgatatgttcctgtacggtatcggctacaatttcaccggcagcggttggtggttcaaaccgttctttgctaagcgttatacagatcaaacctattacactggcgacaacggctatgtcgccggctgggttgcaggttacaactttatgctgggcagcgagaaattcactcttaccaactggaacgagtacgagtttgaccgtgacgctacctatgcagcgg

SEQ ID NO: 8902 - DNA, 1716 bp, Homo sapiens
  SIMILAR (575)..(1456): 891254mologous to Escherichia coli K12 putative transcriptional regulator,accession number AE000370,Smith-Waterman Score=1358.
atgaacaagtggggcgtagggttaacatttttgctggcggcaaccagcgttatggcaaaggatattcagcttcttaacgtttcatatgatccaacgcgcgaattgtacgaacagtacaacaaggcattcagcgcccactggaaacagcaaactggtgataacgtggtgattcgtcagtcacacggtggctcaggtaaacaagcgacgtcggtaatcaacggtattgaagctgatgttgtcacgctggctctggcctatgacgtggacgcaattgcggaacgcgggcggattgataaagagtggatcaaacgtctgccggataactccgcaccgtacacttccaccattgttttcctggtacgtaagggaaatccgaagcagatccatgactggaacgatctgattaaaccgggtgtttcggtgatcacgcctaatccgaaaagctctggtggcgcgcgctggaactacctggcagcctggggctacgcgctgcatcacaacaacaacgatcaggcaaaagcacaggattttgttcgggcactgtataaaaacgtcgaagttctggattctggcgcgcgtggctccactaacacttttgtcgagcgcggaatttggcgatgtactgattgcctgggaaaacgaagctctgctgggccgacaattatttttaatggcgtttcaccaatcgcataccagtttttctgtagcaaatgcacctgatgaaccgcatattgaacaattggttggcgagtgccgtgttatgcggcaattaaaacgactcattagccgtattgcacccagcccatccagcgttatggtggttggtgaaagcggcacgggtaaagaagtcgtcgcccgtgcaatccataagttgagcggaagacggaataaaccctttattgctatcaactgtgccgcgattccggagcagcttctggagagcgaactgttcggttatgttaaaggtgcatttactggcgcttctgccaacggtaaaacagggttgattcaggcggcgaatacgggcacgctgtttctcgatgaaataggtgatatgccattaatgttgcaggctaaattactgcgcgctattgaggcacgtgaaattctgccgattggtgccagtagcccaatacaagtcgacattcgcatcatttctgcaactaatcagaatttgccccagttcattgccgaaggtaaattccgcgaagatctcttctaccgacttaatgttatcccgataactctgccaccgctgcgtgaacgtcaggaagatattgaactattggtgcattactttttacatctgcatacccgtcgtctgggatcggtttatcctggcattgctcccgatgtcgtcgaaatattgcgtaagcatcgctggcccggaaacctgcgcgagttaagcaatatgatggaatatctggttaacgtggttccttcaggtgaagttatttatcagcacgcatatttcgcgccacaatgttgtttgatataagtggctaccacggagtcaaatgtgatgtaacagaggtcagtgaggcgcacctgtcactcgatgatgcgggcggcacggcgctggaggagatggaaaagcaaatgatccgcgaggcgctttcacgtcataacagcaagaagcaagttgctgatgaactgggcatcggcattgctacgctctatcgcaagattaagaaatatgagttgttaaacacataa

SEQ ID NO: 8903 - DNA, 1935 bp, Homo sapiens
  SIMILAR (1935)..(916): 951254mologous to Homo sapiens putative p150,accession number U93563,Smith-Waterman Score=1665.
tcatatgaactttaaagtagttttttccaattctgtgaagaaagtcattggtagcttgatgggaatggcattgaatctataaattaccttcggcagtatggtcattttcacaatgttgattcttcctatccatgagcatggaatgttcttccatttgtttgtggcttttatttcattgagcagtggtttatagttctccttgaagaggtccttcacatcccttgtaagttggattcctaggtattttattctctttgaagcaattgtgaatgggagttcactcatgatttggctctctgtttgtctgttattggtgtataagaatgcttgtgatttttgcacattgagtttgtatcctgagactttgctgaagttgcttatcagcttaagtagattttgggctgaggtgatggggttttctaaatatacagtcatgtcatctgcaaacagggacaatttgacttcctcttttcctaattgaataccctttatttctttctccgccctgattgccctggccagaacttccaatactatgttgaatacgagtggtgagagagggcatctctgtcctgtgccagttttcaaagggaatgcttccagtttttgcccattcagtatgatattggtggtgggtttgtcatagatagctcttattattttgagatacgtcccatcaatacctaatttattgagagtttttagcatgaagcgctgttgaattttgtcaaaggccttttctgcatctattgagataatcatgtggtttttgtcgttggttctgtttatatgatggattatgtttattgatttgcgtgtgttgaaccagccttgcatcctagggatgaagccgacttgatcatggtggataagctttctgatgtgctgctggtttcggtttgccagtattttactctggtagaattcggctgtgaatccatctggtcctggactttttttggttggtaaactattgattattgccacaatttcagctcctgttattggtctattcagagattcaacttcttcctggtttagtcttgggagagtgtatgtgtcgaggaatttatccatttcttctagattttctagtttatttgcgtagaggtgtttgtagtattctctgatggtagtttgtatttctgtgggatcagtggtgatatcccctttatcattttttattgtgtctatttgattcttctctctttttttctttattagtcttgctagcggtctatcaattttgttgatcctttcaaaaaaccagctcctggattcattgattttttgaatggttttttgtgtctctatttccttcagttctgctctaattttagttatttcttgccttctgctagcttttgactgtgtttgctcttgcttttctagttcttttaattgtgatgttagggtgtcaattttggatctttcctgctttctcttgtgggcatttagtgctataaatttccctctacacactgctttgaatgcatcccagagattctggtatgtcgtgtctttgttctcattggtttcaaagaacatctttatttctgccttcatttcgttatgtacccagtagtcattcaggagcaggttgttcagtttccatgtagttgagcggctttgagtgagattcttaatcctgagttctagtttgattgcactgtggtctgagagatagtttattataatttctgttctttcacatttgctgaggagagctttacttccaactatgtgatcaattttggaataggtgtgctgtggtgctgaaaacaatgtatattctgttgatttggggtggagagttctgcagatgtctattaggtccacttggtgcagagctgagttcaattcctggatatccttgctaactttctgtctcattgatctgtctaatgttgacagtagggtgttaaagtctcccat

SEQ ID NO: 8904 - DNA, 1611 bp, Homo sapiens
  SIMILAR (1020)..(4): 941254mologous to Homo sapiens putative p150,accession number U93565,Smith-Waterman Score=1649.
tcatccctgtcttgtgtcagttttcaaagggaatgcttccagtttttgcccactcagtatgacattggctgtgggtttgtcatagatagctcttattattttgaaatacatcccatcaatacctaatttattgagagtttttagcatgaagcgttgttgaattttgtcaaaggccttttctgcatctattgagataatcatgtggtttttgtctttggttctgtttatatgctggattacatttattgatttgggtatattgaaccagccttgcatcccagggatgaagcccacttgatcatggtggataagctttttgatgtgctgctggattcggtttgtcagtattttattgaggatttttgcatcaatgttcatcaaggatattggtctaaaattctcttttttgattgtgtctctgcctggctttggtatcaggatgatgctggcctcataaaatgagttagggaggattccttctttttctattgattggaatagtttcagaaggaatggtaccagttcctccttgtagctctggtagaattcggctgtgaatccatctggtcctggactctttttggttggtaagctattgattattgccacaatttcagatcctgttattggtctattcagagattcaacttcttcctggtttagtcttgggagagtgtatgtgtcgaggaatttatccatttcttctacattttctagtttatttgtgtagaggtgtttgtagtattctctgatggtagtttgtatttctgtgggatcggtggtgatatcccctttatcattttttattgcatctatttgattcttctctcttttcttctttattagtcttgctagtggtctatcaattttgttgatcctttcaaaaaaccagctcctggattcattaattttttgaagggttttttgtgtctctatttccttcagttctgctctgattttagttatttcttgccttctgctagcttttgaatgtgttggctcttgcttttctttctctctggctgcccttaacattttttccttcatttcaactttggtgaatctgacaattatgtgtcttggagttgctcttctcgaggagtatctttttggcgttctctgtatttcctgaatctgaatgttggcctgccttgctagattggggaagttctcctggataatatcctgcagagtgttttccaacttggtttcattctccccgtcattcatttcattcatttcatcttccatcgctgataccctttcttccagttgattgcattggctcctgaggcttctgcattcttcacatagttctcgagccttggttttcagctccatcagctcctttaagcactcctctgtattggttattctagttatatattcttctaaaattttttcaaagttttcaacttctttgcctttggtttgaatgtcctcccatagctcggagtaatttgatggtctgaagccttcttctctcagctcatcaaagtcattctccgtccagctttgttccgttgctggtgaggaactgcattcctttggaggaggagaggcactctgctttttagagtttccagtttttctgctctgttttttccccat

SEQ ID NO: 8905 - DNA, 1719 bp, Homo sapiens
  SIMILAR (197)..(3): 961254mologous to Homo sapiens putative p150,accession number U93569,Smith-Waterman Score=317.
  misc_feature (1)...(1719): n = a,t,c or g
tcaggtagtgtgatgcctccagctttgttcttttggcttaggattgacttggcgatgcaggctcttttttggttccatatgaactttaaagtagttttttccaattctgtgaagaaagtcattggtagcttgatggggacggcattgaatctgtaaattaccttgggcagtatggccattttcacgatattgattcttcnctacccatgagcatggaatgttcttccatttgtttgtgtcctcttttatttccttgagcagtggtttgtagttctccttgaagaggtgcttcacatcccttgtaagttggattcctaggtattttattctctttgaagcaattgtgaatgggagttcactcatgatttggctctctgtttgtctgttgttggtgtataagaatgcttgtgatttttgtacattgattttgtatcctgagactttgctgaagttgcttaacagcttaaggagattttgggctgagacgatggggttttctagataaacgatcatgtcgtctgcaaacagggacaatttgacttcctcttttcctaattgaataccctttatttccttctcctgcctgattgccctggccagaacttccaacactaatttattgagagtttttagcatgaagggttgttgaattttgtcaaaggctttttctgcatctattgagataatcatgtggtttttgtctttggctctgtttatatgcagttcctccttgtacctctggtagaattcggctgtgaatccatctggtcctggactctttttggttggtaaactattgattattgccacaatttcagagcctgttattggtctattcagagattcaacttcttcctggtttagtcttgggagagtgtatgtgtcgaggaatgtatccatttcttctagattttctagtttatttgcgtagaggtgtttgtagtattctctgatggtagtttgtatttctgtgggatcggtggtgatatcccctttatcattttttattgtgtctatttgattcttctctctttttttctttattagtcttgctagcggtctatcaattttgttgatcctttcaaaaaaccagctcctggattcattgattttttgaagggttttttgtgtctctatttccttcagttctgctctgattttagttatttcttgccttctgccagcttttgaatgtgtttgctcttgcttttctagttcttttaattgtgatgttagggtgtcaattttggatctttcctgctttctcctttcttccagttgatcgcatcggctcctgaggcttctgcattcttcacgtagttctcgagccttggttttcagctccatcagctcctttaagcacttctctgtattggttattctagttatacattcttctaaatttttttcaaagttttcaacttctttgcctttggtttgaatgtcctcccgtagctcagagtaatttgatcgtctgaagccttcttctctcagctcgtcaaaatcattctccatccagctttgttccattgctggtgaggaactgcgttccttctttccatgctccctattcctcttggcaactactgtctttgattgtgtccccaagggctttgttttagagctggggtgcaaagaagcacttgctggcttggagatggagagagcttgacggtagccccagtggctcagaaatctgtttccatctgtattgtgcat

SEQ ID NO: 8906 - DNA, 1221 bp, Homo sapiens
  SIMILAR (101)..(3): 871254mologous to Homo sapiens putative p150,accession number U93569,Smith-Waterman Score=166.
tcaaagatcagatatttgtagatgtgtggcattatttctgagggctctgttctgttccattggtctatatctctgttttggtagcagtaccaaaactgttttggtgactgtagccttgtagtatagtttgaagtcaggtagcgtgattcctccagctttgttcttttggcttaggattgacttggcaatgtgggctcttttttggttccatgcgaactttaaagaagttttttccaattctgtggagaaagtcattggtagcttgatggggatggcattgaatctataaatgaccttgggcaatatggccgttttcacgatattgattcttcctacccatgagcatggaatgttcttccatttgtttgtatcctcttttatttccttgagcagtggtttgtagttctcattgacgaggtccttcacatcccttggaagttggattcctaggtattttactctctttgaagcaattgtgaatgggagttcactcatgatttggctgtttgtcagctcttctttgtacctctggtagaattcggctgtgaatccatctggtcctggactttttttggttggtaagctattaattatagcctcaatttcagagcctgttattggtctattcagagactcaacttcttcctggtttagtcttgggagggtatatgtgtccaggaatttatccatttcttctagattttctagtttatttgcatagaggtgtttatagtattctctgatagtactttgtatttctgtgggatcggtggtgttatcccctttatcattttttattgcgtctatttgattcttctctcttttcttctttattagtcttgctagcggtctatcaattttgttgatcttttcaaaaaaccagctcctggattcattgattttttgaagagttctttgtgtctctacatccttcagttctgctctgaacttagttatttcttgccttctgctagcttttgaatgtgttttttcttgcttctctggttcttttaattgtgatgctagggtgtcaattttagatctttcctgctttctcttgtgggcatttagtgctataaatttccctctacacacttctttgaatgtgtcccagagattctggtatgttgtgtctttgttctcattgctttcaaagaacatctttatttctgccttcatttcattatgtacccagtagtcattcaggagcaggttgttcat

SEQ ID NO: 8907 - DNA, 1225 bp, Homo sapiens
  SIMILAR (206)..(1222): 941254mologous to Homo sapiens putative p150,accession number U93565,Smith-Waterman Score=1649.
tgacggggagaatgaaaccaagttggaaaacactctgcaggatattatccaggagaacttccccaatctagcaaggcaggccaacattcagattcaggaaatacagagaacgccaaaaagatactcctcgagaagagcaactccaagacacataattgtcagattcaccaaagttgaaatgaaggaaaaaatgttaagggcagccagagagaaagaaaagcaagagccaacacattcaaaagctagcagaaggcaagaaataactaaaatcagagcagaactgaaggaaatagagacacaaaaaacccttcaaaaaattaatgaatccaggagctggttttttgaaaggatcaacaaaattgatagaccactagcaagactaataaagaagaaaagagagaagaatcaaatagatgcaataaaaaatgataaaggggatatcaccaccgatcccacagaaatacaaactaccatcagagaatactacaaacacctctacacaaataaactagaaaatgtagaagaaatggataaattcctcgacacatacactctcccaagactaaaccaggaagaagttgaatctctgaatagaccaataacaggatctgaaattgtggcaataatcaatagcttaccaaccaaaaagagtccaggaccagatggattcacagccgaattctaccagagctacaaggaggaactggtaccattccttctgaaactattccaatcaatagaaaaagaaggaatcctccctaactcattttatgaggccagcatcatcctgataccaaagccaggcagagacacaatcaaaaaagagaattttagaccaatatccttgatgaacattgatgcaaaaatcctcaataaaatactgacaaaccgaatccagcagcacatcaaaaagcttatccaccatgatcaagtgggcttcatccctgggatgcaaggctggttcaatatacccaaatcaataaatgtaatccagcatataaacagaaccaaagacaaaaaccacatgattatctcaatagatgcagaaaaggcctttgacaaaattcaacaacgcttcatgctaaaaactctcaataaattaggtattgatgggatgtatttcaaaataataagagctatctatgacaaacccacagccaatgtcatactgagtgggcaaaaactggaagcattccctttgaaaactgacacaagacagggatga

SEQ ID NO: 8908 - DNA, 407 bp, Homo sapiens
  SIMILAR (44)..(3): 641254mologous to Escherichia coli ATP synthase beta subunit (atp-8),accession number J01594,Smith-Waterman Score=41.
ttacgagctcgcgctaccatcaggttgccttctttagacagcttagtccatacccaggatggcgatgatgtctttcagttcctgataacgttgcaggatggactgaacgccacgcgcggtgtcgtagtgttcctgaccaaccaccagcgggtccagctgacggctggtggagtccagcgggtcaacggccgggtagatacccagagacgcgatctgacggctcagtaccacggttgcgtcaaggtgcgcaaaggtggttgccggagacgggtcagtcaagtcattcgcaggtacgtatactgcctgtacggaggtgatagaaccagttttggtggaggtgatacgttcctgcagaacgcccatcttttccgccagggtcggctgaatacctaccgctgaaagcatac

SEQ ID NO: 8909 - DNA, 3529 bp, Homo sapiens; identical to SEQ ID NO: 6262
  SIMILAR (305)..(1849): 891254mologous to Homo sapiens putative p150,accession number U93572,Smith-Waterman Score=2317.

SEQ ID NO: 8910 - DNA, 2457 bp, Homo sapiens
  SIMILAR (1688)..(1623): 951254mologous to Homo sapiens putative p150,accession number U93563,Smith-Waterman Score=116.
ttactgagaatgatgattttcaatttcatccatgtctctgttgtttcctgactttttaatgattaccattctaactggtgtgagatgatatctcattctggttttgagttgcatttctctgatggccagtgacgatgagcattttttcatgtgtcttttggctgcataaatgtcttcttttgagaagtgtctattcatatcctttgcccactttttgatggggttgtttgttttcttcttgtaaatttgtttgacttcattgtagattctggatattaaccctttgtcagatgagtagattgcaaaaattttctcccattctgtaggctgcctgttcactccgatggtagtttcttttgctgtgcagaagctctttagtttaattagatcccatttgtcaattttggcttttgttgccattgcttttggtgatttagacatgaagtccttgcccatgcctatgtcctgaatggtattgcctaggttttcttctagggtttttatggttttaggtctaacgtttaagtctttaatccatcttgaattgatttttgtataaggtgtaaggaagggatccagtttcagctttctacatatggttagccagttttcccagcaccgtttattaaatagggaatcctttcccccttgcttgtttttgtcaggttggtcaaagatcagatagttgtagatgtgtggcattatttctgagggctccattctattccattgttctataactctgttttggtaccagtcccatgctgttttggttactgtagccttgtagtattttttgaagtcaggtggcttgatgcctccagctttgttcttttggcttaggattgacttgggaatgctggctcttttgtggttccatatgaacttgaaagtagttttttcaaattctttgaataaagtcattggtagcttgatggtgatggcattgaatctataaattaccttgggcagtatggccattttcacgatattgattcttcctatccatgagcatggaatgttcttccattcatttgtatcctcttttatttcattgagcagtggtttgtagttctccttgaagaggaccttcacatcccttgtaagttggattcctgggtattttattttctttgtagcaattgtgaatgggagttcactcatgatttggctctctgtttgtctgttattggtgtataagaatgcttgtgatttttgtacattgattttgtatcctgagactttgctgaagttgcttatctgcataaggagattttgggctgagacgatggggttttctagagatacaatcatgtcatctgcaaacagggacaatttgacttcctcttttcctaattgaatacccttcatttctttctcttccctgatttccctggtgagaacttccaacactatgttgaataggagtggtgagagagggcatccctgtcttatgccagttttcaaagggaatgctttcagtttttgcccgttgagtatgatgttagctgtgggtttgtcataaatagctcttattattttgagatacttcccttcaatacctaatttattgagagtttttagcatgaagggctgttgaattttgtcaaaggccttttctgcatcagctcctccttgtacctctggtagaattcggctgtgaatccatctggtcctggacttttttttggttggtaaactattgattattgccacaatttcagagcctgttattggtctattcagagattcaacttcttcctggtttagtcttgggagagtgtatgtgtcgaggaatgtatccatttcttctagattttctagtttatttgcgtagaggtgtttgtagtattctctgatggtagtttgtatttctgtgggatcggtggtgatatcccctttatcattttttattgtgtctatttgattcttctctctttttttctttattagtcttgctagcggtctatcaattttgttgatcctttcaaaaaaccagctcctggattcattgattttttgaagggttttttgtgtctctatttccttcagttctgctctgattttagttatttcttgccttctgccagcttttgaatgtgtttgctcttgcttttctagttcttttaattgtgatgttagggtgtcaattttggatctttcctgctttctcctttcttccagttgatcgcatcggctcctgaggcttctgcattcttcacgtagttctcgagccttggttttcagctccatcagctcctttaagcacttctctgtattggttattctagttatacattcttctaaatttttttcaaagttttcaacttctttgcctttggtttgaatgtcctcccgtagctcagagtaatttgatcgtctgaagccttcttctctcagctcgtcaaaatcattctccatccagctttgttccattgctggtgaggaactgcgttc

SEQ ID NO: 8911 - DNA, 2490 bp, Homo sapiens
  SIMILAR (2488)..(2219): 931254mologous to Homo sapiens putative p150,accession number U93563,Smith-Waterman Score=429.
ctgttgtttcctgactttttaatgatcgccattctaactggtgtgagatggtatctcattgtggttttgatttgcatttctctgatggccagtaatgatgagtattttttcatgtgttttttggctgcataaatgtcttcttttgagaagtgtctgttcatgtcctttgcccactttttgatggggttgtttgtttttttcttgtaaatttgtttgagttcattgtagattctggatattagccctttgtcagatgagtaggttgcaaaaattttctcccattttgtaggttgcctgttcactctgatggtagtttcttttgctgtgcagaagctctttagtttaattagatcccatttgtcaattttgtcttttgttgccattgcttttggtgttttagacatgaagtccttgcccatgcctatgtcctgaatggtaatgcctaggttttcttctagggtttttatggttttaggtctaacgtttaagtttttaatccatcttgaattgatttttgtataaggtgtaaggaagagatccagtttcagctttctacatatggctagccagttttcccagcaccatttattaaatagggaatcctttccccattgcttgtttttctcaggtttgtcaaagatcagataggtgcacatatgcggcattatttctgagggctctgttctgttccattgatctatatctctgttttggtaccagtaccatgctgttttggttactgtagccttgtagtatagtttgaagtcaggtagtgtgatgcctccagctttgttctttttgcttaggattgacttggcaatgcgggctcttttttggttccatatgaactttaaagtagttttttccaattctgtgaagaaaggcattggtagcttgatggggctggcattgaatctgtaaattaccttgggcagtatggccattttcacgatattgattcttcctacccatgagcatggaatgttcttccatttgtttatatcctcttttatttccttgagcagcggtttgtagttctccttgaagagttccttcacatcccttgtaagttgaattcctaggtattttattctctttgaagcaattgtgaatgggagttcagtcataatttggctctctgtttgtctgttgttggtgtataggaatgcttgtgatttttgcacattgattttgtatctcgagactttgctgaagttgcttatcagcttaaggagattttgggctgagacaatggggttttctagatatacaatcatgtcatctgcaaacagggacaatttgacttcctcttttcctaattgaataccctttatttctttctcctgcctaattgccctggccagaacttccaacactatgttgaataggagtagtgagagagggcatccctgtcttgtgccagttttcaaagggaatgcttccagtttttgcccattcagtatgatattggctgtgggtttgtcatagatagctcttattattttgaaatacgtcccatcaatacctaatttattgagagtttttagcatgaagggttgttgaattgtgtcaaaggccttttctgcatctattgagataatcatgtggtttttgtctttggctctgtttatatgctggattacatttattgatttgcgtatattgaaccagccttgcatcccagggatgaagcccacttgatcatggtggataagctttttgatgtgctgctggattcggtttgccagtattttattgaggatttttgcatcaatgttcatcaaggatattggtctaaaattctctttttttgttgtgtctctgccaggcctctggtagaattcggctgtgaatccatctgatcctggactttttttggttggtaagctattaattattgtctcaatttcagagcctgttattggtctattcagagattcaagttcttcctggtttagtcttgggagggtgtatgtgttgaggaatttatccatttcttctagattttctagtttatttgcatagatgtgtttatagtatcctgtgatggtagtttgtatttctgtgggatcagtggtgatatcccctttatcattttttattgcatctatttgattcttctctcttttcttctttattagtcttgctagtggtctatcaattttgttgatcttttcaaaaataaaaaataaaaaaccagctcctggattcattgatttttttgaagggttttttgtctctctatctccttcagttctgctttgatcttagttatttcttgccttctgctagcttttgaatgtgtttgctcttgcttctctagttcttttaattgtgatgttagggtgtcaattttagatctttcctgctttctcttgtgggcatttagtgctataaatttccctctacacactgctttgaatgtgtcccagacattctggtatgttgtgtttttgttctcattggtttcaaagaacatctttatttctg

SEQ ID NO: 8912 - DNA, 1986 bp, Homo sapiens
  SIMILAR (22)..(558): 981254mologous to Escherichia coli peripheral membrane protein C,accession number K01992,Smith-Waterman Score=870.
ttatacaaaaatagtgtaaaatactttcacaactagccggtcggcaatatcatgtcgaatatcccgattgttggcgcgctgttctctggccccgcatttggtatcggtatcctcgcggcaggcgtgatcctcgccatcatgattattccgtacattgcggcggtaatgcgtgatgtgttcgaacaaaccccggtgatgatgaaagagtcggcctacggtattggctgcaccacctgggaagttatctggcgtatcgttcttccgttcaccaaaaatggtgttatcggcggcatcatgctggggctgggccgcgcgctcggtgaaaccatggcggtgacctttatcatcggtaacacctaccagctcgacagcgcctcgctgtatatgccgggcaacagtatcacctctgcgctggcgaacgaatttgcggaagcggaatccggtctgcacgttgccgcactgatggaactgggcctgatcctgtttgtgattaccttcatcgtcctcgccgcatcgaagtttatgattatgcgcctggctaagaatgagggggcacgctaatggcactgcggcgctggctgaatctcgccgcaaaatgcaggcgcgtcgccgcctcaaaaaccgtattgcgctgacgctctcgatggcgacgatggccttcggcctgttctggctgatctggattttaatgtccaccatcactcgcggtatcgacggtatgtcgctggcgccgttcactgaaatgacgccgccgccccataccgaacgtggtggtctggcgaacgcgttaagttggaaaagacggaacgtggatatatcaaacaacatagaaacctggatcttacgagcacgcgctaccaccagtttgtcttcttcagacagttcatccatacccaggatggcgatgatgtctttcagttcctgataacgttgcaggatggactgaacgccacgcgcggtgtcgtagtgttcctgaccaaccacttgcccgtctccacgtctaggtagcatagatttgaagcttacgtcatgtaattttatagggggtttcctctggtagaattcagctgtgaatccgtctggtcctggactttttttggttggtagactattaattactgcctcaatttcagaacttgttattggtctattcagggatttgacttcttcctgggttagacttgggagagtgtacgtatccaggaatttatccatttcttctagattttctagtttctttgcatagaggtatttagagtattctctgatggtagtttgtatttctgtgggatcagtggtgatatcccctttatcattttttattgcatctatttgattcttctctcttttcttctttattagtctggctagcggtccatcaattttgttgatcttttcaaaaaaccagctcctggattcattgattttttgaagggttttttgtgtctctatctccttcagttctgctagttctctccattgtgatgttaaggtgtcaattttagatctttcctcctttctcttgcgggcatttagtgctataatttcccttacgacctgctccttttggtccgttggtcctgcctgactgcatgcatggactattgttgcttgcttgtgcaacttgtatgccctgccggcagctgttccactgacccttgaatgcctggtcaactgtgcactaggtgctcgttgcattgccaaatgcatgggcacgccgcgcgctcccccgtttaaatgcaactctggcttcccccgattgacagatacaactcgagctcggtacctctggttcaatatgagccttctgagcaaagcagcaaagagtgttctttttccataagttgttgactttctgtcttgtgaccctggtaagtaaccatgatcgaactgatcaagaatctgtaacttggccaaaggtaaccacaaaattgtgcaaaactgggactctgctggtggctgccattggctgaagggcttccccat

SEQ ID NO: 8913 - DNA, 3738 bp, Homo sapiens
  SIMILAR (1474)..(3363): 831254mologous to Homo sapiens putative p150,accession number U93572,Smith-Waterman Score=2653.
atggcacgagaactacgtgatgactgcacaagcttcagtagccgattcgatcaactggaagaaagggtatcagtgactggagatcaaatgaatgaaatgaagccagaagagaagtttagagaaaaaagagtaaaaagaaacgaacaaagcctccaagaaatatgggactatgtgaaaagaccaaatctacgtctgattggtgtacctgaaagtgactgggagaatggaaccaagttggaaaacactctgcagggtattatccaggagagcttccccaatctagcaaggcaggccaacattcacattcaggaaatacagagaatgccacaaagatacacctcgagaagagccactccaagacacataattgtcagattcaccaaagttgaaatgaaggaaaaaatattaagggtagccagagagaaagacagatcaacgagacagaaagttaacaaggatatccaggaattgaactcagctctgcaccaagcggacctaatagacatctacagaagtctccaccccaaatcaacagaatatacatttttttcagcaccacaccacacctattccaaaattgaccacatacttggaagtaaagctctcctcagcaaatgtaaaagaacagaaattataacaaactgtctctcagaccacagtgcaatcaaactagaactcaggattaagaatttcactcaaaaccgctcaactacatggaaactgaacaacctgctcctgaatgactgttgggtacataacgaaatgaaggcagaaataaagatgttctttgaaaccaacgagaacaaagacacaacataccagaatctctgggatgcattcaaagcagtgtgtagagggaaatttatagcactaaatacccacaagagaaagcaggaaagatccaaaactgacaccctaacatcacaattaaaagaactagaaaagcaagagcaaacacattccaaagctagcagaaggcaagaaataactaaaatcagagcagaactgaaggaaatagagacacaaaaaacccttcaaaaaattaatgaatcccaggagctggtttttttttaaagatcaacaaaattgatagatcactagcaagactaataaagaagaaaagagagaataatcaaatagatgcaataaaaagtgataaaggggatatcaccactgatcccacagaaatacaaactaccgtcagagaatactataaacacctctatgcaaataaactagaaaatctagaagaaatggataaatttcctggatacatacaccctcccaagactaaaccaggaagaagtcgaatcccttcagtagactaataacaggctctgaaattgaggcaataattaatagcctatcaaccaaaaaaaagtccaggaccagacggattcacagctgaattctaccagaggtacaaagaggcgttgataccattctttctgaaactattgcaaacaatagaaaaagagggaatcctccctaactcattttaatgaggccagcatcatcctgataccaaaacctggcagagacacaaccaaaaaagagaattttagaccaatatccttgatgaacattgatgcaaaaatcctcaataaaatactggcaaaccgaatccagcagcacatcaaaaagcttatccaccatgatcaagtgggcttcatccctgggatgcaagggctggttcaatatacgcaaatcaataaatgtaatccagcatataaacagagccaaagacaaaaaccacatgattatctccatagatgcagaaaaagcctttgacaaaattcaacaacccttcatgctaaaaactctcaataaattaggtattgatgggacgtatttcaaaataataagagctatctatgacaaacccacagccaatatcatactgaatgggcaaaaactggaagcattccctttgaaaactggcacaagacagggatgccctctctcacctcaccactcctattcaacatagtgttggaagttctggccagggcaattaggcaggagaaggaaataaagggtattcaattaggaaaagaggaagtcaaattgtccctgtttgcagacgacatgattgtatatctagaaaaccccattgtctcagcccaaaatctccttaagctgataagcaacttcagcaaagtctcaggatacaaaatcagtgtacaaaaatcacaagcattcttatacaccaacaacagacaaacagagagccaaatcatgagtgaactcccattcacaattgcttcaaagagaataaaatacctgggaatccaacttacaagggatgtgaaggacctcttcaaggagaactacaaatcactgctcaaggaaataaaagaggatacaaacaaatggaagaacattccatgctcatgggtaggaagaatcaatatcgtgaaaatagccatactgcccaaggtaatttgcagattcagtgccatccccatcaagctaccaatgcctttcttcacagaattggaaaaagctactttaaagttcatatggaaccaaaaaagagcccgcattgccaagtcaatcctaagccaaaagaacaaagctggagacatcacactacctgacttcaaactatactacaaggctacagtaaccaaaacagcatggtactggtaccaaaacagagatatagatcaatggaacagaacagagccctcagaaataatgccacatatctacaactatctgatctttgacaaacctgagaaaaacaagcaatggggaaaggattccctatttaataaatggtgctgggaaaactggctagccatatgtagaaagctgaaactggatcccttccttacaccttatacaaaaatcaattcaagatggattaaagatttaaacgttagacctaaaaccataaaaaccctagaagaaaacctaggcattaccattcaggacataggcgtgggcaaggacttcatgtccgaaacaccaaaagcaatggcaacaaaagccaaaattgacaaatgggatctaattaaactaaagagtttctgcacagcaaaagaaactaccatcagagtgaacaggcaacctacaacatgggagaaaattttcgcaacctactcatctgacaaagggctaatatccagaatctacaatgaactcaaacaaatttacaagaaaaaaacaaacaaccccatcaaaaagtgggcgaaggacatgaacagacacttctcaaaagaagacatttatgcagccaaaaaacacatgaaaaaatgctcatcatcactggccatcagagaaatgcaaatcaaaaccacaatgggatatcatctcacaccagttagaatggcaatcattaaaaagtcaggaaacaacagccacttagagagtgctcttataaacagctctgtgcatcaccagaaatgcattgcacctctagaaggaaatcagaaatttaagagcagcaggtacaacgtgaactggttgctgagtcaccatatgaggaaggcgccattctttgtgcccattttagagataaggagattaaagtacaaggacatgaagttacttgcccaaagttgtccagataagcagcagagttggggtttgagccagctggaatctggtgcctgcaccaagaaccacgaacactatgccgccttcgtggaatgtgtaggagtgattaagcttaagtatttccacatggggctatgcaaacactatcaaggtggtgaaaactgcagcagctga

SEQ ID NO: 8914 - DNA, 452 bp, Homo sapiens
  SIMILAR (214)..(450): 411254mologous to Chlamydomonas reinhardtii vegetative cell wall protein gp1,accession number AF309494,Smith-Waterman Score= 109.
aggtggagaccctaagtaggacagttattttggaagggctaccctctggctggctttcctgatccgtgcgctcagagctggaaggtggcccacgtcctacttttgcggttgggtcatatcaaatctgtatcggctaacgggaaggaagttacgagcaagttccaccggaaagaaaatctagcgcggggactgcactcgaggccgaggagagggcagcgcgtccgtggtggggtcgcccagcactgcgagccgcgctgaaccccacccccggcctgcagggtgcggctccctggctgccccgtggacccggccagcccgggacgaggacgcaggacctcggcagggacgccggagccagcccttcgccatccccacacgccccgcggcccagtggccgcgcgcacgttacctgcggagcccggccctgcccgcccgtctgggctgccgccctc

SEQ ID NO: 8915 - DNA, 545 bp, Homo sapiens
  SIMILAR (54)..(545): 981254mologous to Homo sapiens ASB-1 protein,accession number AF156777,Smith-Waterman Score=859.
  misc_feature (1)...(545): n = a,t,c or g
gcggccgcggaggcggatgcagccatggcggagggcggcagcccagacgggcgggcagggccgggctccgcagtgcaggtcgtaatctgaaggagtggctgagggagcaattttgtgatcatccgctggagcactgtgaggacacgaggctccatgatgcagcttacgtcggggacctccagaccctcaggagcctattgcaagaggagagctaccggagccgcatcaacgagaagtctgtctggtgctgtggctggctcccctgcacaccgttgcgaatcgcggccactgcaggccatgggagctgtgtggacttcctcatccggaagggggccgaggtggatctggtggacgtaaaaggacagacggccctgtatgtggctgtggtgaacgggcacctagagagtacccagatccttctcgaagctggcgcggaccccaacggaagccggcaccatcgcagcacccctgtctaccacgcctctcgcgtgggccgggcagacatcctgaaggccctcatcaggtacggngctgatgttgacgtc

SEQ ID NO: 8916 - DNA, 1412 bp, Homo sapiens
  SIMILAR (152)..(871): 311254mologous to Streptomyces coelicolor A3(2) putative translation initiation factor IF-2(fragment),accession number AL355913,Smith-Waterman Score=130.
ttcacgaatgcattcatttattcaatgaacttcgcgtcagccactggctgtcatcagttaccgacctgattgagggcttcatggaagggatttggaggagcattcatctaaaaccacagcacgctgcgacgctcagccctgcagtgggccctcaccagtccccgcgcctccgaatccaccctcccggggctgctcgtggctagcggggggcacctgcggggaccaagccagcccggccgaggcccgggtcccgcccgccacggccctcggggccccgcccgcatctggcagaagccacgccccgtccgtgtgggtggggacggcccgccggaccgaaattcccagactgctgcctcaggcacccggctttccgactccttggcttcttatgtgaggaaaccacagcgcggccggcatccagagagtcggttagccgcgaagttcccgccggacgaagggaccagccagcgccctgctagacagcgaggccggaagcggaggcgtggcccctgcgcggccccggaaaccagtgaggccggcgcgcgcccgccggaagccgcgaccccgacgcgccccccattgccctcggcgccggaagtggtcgcgggtcgttctgcttcctgcccgaggggcgtgcgcgggtcaggggcggccgcggaggcggaagcatccatggcggagggcggcagcccagacgggcgggcagggccgggctccgcaggtaacgtgcgcgcggccactgggccgcggggcgtgtggggatggcgaagggctggctccggcgtccctgccgaggtcctgcgtcctcgtcccgggctggccgggtccacggggcagccagggagccgcaccctgcaggccgggggtggggttcagcgcggctcgcagtgctgggcgaccccaccacggacgcgctgccctctcctcggcctcgagtgcagtccccgcgctagattttctttccggtggaacttgctcgtaacttccttcccgttagccgatacaaatttgatatgacccaaccgcaaaagtaggacgtgggccaccttccagctctgagcgcacggatcaggaaagccagccagagggtagccctagggagggcaggcactttttcaccattctgccgcccacggcgtgtccggtggtacagcggggggcagccttcccaccccacccaagcccagaccagggacaacggggaccccgtcctcagcgagcttcgtagtgacacaacatgtccaggggccctttggcccaccagcaagggaggcagatagaaaggctcacacccaccttccaaaataactgtcctacttagggtctccaccttgcagtgtccctaccatgcagatgtgaaggaagcggtcaggacaggttcccgtttcccggtggtgtggtgggagttcctt

SEQ ID NO: 8917 - DNA, 404 bp, Homo sapiens
  SIMILAR (36)..(233): 741254mologous to Homo sapiens unnamed protein product,accession number AK000642,Smith-Waterman Score=244.
gatctgtttctttttcttggcttgatgtttggtaggtccttgaatgggcaagagggcacatgaagtacggcgtcctccacattcacggcctctacacggacccctgcggggtggtgctggacccatcggggtataaagacgtcactcaagacgcagaagtcatggtacggcccgtcctaattagcatcggtgcgtcctctcagggattactggtggccactggccattggctgcagttgagtggcttcccaggctccaggcgtccgtgcccttcaggtcggccctgcacacagttgctgagggaggggccacgtctcttggcctccgccgtggccctggggacccccatgttgccctctatgtttactaaatggcttgcccaacatttgatggaaagaaacaat

SEQ ID NO: 8918 - DNA, 2817 bp, Homo sapiens
  SIMILAR (338)..(769): 661254mologous to Homo sapiens unnamed protein product,accession number AK000642,Smith-Waterman Score=440.
  misc_feature (1)...(2817): n = a,t,c or g
ataaagcgtacgattgttaggatactctacaccggccgccgagagaccccggaggcgtagccggctgcggaggttattaggtggcagcgcgagctgggaccagcgggtgggaggcgccgcacaattcacagatggattcagtggaaaagacaacaaatagaagtgaacaaaaatccagaaagtttttaaaaagcctcatccggaaacagccccaggaactgctcctggttatcgggactgggcgtcagcgcagcagttgggcccccggaatccctgccctttgctcgtgggagaagctgcatcgaggccgtcatcgaggctgcagagcagctggagggtgctgcaccccggagacgttcgccgagttccggaggaaagttgacaaaggaccgggacctgtttgttgttcgcccttgatttgatcccgaagatgtcacctcgcacagggnattgccaagcccagcttcttccaggactgcctgatggaggtgtttgacgacctggagcagcacatccggaactcctgtggttctgcagtccgatcctcagcctgatggacagaggcgccatggtcctgaccaccaactatgacaacctgctggaggcctttggccggcggcagaacaagcccatggagtccctggacttgaaggacaagaccaaggtccttgaatgggcatgagggcacatgaagtacggcgtcctccacattcacggcctctacacggacccctgcggggtggtgctggacccatcggggtataaagacggtcactcaagacgcagaagtcatggaagtcctccagaacttataccgcaccaagtcctttctgtttgtgggctgtggggagacccttcgtgatcagatattccaggccctctttctttactccgtgccgaataaggtggatttggagcactacatgcttgtgctgaaggagaatgaagaccatttctttaagcatcaggcagatatgcttctgcacggaatcaaagttgtatcctacggggactgttttgaccactttccaggatatgtgccaagaactttgccactcagatctgcaaacagcaaagcccagatgctgatcgcgtggacagcaccacattattgggtaatgcatgccaggactgtgcaaagaggaagttagaagagaatggaattgaagtttcaaaaaaacgcacacaatcagatactgatgatgctggagggtcttgaaatgtgttacaggaaaacctgcaacttgaaaactagccttctgtaaccacagtgcccaaacgaagaggaatgtatggagaactccacgtggatctctgattgcgaaaccgtcacatacaccaagagagccacatgggcatgtggccctcaaggctgggtgagagggctcccctgtgtgttgaactatgcaggagggtgatgcggacacatttcaggtggactttgcaaggactgatggatagctacctcagggaccagaatccgtgggaagggatggacctggtgttcccgttcccatctgacaggctctcttttgtcaaggtggtatttttcgtaataaaaggggaagagtaaagactgtccaagcaacagtagctgccaaagagaaaatacgaaatagacactttttttttttgagtcagagtctcactctgtcacccaggacagagtgcagtggtacgatctcaagctcactgcagccgccaccgcctgggctcaagtgattctcctgcctcagcctcccgagtagctgggattacaggcgtccaccaccatgcccagctaatttttttatttttagtagagttggagtttcaccatgttggccaggatggtctcgaactcttgacctcaggtgatccacccgccttggcctcccaaagtgctaggattacaggcatgagccactgcgcccagcaaaataaacacattttataatttgtatgtggaaacatgttactattaggaaaggctttttaaaggtacgttttaaaggtccactgtttaaatagttaaaggaatgaattccgctagcgaaaatgtttttaggggagaacagctggatcaaaagggcttctttggaattaggttgttttagtaacttctgttccaaaggaaacacaggtctggatattgctaaggaactggaaatcggggggagccagaggcccttttcagtccaggccaacattgtgcacggccactgtgggactgacaacctggtaagcttcaggttcgagagaccaggtttcaaaccattataagttccaggctttgcaagtctttattctctggggtaatatccagtctttatgttattgtctcttaaaattctcttccatgggcccacataaggggagtttgcagagagtgagggaggcaaaacttgaaaagggccctgccaaaactttaaaaaccctcctcaggtttcaccccacatgaaaaacagctgtgcctgagtgtgcctgccggtgcccggggagcttcttctgacttgtgacccggcagaggctttctgtggcggtgcatggagcggcccttacagtggagggttctctttggaaacaaacagccctgcttggtttcagtttggaggccacttatcttcaatgtgcacatttcttgccaagccctgtgacactccccattgatgactcccataggtacagataaagttaagaacaggaaacagaagggtaggatgcatagggaggggagagaagccctgaaaacttttttttttctttttgaagcatggaaaacaaatcttttatgccactccagccataaataacattttaacttcaaaaaaaaaaaaa

SEQ ID NO: 8919 - DNA, 583 bp, Homo sapiens
  SIMILAR (6)..(95): 761254mologous to Felis silvestris polyprotein,accession number X51929,Smith-Waterman Score=109.
acactgttgttgaagccagatcgttgccccagggcacttcagctcagaaagctgaactcattgctttaattcgggccttagaactcagtgaaggtgactcttaaatttgagaaacattggaatagtggattaattcggagtagcggtttttgtgatccacagatgaagcacagagaaaaggatagagatggagacacaaaaacattgatctcccaagctgtagagactgggtctcctttgggaatatctacaactaccaactgcacaacaaagtagtaagtgcagcttcgaatttgtcttgtggtaggccacgatcctgtgcccacaaggacagtgcacaggtcatccgagcacacggctgagcccggtaggcaaaggaaggaaggtccaggtcacagggcagcgaggcccagcacaatgaaggagaatggaaacacaccacacctcaattagaatgggatccaattcttttacaaaaatttttttctgattacaaaatttaagggaaaaagggaaagttcttccttcctacagactgacatgtaataaatggagatggaacacacaaaaaaaaaaaaaaaaa

SEQ ID NO: 8920 - DNA, 1821 bp, Homo sapiens; identical to SEQ ID NO: 3567
  SIMILAR (1608)..(1670): 471254mologous to Baboon endogenous virus strain M7 gag-pol precursor polyprotein,accession number D10032,Smith-Waterman Score= 43.

SEQ ID NO: 8921 - DNA, 2365 bp, Homo sapiens
  SIMILAR (74)..(2362): 431254mologous to Feline leukemia virus gag-pol precursor polyprotein gPr80,accession number M18247,Smith-Waterman Score= 1551.
cgttaccagggagagaggctcaccacttttgagtccacggggcttgcacctccacaagacaaacatccctaggccacccagagtaggcaagagaggaggtgaagcctcgggagaaacccctcccttggcagctggtttaagacccaaaacggggatacaaatgcccctgagagagcagtggtatactggaatagatgaggatgggcacatggtggagaggcgtgtttttgtgtaccagcccttcttctctgccgacctcctcaactggaaaaacaataccccatcctatactgaaaagccgcaagctctaattgatttgctccaaactattatccagacccataaccccacttgggctgattgccaccagttgctcatgttcctctttaacacagatgaaaggcggagagtgctccaagcagcaactaagtggctagaggaacatgcaccggctgattaccaaaacccccaagagtatgtaaggacccagttaccgggaaccgacccccagtgggacccaaatgaaagagaggatatgcaaaggctaaaccgatacagggaagctctcttggaaggattaaagaggggagcccagaaggccacaaacgtggccattcagggaaaagaagaaagtccagcacaattctacgagaggctgtgtgaggcctattgtatgtatactccctttgatcccaatagtcctgaaaatcagcgcatgattaacatggctttagttagtcaaagtgcagaagacattagaagaaaactgcagaaacaggctgggtttgcagggatgaacacatcacagttattagaaatagctaaccaggtgtttgtaaacagggatgcagtaagccctaaggaaaaccgcagagagaatgaacatcaggtccggcgaaatgccgacctgttagctgcagcaatcacaggggtccccccaaagaggcaagggaaggggggccccgggaaagaaattcagcctggttgtcagagcttgcagcgtaatcagtgtgcttattgtaaagaaataggacattggaagaacaaatgccctcagctaaaaggaaaacaaggtgactcggagcaggaggatccagacaaggaggaaggggccctgctcaacctgggctcaaggacccccaaagagcctatggtcaggatgacagttgggggtaaagacattgattttcttgtagataccggtgctgaacattcggtagtaaccaccccggtcagccccttatccaaaaagactattgacataattggagccacaggagtttcagcaaaacaagctttctgcttgccccggacttgtactgtaggaggacataaagtgattcatcagtttttgtacatgcctgattgtcccttgcccttgttgggaagggacttgcttagcaaactgagagccactatctattttacagagcatggctctttgctgctaaagttacccggaacgggagtcattatgacccttatggtaccccgagaggaggaatggaaacttttcttaactgagtcgggccaagagataagaccagctctggctaagtggtggccaagagtgtgggcagaagacaaccctccagggttggcagtcaaccaagcccccgtacttatagaagttaagcctagggcccagccggttaggcaaaaacagtacccggtccccagagaagctcttcaaggtatccaggtccatctcaagtgcctaagaacctttggaattatagttccttgtcagtctccatggaacactcccctcctgcctgttcccaagcctgggaccaaggactacaggccggtacaggatttgcgcttggttaatcaggctacagtgactttacacccaacagtacctaactggtacacattgctggggttgctgccagctgaggacagctggttcacctgcttggacctgaaagatgctttctttagcatcagattagcccctgagagccagaagctgtttgcctttcagtgggaagatccggagtcaggtgtcactactcagtacacttggatccggcttcccaaagggttcaagaactcccccaccatcttcggggaggcattggctcaagacctccagaagtttcccaccagagacctaggctgcatgttgctccagtacgttgatgacctttttctgggacaccctacggcagtcaggtgcgccaagggaacagatgctctactccggcacctggaggactgtgggtataaggtgttcaagaaaaaagttcagatctgccgacagcaggtacgttacttgggatttactatccggcagggggagtgcagcctgggatcaaaaagaaagcaagtcatttgtaatctaccggagcctaagacc

SEQ ID NO: 8922 - DNA, 246 bp, Homo sapiens
  SIMILAR (10)..(180): 331254mologous to Reticuloendotheliosis virus C end of pol protein (reverse transcriptase),accession number X01455,Smith- Waterman Score=89.
atggaggaaggatggattcggttaccagatgggagactagctgtgccacagctgctaggagctgcagttgtactggctgtgcaagaaaccacccatcgagatcaggagtcactggaaaagttgttaggctggtatttctacatctcacttctgtcagcccttgccaaaacgatttcgaccgccttacggatcggctcagacaacgggcctgtgtttttggctgccttggtacagaagacagcaaag

SEQ ID NO: 8923 - DNA, 472 bp, Homo sapiens
  SIMILAR (399)..(470): 701254mologous to Human endogenous retrovirus HERV-E envelope protein,accession number U34991,Smith-Waterman Score=87.
  misc_feature (1)...(472): n = a,t,c or g
cccccgccgcnnngnnnnaatggagactganggctaacgcacgagcnaccggaccgganaacccgggtcgacgatttcgtatggcagcctaccctgtggcaacgcgttagtctttttgccgcagggggcgcattggggtccagccgtgcccagaacgcaaatcagaggtagtcggacctttcccgctggcgcgcagcctcagctagtttattctagtgggcccaacctctgagaccatccttgaacatcagtagactgtgagttgtacatgggcgagagcagcttcaccaacccctgcaaagtgactctgaagaagatgacaatacctgcttcagtcacacccggaagctgactggtccacgcatggccaaagcatgagaaaactcattgcgggactcattttccttaaaatttggacttataccatagggacttcaactgaccttcctcagactgaagactattcccagta

SEQ ID NO: 8924 - DNA, 408 bp, Homo sapiens
  SIMILAR (1)..(240): 781254mologous to Human endogenous retrovirus Method: conceptual translation supplied by author; putative hybrid protein similar to HERV-H protease and HERV-E integrase,accession number U34991,Smith-Waterman Score=354.
  misc_feature (1)...(408): n = a,t,c or g
gatcaggtgtggatcaaggattggaacataggctccttgcggccacggtgaaaaggaccccagaccatcatcttgaccactcccacagccgtaaagatagagggaatcccagcctggatccaacacagccaggtaaaacctgcagcacctgagacctgggaggtgagaccaagcctagataacccctgcaaagtgactctgaagaagatgacaagccctgctccagtcacactcagaagctgactggtccacgcatggccaaagcatgagaaaactcatcgtgggactcattttccttaaattttggacttgtacagtaaggacttcagctgaccttcctcagactgagaactgttcccagtcacnnnnnnnnnnnnnnnnnnnnnnnnnnnnnnnnnnnnnnnnntt

SEQ ID NO: 8925 - DNA, 1105 bp, Homo sapiens
  SIMILAR (1)..(801): 351254mologous to Fowlpox virus gag,accession number AF006065,Smith-Waterman Score=349.
atgttgaaaaattttaagaagggatttaatggcgactatggggttactatgacaccagggaaacttagaactttgtgtgaaatagattggccaacattagaagtgggttggccatcagaaggaagcctggacaggtcccttgtttctaaggtatggcacaaggtaactggtaagtcaggacactcagaccagtttccatacatagacacttggttaccacagtgggtaagagggcaggcagcagcagtgctagtagcaaagggacagatagtcaaggaaggatcccgctccacccaccgagggaaatcaactcctgaagttctgttcgacccaacatcagacgatccattgcaggagatggcaaaagtcatcccagtggtgccctccccttaccagggagagaggctccccacttttgagtccacagtgcttgtgcctccgcaagacaaacatatccctaggccacccagagtagacaagagaggaggtgaagcctcaggagaaacccctcccttggcagctcgtttaagacccaaaacggggatacaaatgcccttgagagagcagcggtatactggaatagatgaggatgggcacatggcggagaggcgtgtttttgtgtgccagcccttcacctctgccgaccttctcaactggaaaaacaataccccgtcctgtactgaaaagccacaagctctaattgatttgctccaaactattatccagacccataaccccacttgggctgattgccaccagttgctcatgttcctctttaacacagatgaaaggcggagagtgctccaagcagcaactaagtggctaggggaacatgcaccggctgattaccaaaacccccaagagtatggaaaagaagaaagtccagcacaattctacgagagactgtgtgaggcctatcacatgtatactccctttgatcccgatagccctgaaaatcaacgcatgattaacatggctttagttagtcaaagcgcagaagacattagaagaaaactgcagaaacaggctgggtttgcagggatgaacacatcacaattattagaaatagctaaccaggtgtttgtaaacagggatgcagtaagcc

SEQ ID NO: 8926 - DNA, 711 bp, Homo sapiens; identical to SEQ ID NO: 7962
  SIMILAR (1)..(183): 901254mologous to Homo sapiens NAG13,accession number AF194537,Smith-Waterman Score=288.

SEQ ID NO: 8927 - DNA, 447 bp, Homo sapiens
  SIMILAR (99)..(40): 901254mologous to Human endogenous retrovirus Method: conceptual translation supplied by author; putative hybrid protein similar to HERV-H protease and HERV-E integrase,accession number U34991,Smith-Waterman Score=97.
atgcatttcctcatgcttcggccgtgtgtggaccagtcagcttccgggtgtgactggggcagggcttgtcgtcttcttcagagtcactttgcaggggttggcgaagctgcttccatccacgtaggactgcttagcagtgaaaagggcgtcctgggtgcagccaacagggtacagctgcaagccattgttgaaggtgtcttgacgtatcagagaaggcaggcagcctttccgcccttgcggagggagagactagcatcatcatcaagagataaaccgaagtgtgctggaaaacacacgagctctttagtaagagcaggcgacatgcaaggaaccatagtaacaggaacagaggtcctgaggctggatatggaacccaagtttgaggatgaccaactgagaccagtgttgctggagcacaaagtgccaaggagagaaatggcaggctaa

SEQ ID NO: 8928 - DNA, 373 bp, Homo sapiens
  SIMILAR (153)..(368): 691254mologous to Homo sapiens Human G-protein coupled receptor GRIR-1,accession number Y28279,Smith-Waterman Score=244.
aaattgtggagatctgattcctagatttcgactgcccttacggatcggctcacataacgggcctgcgtttttggctgccatggtacagaaaacggcaaaggtattggggatcacacggaaactgcatgccgcctcccagcctcagagttccggaaaggtgtccaagtcacacagagccacggaatctcacaggagcctgagaactcctcctcctgggactctcagaggatccagaactgcagcccatcctcgctgggctgtccctgtccatgtatctggtcacggtgctgaggaacctcctcatcagcctggctgtcagctctgactcccacctccacaccccaatgtgcttcttcctctccaacctgtgctg

SEQ ID NO: 8929 - DNA, 1857 bp, Homo sapiens
  SIMILAR (800)..(1792): 391254mologous to Fowlpox virus gag,accession number AF006065,Smith-Waterman Score=556.
atgagacaagatggcaaggtggcaagacagctattggtgattggtgagatggtgagacagcgatcagcagctggcaataaggaaggagacaagacgccccagcctatacctctcactgcccaaggaagtaagccctaccagtaccaccaggagggtacccctatatcagcccctaaaatcaaacctgtgtccattgtgggagataagaaacagatggatctgagtactgtccaaaaatatgcagatggagtggccacacataacctagaccatgctagttatcatgtggaaggagatacagttccagatatggaccctcagtggaattaccagagggcttcccaagatctcaaatgcaaaaatcacatgacggagaaagtcagaaatttcaagtgtgagagggagctggcccaaggaaattctactggctttgagatggagggatcacgtggcaaggatggtctctatgagctaagtggcccacagctgacagcaaggaaagaggtacctcattcctgcaactgcaacaaactaaatatggctgatgatctgaatcagcttctgattaaagccactcccttcactatctcggtgtctcctgtccgcggctcgtcctgctacatttcttggttccctgaccggcaagcgagagccgtgtgtggcaggcccccgtggaggatcaacgcagtggctgaacaccgggaaggaactggcacttggagtctggacattcgttaccagggagagaggctcaccacttttgagtccacggggcttgcacctccacaagacaaacatccctaggccacccagagtaggcaagagaggaggtgaagcctcgggagaaacccctcccttggcagctggtttaagacccaaaacggggatacaaatgcccctgagagagcagtggtatactggaatagatgaggatgggcacatggtggagaggcgtgtttttgtgtaccagcccttcttctctgccgacctcctcaactggaaaaacaataccccatcctatactgaaaagccgcaagctctaattgatttgctccaaactattatccagacccataaccccacttgggctgattgccaccagttgctcatgttcctctttaacacagatgaaaggcggagagtgctccaagcagcaactaagtggctagaggaacatgcaccggctgattaccaaaacccccaagagtatgtaaggacccagttaccgggaaccgacccccagtgggacccaaatgaaagagaggatatgcaaaggctaaaccgatacagggaagctctcttggaaggattaaagaggggagcccagaaggccacaaacgtggccattcagggaaaagaagaaagtccagcacaattctacgagaggctgtgtgaggcctattgtatgtatactccctttgatcccaatagtcctgaaaatcagcgcatgattaacatggctttagttagtcaaagtgcagaagacattagaagaaaactgcagaaacaggctgggtttgcagggatgaacacatcacagttattagaaatagctaaccaggtgtttgtaaacagggatgcagtaagccctaaggaaaaccgcagagagaatgaacatcaggtccggcgaaatgccgacctgttagctgcagcaatcacaggggtccccccaaagaggcaagggaaggggggccccgggaaagaaattcagcctggttgtcagagcttgcagcgtaatcagtgtgcttattgtaaagaaataggacattggaagaacaaatgccctcagctaaaaggaaaacaaggtgactcggagcaggaggatccagacaaggaggaaggggccctgctcaacct

SEQ ID NO: 8930 - DNA, 1635 bp, Homo sapiens
  SIMILAR (436)..(1020): 281254mologous to porcine endogenous retrovirus viral polypeptide,accession number AJ133816,Smith-Waterman Score=175.
atggaggaaggatggattcggttaccagatgggagagtagctgcgccacagctgctgggagctgcagttgtactggctgtgcaagaaaccacccatcgaggtcaggagtcactggaaaagttgttaggccggtatttctacatctcacctttgtcagcccttgccaaaacggtgaggcagcgggattttgccgatttcggaaccaccatcaaacaggattttcgcctgctggggcaaaccagcgtggaccgcttgctgcaactctctcagggccaggcggtgaagggcaatcagctgttgcccgtctcactgacttcccagtgccaagtgtataagtgtgtctggaattggtgggttcttggtctcactgacttcaagaatgaagccaaggaacttcgtctttataagcaggagaaaagggagaaagcaaaacgttggaaggaaacagaaaagggatttaatggagactatggggttactatgacaccagggaaatgtagaacttattttgaaatagattggtcaaaattagaagtgggttggccatcagaaggaaacctggagaggtcccttgtttctaaggtatggcacaaggtaactggtaagtcaggacactcagaccagtttccatacatagccacttggttacagctggtgctagaccccccacagtggctaagagggcaggcagcagcagtgctagtagcaaagggacagattgccaaggaaggatcctactccacccgccgagggaaatcaactcctgaagttctgtttgacccaacatcagaagatcccttgcaggagatggaaccagtgatcccagtggtgccctccccttaccagggaaagatgctccccactcttgagcccacagtccttgtgcctccacaagacaaacatatccctaggccacccggagtagacaagagaggaggtgaagcctcgagagaaacccctacattggcagctcgtttaagacccaaaactgggatacaaatgcccctgagagagcagtggtatactgggatagatgaggatggtcacatggtggagagaggacatcagcaagcttcaaccttggtgggcttggggaattcctgcactgacttagaggctcaaaaagcagcatctgacctcttccaggcctcaatcacagcccccctgttccctcaagcacctggtcttgtacctacttattctaaagaagaaaaagactttctccaggcagagggaggacaggtgataaaggaaggatgggttcggttaccagatgggagagtagctgtgccacagatgctaggagctgcagttgtactggctgttcatgaaaccacccatctagaggcttatccaacaccaactgagaaagctcgtgaagtaacccatgtgcttcttcgagatcttattcctagatttggactacccttacggatcggctcagataacgggccatcatttctgactgacttggcacagaagatagcaaagtattggggatcacaaggaaactacatgccacttacgggcctcagagttccagaaagtatacctctaaatgatgatgatgatgatgatgatgataatgatgatgatgatgatgatgatgatagtgataatagtacattttgctga

SEQ ID NO: 8931 - DNA, 2082 bp, Homo sapiens
  SIMILAR (52)..(1038): 331254mologous to Baboon endogenous virus strain M7 gag-pol precursor polyprotein,accession number D10032,Smith-Waterman Score= 412.
atgctagtagcaaagggacagatagccaaggaaggatcccgctccacccgcccagggaaatcaactcctgaagttctgtttgacccaacatcagaagatccattgcaggagatggcaccagtgatcccagtggtgccctccccttaccagggagagaggctccccagtcttgagcccacagtgcttgcacctctgcaagacaagcatatccctaggccacccagaatagacaagagaggaggtgaagcctcgggagaaacccctcccttggcagctcgtttaagacccaaaactgggatacaaatgcacctgagagagcagcagtatactgggagagatgaggatggtcacatggtggagaggcgtgtttttgtgtaccagcccttcacctctgccgaccttctcaactggaaaaacaataccccgtcctataccgaaaagccacaagctcaaattgatttgctcccaactattatgcagacccataaccccacttgggctgattgccaccagctgctcatgttcctctttaatgcagatgtaaggtggagagtgctccaagcagcaactaagtggctagaggaacatgcaccagctgattatcaaaacccccaagagtatgtaaggacccagttaccaggaaccgacccccagtggggcccaaatgaaagagaggatatgcaaaggctaaagggagacagggaagctgtcttggaagggttaaagaggggagctcagaagaccacaaacgttaacaaggtctctgaggtcattcagggaaaagaagaaagtccagcacaattctctgagagactgtgtgaggcctatcgcatgtatactccctttgatcccgatagccgtgaaaatcagcgcatgattcaaatggctttagttaaagcgcagaagacattagaagaaaactgcagaaacagactgggatattggaagaacaaatgccctcagctaaaaagaaaacaaggtgactcagagcaggaggccccagacgaggaggaaggggccctgctcaacctggcagaagggttattggactcagggggaccgggctcaagtgccccgaaagagcctatggtcagcatgacagtcgggggtaaagacattgatattcttgtagataccgttgctgaacattcggtagtaaccgccccagttgcccccttatccaaaaagactattgacatcatcggagccatgggggtttcagcaaagcaagctttctgcttgcctcggacttgtgctgtaggaggacatacagtgattcactgggaactatacgtggacgggagcagcttcatcaacccacaaggagagagatgtgcagggtatgcagtggtaaccctggacaccgttgttgaagccagatcattgccccagggcacttcagcccagaaagctgaactcattgctttcattcgggccttagagctcagggaggcacctgatcttgtacctacttcttctaaagatgaaaaggactttctccaggtagagggaggacaagtgatggaggaaggatggattcggttaccagatgggagagtagctgcaccacagctgcgaggagctgcagttgtactggctgtgcaggaaaccacccatcgaggtcaggagtcactggaaaagttgttaggccggtatttctacatctcgcatttgtcagcccttgccaaaacggtgatgcagcagtgtgttacctgccaacagcatcatgcgaggcgaggtccagccattccacccggcatacaaacttacggagcagccccctttgatagatctccaggtggacttcacagaaatgccaaagtgtggagatttggactgcccttatggatcggctcagataacgggcctgcgtttgtggctgacttggtacagaagatggcaaaggtattggggatcacatggaaactgcatgccgcctaccggcctcagagttccggaaaggtggagcggatgaatcggactatcaaaaatagtttagggaaaagtgaccctgaagaagacgacaagccctgctccagtcacacccggaagctgactggtccacgcatggctgaagcatga

SEQ ID NO: 8932 - DNA, 788 bp, Homo sapiens
  SIMILAR (415)..(633): 631254mologous to Homo sapiens HERV-E envelope glycoprotein,accession number AF026246,Smith-Waterman Score=237.
cttaggaaaacctgaatataaaggccccccatgctgtggtaactttaatgactaccacaggacctgattggatatcgaatgctatattaaccaaggacttttgtttgttatgtgaaaatacccacatatccaggtggggttgtaacaccctaaacgccaccaccttgctcctggtatcagagagcccagttaaacataactgtttagaggtgctggactcagtttattctagtaggcctaacctccgagaccacccttaaacatcagtagactgggagctgtacgtggatgggagcggctttgccaacccctgcaaagtgactctgaagaaggagacaagccctgctccagtcacacccagaagctgactggtccacgcacaggcgaagcatgaggaaactcattgcgggactcattttccttaaaatttggacttgtacagtaaggacttcaactgaccttcctcagattgagaactgtttccagtatatacatcaagtcactgaggtaggacaaaaggttgctatggtcctattattttacagttattataagtgtactagaactctaaaaaagccttgtttgtataatgttattctgtacaaggtatgtagcccaggaaatgaccaacctgatgtgcgttatgacccacctgagcctcccatgaccacagtttttaaaataagattaagaatgaagactggtgggggctcacaaacgatatgagtaaagtgttaaccaaaacagaagaaaaagaggtgcccaaacaagtcacgttaaaatttaaa

SEQ ID NO: 8933 - DNA, 3477 bp, Homo sapiens
  SIMILAR (2023)..(2988): 391254mologous to Baboon endogenous virus strain M7 gag-pol precursor polyprotein,accession number D10032,Smith-Waterman Score= 521.
atgttgaaaaattttaagaagggatttaatggcgactatggggttactatgacaccagggaaacttagaactttgtgtgaaatagattggccaacattagaagtgggttggccatcagaaggaagcctggacaggtcccttgtttctaaggtatggcacaaggtaactggtaagtcaggacactcagaccagtttccatacatagacacttggttaccacagtgggtaagagggcaggcagcagcagtgctagtagcaaagggacagatagtcaaggaaggatcccgctccacccaccgagggaaatcaactcctgaagttctgttcgacccaacatcagatgatccattgcaggagatggcaaaagtcatcccagtggtgccctccccttaccagggagagaggctccccacttttgagtccacagtgcttgtgcctccgcaagacaaacatatccctaggccacccagagtagacaagagaggaggtgaagcctcaggagaaacccctcccttggcagctcgtttaagacccaaaacggggatacaaatgtccttgagagagcagcggtatactggaatagatgaggatgggcacatggcggagaggcgtgtttttgtgtgccagcccttcacctctgccgaccttctcaactggaaaaacaataccccgtcctgtactgaaaagccacaagctctaattgatttgctccaaactattatccagacccataaccccacttgggctgattgccaccagttgctcatgttcctctttaacacagatgaaaggcggagagtgctccaagcagcaactaagtggctaggggaacatgcaccggctgattaccaaaacccccaagagtatgtaaggacccagttaccgggaaccgacccccagtgggacccaaatgaaagagaggatatgcaaaggctaaaccgatacagggaagctctcttagaaggattagaggggagcccagaaggccacaaacataccggtgctgaacattcggtagtaaccggcccagtcgcccccttatccaaaaagactattgacatcatcggagccatgggagtttcagcaaaacaagctttctgcttgccccggacttgtactcctgggaccaaggactacaggctggtacaggatttgcgcttggttaatcaggctacagtgactttacatccaacagtacctaacccgtacatattgctggggttgctgccagctgaggacagctggttcacctgcttggacctgaaagacgctttctttagcatcagattagcccctgagaggcagaagctgtttgcctttcagtgggaagatccggagtcaggtgtcactactcagtacacttggacctggcttccccaagggttcaagaactcccccaccatcttcggggaggcattggctcgagacctccagaagtttcccaccagagacctaggctgcgtgttgctccagtacgttgatgaccttttgctgggacaccccacggcagtcgggtgcgccaagagaacagatgctctactccggcacctggaggactgtgggtataaggtgtccaagaaaaaaagctcagatctgccaacagcaggatggcccccatgtttgagggccttggcagcaactgccctgctagtacaagaagcagataagctgactcttgggcaaaaccggaacataaaggccccccatgctgtggtgactttaatgaatactaaaggacatcattggctaatgagtgctagactcactaagtaccaaagtttgctttgtgaaaatccccgtataaccactgaagtttgtaacaccctgaaccccgctaccttgttcccagtatcagagagccctgttgagcatgactgtgtagaagtgttggactcagtttactctagcagacctgacctccgggaccagccttgggcatcagtagactgggaactatacgtggatgggagcagctttatcaacccacaaggagagagatttgcagggtatgcggtggtaactctggacactgttgttgaagccagatcgttgccccagggcacttcagctcagaaagctgaactcattgctttaattcgggccttagaactcagtgaagtgcatggagcattatataaagaaaagggcctattgaactctgggggaaaagacataaaatatcaacaagaaatcttgcaattattagaagcagtatggaaaccccacaaggtggcagttatacattgcagaggacaccagcgagcttccaccttggtgggtttagggaattcccgtgctgactcagaggctcgaaaagcaccatctgccccattccgggcatcagtcacagcccccctgctccctcaagcacctgatcttgtacctacttattctaaagaagaaaatgactttctccaggcaaagggaggacaagtgatggaggaaggatgaattcggttaccggatgggagagtagctgcagttgtactggctgtgcatgaaaccacccatcgaggtcaggaattacttgaaaagttgttaggctggtatttctacatctcacatttgtcaggccttgccaaaatggtgacgcagtggtgtgttacctgccgacagcataatgcgaggcaaggtccagccgttccacccggcatacaagcttatggagcagccccctttgaagatctccaggtggacttcactgagatgccaaagtgtagaggtaacaagtatttactagttcttgggcgtacctactctgggtaggtggaggcttatccaacacgaactgagaaagctcgtgaagtaactcgtgtgcttcttcgagatcttcttcctagatttgaactgcccttacggatcggctcagataacaggccggcatttgtggctgacttagtacagaaggcggcaaagatattacggatcacatggaaactgcatgctgcctactggcctcagagttccggaaaggaccccagactgtcatcctgagcactcccaccgctgtgaaggtagagggaatcccaacctggatccaccacagccgtgtaaaacctgcagtgcctgaaacctgggaggcaagaccaagcccagacgacccttgcagagtgaccctgaggaaaacgacaagccctgctccagtcacacccagaagctgactggtccacccacggccgaagcatgaggaagctcatcgcgggattcatttttcttaaattctggacttacacagtaagggcttcaactgaccttactcaaactggggactgttcccagtgtatttatcaggtcactgaggtaagacagccaattaaaacaatgtttctgttctatagttattataaatgtataggaacattaaaagaaacttgtttgtataatgctactcagtacaatgtatgtagcccaggaaatgaccgacctgatgtgtgttataacccatctgagcctcctgcaaccaccatttttgaaata

SEQ ID NO: 8934 - DNA, 500 bp, Homo sapiens
  SIMILAR (227)..(442): 481254mologous to Strongylocentrotus purpuratus tektin A1,accession number M97188,Smith-Waterman Score=185.
  misc_feature (1)...(500): n = a,t,c or g
tcgagtgcctccaccccggagactcgcgccaagttcacgtaggacaatttgtgctgtgccagctggcagcgcctggcctcggccaacttccgggtgctggtggactgcatcnttagcgacaccttcgaggacttgcggctccagtgcgacgccgtgaacctggctttcgggcgccgctgtgaggagctggaggacgcgcggtacaagctgcatcaccacctgcacaaggctgttgagtgaggtggaggagctgaacatgtccctcacagcactgcgagagaagcttctagaagcggagcagtccctgcgcaacctcgaggacatccacatgagcctggagaaggacattgccgccatgaccaacagtctcttcatcgaccgccagaagtgcatggcccatcgtactcgctaccccaccatcctgcagctggctggctaccagtgagcagcggcacggtgcttccccccagtcccccaaataaacagcgcgttagctttca

SEQ ID NO: 8935 - DNA, 1641 bp, Homo sapiens
  SIMILAR (85)..(498): 451254mologous to Strongylocentrotus purpuratus tektin A1,accession number M97188,Smith-Waterman Score=290.
atggtgcagacggatgtgctcctaccagagccagcaccgcagacagtgtcaccctgcgagctgccctgcaaagagtatgacgtggcccgcaacatgggccctggccaccgccagctggaggtgtggttccagaactgctatgctcgctaccaccaggccttcgccgactgcaaccagtcggagcgggagctgcaggggcgcgagagccagcagctggccgcagagacccaggcgctggcacagccgacacagcaagactccacgtgcagggtgggcgagcgactgcaagacacgcacagctggaagtcagagctgcagcacgaggtggaggtgctggctgcagagaccgacctgctgctggcccagaagcaacggctggagcgtgccctggatgccatggaggtgcccttctccatcgccactgacaacatgcagtgcagccagcgccaccagcacgccaaccttgtgcgtgactatgtggagacggagctgctgaaggcctatccccctgcaccctctcagtgcctcaagaactgctgcagctcccgcaaaccttctgcctgcaacaagggtgcctgtgaagtgatggagacactgacagtgcaggaagaggcaaacccagggacagaggggtgcaggactcgggccctggcacacaaggaggaagctgagcccatccggaacattcaggagctgctgaagagagccatcgtgcaagcagtgagccagatccaactgaaccgagagcacacggagatctgcgagatggactggttggacaaggtggaggcctacaacctcgacgagacttgcgggcgccaccacagccagagcaccgagagacccggaccaagttcacacaggacaatctgtgccgtgcccagcgcaagcgcctggagctcggccaacctgtgggttcttgtggactgcatccttcgcgacacctccgaggacctgggactccagtgtgacgccgtgaacctggccttcgggcgccgctgtgaggaactggaggacgcgcggcacaagctgcagcaccacctgcacaagatgctgcgggaaatcacagatcaggaacacaacgtggtggcactgaaggaggccatcaaggacaagaaggaacctctgcacatagcccagacccggctgtacctgccctcacaccagccccaacatgcagctgtgccgcgaagcagcccagttcagagccgcttttcctgggtaggaatcctttcaatggcgtcttcccaggacctccttgccagctcccaattgggagttttgggtccccttccaccccagtaggtgcatacttctgccctccccagccccagctcacacccccccaacacccccaagctggtgagtgaggtggaggagcttgtacaagtccatcacagcgctgcgggagaagcttctacaagcggagcagtccctgcgcaacctcaaggacatccacatgagcctggagaaggacgtcaccgccatgaccaacagtgtcttcatcgaccgccagaagtgcatggcccatcgtacttgctaccccaccattctgcagctggctggctaccagtgagcagcggcacggtgcttccccccaatcccccaaataaacagtgcgttagctttcaaaaaaaaaaa

SEQ ID NO: 8936 - DNA, 442 bp, Homo sapiens
  SIMILAR (100)..(2): 1001254mologous to Homo sapiens HSPC240,accession number AF151074,Smith-Waterman Score=187.
  misc_feature (1)...(442): n = a,t,c or g
gcggtccgaggcccgtagcctccacgaccttggagaaggcagggctgccggagcagtcacacagggagccggggaggtggcagcagtcacccgtcgtcatggccaccgggagccccgtatcctcagggcctgaggcccatggttccaggnnnnnnnnnnnnnnnnnnnnnnnnnnnnnnnnnnnnnnnnnnnnnnnnnnnnnnnnnnnnnnnnnnnnnnnnnnnnnnnnnnnnnnnnnnnnnnnnnnnnnnnnnnnnnnnnnnnnnnnnnnnnnnnnnnnnnnnnnnnnnnnnnnnnnnnnnnnnnnnnnnnnnnnnnnnnnnnnnnnnnnnnnnnnnnnnnnnnnnnnnnnnnnnnnnnnnnnnnnnnnnnnnnnnnnnnnnnnnnnnnnnnnnnnnnnnnnnnnnnnnnnnnnnnnnnnctctgatccgcggccgggccg

SEQ ID NO: 8937 - DNA, 927 bp, Homo sapiens
  SIMILAR (927)..(775): 821254mologous to Homo sapiens Human secreted protein, SEQ ID NO: 5026,accession number G00945,Smith-Waterman Score=196.
tcattgctcatgggtcctatctctgtgtccagtgatggtcctttctgccggatctgccatgagggagcgaacggggagtgcttgctgtccccgtgtggctgcaccggcacgatttgacccactggagtatttagtgatgccacgttgtgctcctttcttcattcctgtgcaggtgaactgaatcatctgcctctgagaaaacgacaggagaggacggaacgcgggtcttcgtgagccttttgcgctctctcctctctctcctaccgtctgcaccattgcgtcaccatcctccttctgcctagctctccttatgctcttgcgtctccgattaggctgttgccttaatcccacaatctgctcatcatttcccaaatatatcatagccttttccacttcactgttttgctcacgcaaagcctcctgtttggatttttcattctcatatttatggttaccatgagcctttttggcaccaatgaccagtttcacggaccaggtggcagtagatgatttcttgtcgattgtatatctgtttacattcacaccgttcttagcattctgcggagagccaagcactgctcttgctaccagggaacaggtgtgggtagaatccgcctcctgacagaacagcttccccgaaacacgggaaaaaggggattcctcccccgacttcgtatctgtctgcttccgagggtgaacgctaagcagcagatcccatctctccactaatacggcactggacgccgctaccctgagcaggcggtacgggaacagccggggccgaggccgcgccggggctaggccgccaacagaccccttagggcccggagccccgttgccgctcggcacgccgggcgcgccgctctcttcctccattttgatctccgtcgccgccacctccgccgccgcttcgacccctgccgccat

SEQ ID NO: 8938 - DNA, 1608 bp, Homo sapiens
  SIMILAR (352)..(1053): 891254mologous to Homo sapiens HSPC240,accession number AF151074,Smith-Waterman Score=1128.
gcggccgcccggcccggccgcggatcagagactggagactgggtcttgctctgttacccaggctggagtgcagtggtgtgatcatagctcactacagccttgaactcctgggctcaagaggttgaggctccctcctcagcctcccaagtagctgggactacaggctttcagcaccatgcctggctaattcaaaaaaaccttcagagagatagggtctctctatgttgccctagctcgtctcaaactcctggcctcaagtgatcctcctgcttggacctcccaaagcgctgggattacaggctcctggaaccatgggcctcaggccctgaggatacggggctcccggtggccatgacgacgggtgactgctgccacctccccggctccctgtgtgactgctccggcagccctgccttctccaaggtcgtggaggctacgggcctcggaccgccccagtatgtggcacaggtgacttcaagggatggccggctcctctccaccgtcatccgtgccttggacacaccgagtgatggtcctttctgccggatctgccatgagggagcgaacggggagtgcttgctgtccccgtgtggctgcaccggcacgctgggtgccgtgcatgaagagcttgtctggagaagtggctttcctcatctaacaccagctacttgcgagctgtgccacacggagtttgcagttggagaaacggcctcgaccccctcacagagttggctgaaggacccggggccgcggacggagaagcggacactgtgctgcgacatggtgtgtttcctgttcatcacaccgctggccgccatctcaggctggttgtgcctgcgcggggcccaggaccacctccggctccacagccagctggaggccgtgggtctcattgccctcaccatcgccctcttcaccatctatgtcctctggacgctggtctccttccgctaccactgccagctgtactccgagtggagaaagaccaaccagaaagttcgcctgaagatccgggaggcggacagccccgagggcccccagcattctccactgggcaggtggactcctgaagaaggtggcagaggagacaccagtatgaatgctgggctctccggaccctgcagcagagaggccagaggtagctggtgataccctgtcctgtggaaggacttccacttcaacacttccacttcaacagttcccgcacggcctgaacgcttcttaggcccaagagacacccatgcagagccttagtctgtgatcctgtgtgaagatattttcagggttttttttttttttttttttgcatatggaggacaggtgggacatggtcctgagctctggacggagcaggcaccctgatttcattttgaggtccacatggccccttttgggccagcagctgtggccggtgtatcaagggggcccttaaagctggaacattccagcaagcttcttgggcttttttgcacccggcaggccccctttcctggcaccctcgactttatataaaagttgccctgggtttcaaaaacccccccctgaatgaataaaaggagccctggctggaaaaaaaaaaaaaaaaaaaatatataaaagtcgtatcga

SEQ ID NO: 8939 - DNA, 814 bp, Homo sapiens
  SIMILAR (1)..(444): 991254mologous to unidentified cloning vector 29kD protein essential for the replication of mini F plasmid,accession number AB015619,Smith-Waterman Score=761.
atggcggaaacagcggttatcaatcacaagaaacgtaaaaatagcccgcgaatcgtccagtcaaacgacctcactgaggcggcatatagtctctcccgggatcaaaaacgtatgctgtatctgttcgttgaccagatcagaaaatctgatggcaccctacaggaacatgacggtatctgcgagatccatgttgctaaatatgctgaaatattcggattgacctctgcggaagccagtaaggatatacggcaggcattgaagagtttcgcggggaaggaagtggttttttatcgccctgaagaggatgccggcgatgaaaaaggctatgaatcttttccttggtttatcaaacgtgcgcacagtccatccagagggctttacagtgtacatatccccccatatctcattcccttctttatcgggttacagaaccggtttacgcaaaaatgcaaaaacctgctcaccattttgggaggcagcacttgccagggcaagagccacgtcagcggaagacaccactgcatcctcaggaacatgcatggcccccaccaggtcgtgcacgttgaggagatgtccactggggatcaggcattagaagttctacagtacctcttctccaatgacctggatgtgcctgtgggccacattgtgcatactggcatgctcaacgagggtggagggctggctgctggctctaccaggttctgtgctggcatcctgagcactgccaggcacttgaccattgagcagaagatggcagactactcaaacaaactctaccatcagttagagcaagaaacagggatccgaacag

SEQ ID NO: 8940 - DNA, 513 bp, Homo sapiens
  SIMILAR (422)..(231): 981254mologous to Homo sapiens alanyl-tRNA synthetase,accession number D32050,Smith-Waterman Score=305.
ggcgccgctctccatctccaggatgacaagaggctggttggggttgctgtcgatgaactgcttcgtcttctctaacactcgtttatggacatcggctttgctggctcggtccaagtcatccatgaccttctttagggatttgagagtctaccgcaattcatccttctgccactgggggatgactgcagtggccagggcctctccaaggtcagcgatcttccctctgcacattccttgtttggagcagtctgagccttcactttggcttccatgacagagagacatttcttcaagctctctgctttcctgagggccttctgggcctcggcacctgtgacagccacaatcctccggatacccttggcaatggcttcttccgtcacgatcacaaaagctcctgcatgactcgagttccgcaggtgcctgaatggcagaacacaaagtccatagtgaaagaggccctggcagcccttggctggggggtcacactagcggacaagagaagcaggaatg

SEQ ID NO: 8941 - DNA, 1239 bp, Homo sapiens
  SIMILAR (1)..(468): 791254mologous to Cloning vector pZC320 SopA,accession number U26464,Smith-Waterman Score=592.
atgaaactcatggaaacacttaaccagtgcataaacgctggtcatgaaatgacgaaggctatcgccattgcacagtttaatgatgacagcccggaagcgaggaaaataacccggcgctggagaataggtgaagcagcggatttagttggggtttcttctcaggctatcagagatgccgagaaagcagggcgactaccgcacccggatatggaaattcgaggacgggttgagcaacgtgttggttatacaattgaacaaattaatcatatgcgtgatgtgtttggtacgcgattgcgacgtgctgaagacgtatttccaccggtgatcgggggtgctgccataaagttggcgtttacaaacctcattttctgttcatcttgctcaggatctggctctgaagggctacgtgttttgctcgtgggaggtgggggcactggagcccctgagatgcagggtcctgatgggtggagggcttatgcctctcccggatccctgacttcactcttgcctcctgaccaccacaccctggcctgcaggtttggcaactgcgtggagctgcaggcttcagctgccttcaactggaacgaccagcgctgcaaaacccgaaaccgttacatctgccagtttgctttgatgtatgatctgaaggttccccgctgggacttccagaccggtaggcagttacgcacctctcctctctacgaccggctggatgcacagggagccaggtggatggagaaacatggatttgagaggccaaagtactttgttccccccgacaaggacctcctggcattggagcagagcaagactttctataagccagattggtttgacatcgtggagtctgaagtcaagtgctgtaaggaagctgtgtgtgtcattgacatgtcctctttcacaaagtttgagataacagtgcgagcccaaccgctctcgcgggcgccgtgtttgccggatctcgcagcggtcggtggcgggcgggctggtgttttggttggcttttttgctgtggcggattctgttacgcgcgaacacgggctgcgttggtttgctcgagctgccctcgaggatcggctggctgctggctctaccaggttctgtgctggcatcctgagcactgccaggcacttgaccattgagcagaagatggcagactactcaaacaaactctaccatcagttagagcaagaaacagggatccaaacaggtacctatgctgaacgctgggaaaattga

SEQ ID NO: 8942 - DNA, 1098 bp, Homo sapiens
  SIMILAR (730)..(1092): 1001254mologous to Escherichia coli Hsp70,accession number U01827,Smith-Waterman Score=596.
atggctatcctgttcctcctcctttccactacagtctgtcctcttgcctacctccgtgaaaatggccctcccacggatcagcaaattcaacagcctcttctccctgctcagcccgtgtggcttattctcagcagagaggcagcgatgaagctgcttttgatgtatgatctgaaggttccccgctgggacttcaggaccggtaggcagttacgcacctctcctctttacgaccggctggatgcacagggagccaggtggatggagaaacatggatttgagaggccaaagtactttgttccccccgacaaggacctcctggcattggagcagagcaagactttctataagccagattggtttgacatcgtggagtctgaagtcaagtgctgtaaggaagctgtgtgtgtcattgacatgtcctctttcacaaagtttgagataacagtcccttccacaacacgtgggaattatgggagcacaattcaagatttaggtgcagacacagccaaaccgtatcagctacccacccactgccactgctaccagggttatcaagaagccatgaattctgctaccatcaactcaccaggacctccccttgctttggctgtgctgttctttgtgactttgatgcaaggaagccagtggctgacctggaaggatccttcatactctgaagcccgcggtgcttatgtcttgggaactgcatcctttactctgaacaaaggagacgcgcgtactaatgcagcgctcgataccgccaacacaattagttctgttaaacgcctgatgggacgctcgctggctgatatccagcaacgctatccgcatctgccttatcaattccaggccagcgaaaacggcctgccgatgattgaaacggcggcggggctgctgaacccggtgcgcgtttctgcggacatcctcaaagcactggcggcgcgggcaactgaagccctggcaggcgagctggatggtgtagttatcaccgttccggcgtactttgacgatgcccagcgtcagggcaccaaagacgcggcgcgtctggcgggccttcacgtcctgcgcttacttaacgaaccgaccgctgcactgtga

SEQ ID NO: 8943 - DNA, 2316 bp, Homo sapiens
  SIMILAR (1156)..(1488): 951254mologous to Escherichia coli No definition line found,accession number U00039,Smith-Waterman Score=566.
atgatttaccgggagttaaatagagcatatgcgctgggtaatcttcccgcagccaaaggcgttgacgccgagcaatccgcactggaaaacggcctgacgctggtactgaaaaacattgagtttcgtctgctggatagcgacggtgctaccagcgcgattctggaagctcaccgatccctggctggcgatacttccctgcgcgaacatttactggcaggctgtgaccccccagccaagggctgccagggcctctttcactatggactttgtgttctgccattcaggcacctgcggaactcgagtcatgcaggagcttttgtgatcgtgacggaagaagccattgccaagggtatccggaggattgtggctgtcacaggtgccgaggcccagaaggtgagcaggggtcagctcgtgacaactatagtaagcgtacgccgtaacggccatgtggtcatcgctggtgatggtcaggccacgttgggcaataccgtaatgaaaggcaacgtgaaaaaggtccgccgtctgtacaacgacaaagtcatcgcgggctttgcgggcggtactgcggatgcttttacgctgttcgaactgtttgaacgtaaactggaaatgcatcagggccatctggtcaaagccgccgttgagctggcaaaagactggcgtaccgatcgcatgctgcgcaaacttgaagcactgctggcagtcgcggatgtgacaagtaatgagatgagtgtgggctatgcaaatgggatccgggtgatgagcatgacgcacacaggagagccaggattcatgctctacatccccatagaggaggattgtttgggcctggggccacctataccttctgatgctctttccccacccttggaggaggaggaaaggaagaaaatgggccctgagcgatcaccacataccaggccctgggggtctagtggtgaaggagaattaaatgacaagtcacatccccgcaggccccaggggccaaccgacctctcttcatgtcggggacagggatccctggaagagcgtgaaaaatacagtggtcactgtgcagttctctctgctggagcctgtcctgccatcatacaaggtgctgtgacagcaatgcaaggttcagatggcatacaccgacaagagaaggcagagaccatccttcgtggtcaggcaggacgccgggttctgctgatcgataatggtaaaaaaccagggcgcaaaatccttatgtctggcggtgggcgctgcaactttaccaacctttatgtcgaaccaggcgcttatctgagccagaatccgcatttttgtaagtctgcactcgcacgttttacccagtgggatttcattgatctggtcaataaacacggcatcgcctggcacgagaaaacgttagggcaactcttctgcgatgactccgcgcagcagattgtcgacatgctggtggatgagtgcgagaagggcaatggtgacttcagattgcgtagcgaagtgggaaaatcacatctgaatcaggaattaacaatgaaacctgtaaaaccacctcgtattaatggacgagtgccggtcctgtcggcacaggaagcggtgaattatattcccgacgaagcaacactttgtgtgttaggcgctggcggcggtattctggaagccaccacgttaattactgctcttgctgacgaatataaacagactcaaacaccacgtaatttatcgattattagtccaacagggcttggcgatcgcgccgaccgtggtattagtcctctggcgcaagaaggacggaaagggaacccacaagtacaggaccgcaacggaagcgaggggaagacaggggacgctcacagaaaagacagaaaaagacagcgaagagaaccagacgaacagagaggcaccggcaccaagggccccacgccaaaccgggagaaaccggagcgcaagccggcccgcccaaagcaacgcccgcaaaaagcgtcgggaacagggagaaaggacccacacacaccagcacccggagaacacacaatggaagaacacaagaacaacagcgagcgagcgaggacacggaatacggacacacaactgcgaaggcaagcgccgcaaaaacaccagaccagcgaattacgcgcgggtgttaacggcggttctggtattgctttaacgggtagattaccgcctgccagcatcgggatttcgctgtactgcaagccttccatctccagtcggaaatccgggccagcggtcccttgcgcactgcgggagctggcgtacagcgttgcaccgctctggtcctgggcctttcaaccttgcgggctgtgctga

SEQ ID NO: 8944 - DNA, 800 bp, Homo sapiens
  SIMILAR (672)..(481): 341254mologous to Mus musculus CH1-domain,accession number V00801,Smith-Waterman Score=81.
ctaagatttataaaagtaatcctcccaaaattgtcgcatagtgagcagaatacaaaaatggagcttaagttcccctacaagaccagaactgtcatgtagagcctaagggtaagactgtattggatattagggaccacaaagcgctttcatgtttccctcatttgattttcacagcaactgtgtggggagaatcatccccatttgagaactgagaacactcaggctcagcgagctggtgtcccgcttggtgtcagaatactctcaagaccaggctttccctgactgtcaacccattcttgcttctcttgtccgctagtgtgaccccccagccaagggcagccagggcctctttccctatggactttgtgttctgccattcaggcacctgcggaactcgagtcatgcaggagctcttgtgatcgtgacggaagaagccattggccaagggtatccggaggattgtggctgtcacaggtgccgaggcccagaaggtgagcaggtcaggctggtttgtggcttatctgaagaaggcaagaggagcccagtctgcgaatccatagagcaaacactgctctgcgtggctgctgcagtcagagtgaaagtacaggctgggccactccccctgccccagtgtcctacccctgagtggcagaagaaacctgccaccacacaagatcttctagctttcctatgtttagccttttagaatatatgtgatctcggccgcacctaattggctcacgtctcgcctacccagctcctttccgaacattcactcatcccttgtatatatatggtcc

SEQ ID NO: 8945 - DNA, 2031 bp, Homo sapiens
  SIMILAR (3)..(863): 561254mologous to Bos taurus pyruvate dehydrogenase phosphatase regulatory subunit precursor; PDPr,accession number AF026954,Smith-Waterman Score=731.
tcatgggcgagtctcctgcagtgtagggctactttgtcctggcaggaatgaactctgctggcctttcatttggtggaggagccggaaagtaccttgccgaatggatggtacatggttatccctcagaaaacgtttgggaattggacctgaaacgttttggagccctccagagcagccgcacctttctgcgccaccgggtcatggaagtcatgcctttgatgtatgatctgaaggttccccgctgggccttcaagaccgttagccagttacgcacctctcttctttacgaccggctggatgcacaggaagccaggtggatggagaaacatggatttgagaggccaaagtactttgttccccccgacaaggacctcctgggcattggagcagagcaagactttctataagccagattggtttgacatcgtgggagtctgaagtcaagtgctgtaagggaagctgtgtgtgtcattgacatgtcctcttttcacaaagtttgagataacatccactggggatccaggcattagaagttctacagtacctcttctcccaatgacctggatgtgcctgtgggccacattgtgcaatactggcatgctcaacgagggtggagggtatgaaaatgactgcagcatagcacgactgaacaagcgcagtttcttcatgatctctccaaccgaccagcaggtccacttgttgggcctggcttaagaaacacattgccgaaagacagcaacctgctcctggaggacgtcacctggaagtacacaggtacgggggttcgggctctctatggggatgtagagcatgaatcctggctctcctgtgtgcgtcatgctcatcacccggatcccatttgcatagcccacacttatctccatctcaggagttttagccaagctgatggtagagagtggaggaaagtccttgacaagcacaaaatattcctctttgccaggtccttgtgttagtcgagggtagcaggcacaatgaggacaaggcgagtgtcttctcaggctctgctgcagcacggggtagaggcgctggcagccctcgaggcccaggcgtacggcctccgcccagctctctgtcaggccgccctcgccgctgcccagcagcccggccacctgattcagcacaggcatgagcgccacggtgaggccggcggcggcgcgctcttcctcgagccgcgtggggtccaggagccaggtgggcgcgggccccggcgcgaggctgaggccgcagcccaccaccaggtcgtacatctccacgcccgcgtcggccagggcgagcgcggcggcggtgagcgcggcggccagggccgagccaccgtcctccagcagcagcgccgacacctcgagctgcgcgcgcgggtagcggcccaggcgcacagccggctccagcgcctcctgcagcgccagcgccagctcacgctcctcgcagccgcccgggggagcgcggcgccggcggcccgcgaagggtgcgcggcggaagtcgcagagcaggcgaccgcgcagcgcggccggggcctcgccgcctgctccggccgggccgccgccgcgctcgccgccctcggcctgtcgcgggcccgacacggcacacagcaccttggtgcctcccgcctccaggtaggccgagcccttggcctggctcagcagcccggcgcgcgcgtacacgggccgtagccgcgttgggtcgcgggtgccgggcgcctcctcctcgtcggccgcgtacagctgcggcggctgcgattcttcagggccgcggatgcggcggtgatccccaggcatggcggttctggcgtgcgaacccttcgcccaacgccttgcgatccactggtctgctcaccttctgggcctcggcacctgtgacagccacaatcctccggatacccttggcaatggcttcttccgtcacgatcacaaaagctcctgcatgactcgagttccgcaggtgcctgaatggcagaacacaaagtccatagtgaaagaggccctggcagcccttggctggggggtcacacttcat

SEQ ID NO: 8946 - DNA, 1875 bp, Homo sapiens; identical to SEQ ID NO: 7854
  SIMILAR (820)..(1872): 871254mologous to Homo sapiens putative p150,accession number U93565,Smith-Waterman Score=1668.

SEQ ID NO: 8947 - DNA, 2253 bp, Homo sapiens
  SIMILAR (1)..(1038): 871254mologous to Homo sapiens putative p150,accession number U93570,Smith-Waterman Score=1531.
atgggagactttaacaccccactgtcaacattagacagatcaacaggacagaaagttaacaaggatatccaggaattgaactcagctctgcaccaagcggacctgatagacatctacagaactctccaccccaaatcaacagaatatacattcttctcagcaccacacagcacctattccaaaattgaccacatagttggaagtaaagcactcctcggcaaatgtaaaagaacagaaattataacaaactgtctctcagaccacagtgcaatcaaactagaactcaggattaagaaactcactcaaaactgctcaactacatggaaactgaacaacctgctcctgaatgactactgggtacataacgaaatgaaggcagaaataaagatgttctttgaaaccaacgagaacaaagacacaacgtaccagaatctccgggacacatttaaagcagtgtgtagagggaaatttatagcactaaatgcccacaagcgaaagcaggaaagatctaaaattgacaccctaacatcacaattaaatgaactagagaagcaagagcaaacacattcaaaagctagcagaaggcaagaaataactaagatcagagcagaactgaaggagatagagacgcaaaaaacccttcaaaaaatcagtgaatctaggagctggttttttggaaagatcaacaaaattgatagaccactagcaagactaataaagaagaaaagagagaagaatcaaatagacgcaataagaaatgataaaggggatatcaccaccgatcccacagaaatacaaactaccatcagagaatactatcaacacctctacgcaaataaactagaaaatctagaagaaatggataaattcctcgacacatacaccctcccaagactaaaccaggaagaagttgaatctctgaatagaccaataacaggctctgaaattgaggcaataatagcttaccaaccaaaaaaagcccaggacgagacggattcacagccgaattctaccagagaaaaagagggaatcctccctaactcattttatgaggccagcatcatcctgataccaaagcctggcagagacacaagaaaaaaagagaattgtagaccaatatccctgatgaacgtcgatgcaaaaatcctcaataaaatactggcaaaccgaatccagcagcacatcaaaaagcttatccaccatgatcaagtgggctccatccctgggatgcaagactggttcaacagaataaaatacctaggaatccaacttacaagggatgtgaaggacctcttcaaggagaactacaaaccactgctcaacgaaataaaagaggacacaaacaaatggaagaacattccatgctcatggacaggaagaatcaatatcgtgaaaatggccatagtgcccaagaattggaaaaaagctactttaaagttcatatggaaccaaaaaagagcccgcatcaccaagtcaatcctaagccaaaagaacaaagctggaggcatcacgctacctgacttcaaactatactacaaggctacactaaccaaaacagcatggtactggtatcaacacagagatataaaccaatggaacagaacagagccctcagaaataataccacacatctacaaccatctgatctttgacaaacctgacaaaaacaagaaatggggaaagcattccctatttaataaatggtgctgggaaagctggctagacatatgtagaaagctgaaactggatcccttccttacaccttatacaaaaattaattcaagatggattaaagacttaaacgtaagacctaaaaccataaaaaccctagaagaaaacctaggcaataccattcaggacataggcatgggcaaggacttcatgtctaaaacaccaaaagcaatggcaacaaaagccaaaattgacaaatgggatctaattaaactaaagagcttctgcacagcaaaagaaactaccatcagagtgaacaggcaacctaaagaatgggagaacatttttgcaatctactcatctgacaaatggctaatatccagaatctacaaagaactcaaagaaacttacaagaaaaaaacaaacaaccccatcagaaagtgggcaaaggatatgaacagacacttctcaaaagaagacatttatgcagccaacagacacatgaaaaaaatgctcatcatcactggccatcagagaaatgcaaatcaaaaccacaatgagataccatctcacaccagttag

SEQ ID NO: 8948 - DNA, 1260 bp, Homo sapiens
  SIMILAR (307)..(777): 891254mologous to Homo sapiens putative p150,accession number U93563,Smith-Waterman Score=712.
atggggagaaaccacaatagaaaagctgaaaattctaaaaaccagaacccctcttatcctccaaaggattgcagctcctcgccagcaacggaacaaagctggatggagaatgactttcacaagttgacagaaatatgcttcagaagatcagtaataacaaacttctccaagctaaaggaggatgttcaaacccatcgcaaggaagctgaaaaccttgaaagaagattagaagaatggctaactggagtaaacagcatacagaagaccttaaatgacctgacagagctgaaaaacatggcacgagaactactgttagaagttctagccagggtaatcaggcaggagaaagaaataaagggtattcaattaagaaaagaggaagtcaaattgtccctgtttgcagatgacgtgactgtatatttagaaaaccccatcgtctcagcccaaaatctccttaagctgataagcaacttcagcaaagtctcaggatacaaaatcaatgtgcaaaaatcacaagcattcttatacaccaacaacagacaaacagagagccaaatcatgcatgacttcccattcacaattgcttcaaagagaataaaatacctaggaatccaacttacaagagatgtgaaggacctcttcaaggagaactacaaaccactgctcaacgaaataaaagaggacacaaacaaatggaagaacattccatgcccatggataggaagaatcaatatcgtgaaaatggccatactacccaagttccaaagtcgcttccacattttcaggtatcttttcaggaacaccccactctactggtaccaacttactgtattagtccgttttcatgctgctgataaagacatacccgagactgggaagaaaaacgggtttaattggacttacagtttcacatggctggggaggcctcaaaatcatcgcggcaggcaaaaggaacttcgtacatcgcggcagcaagagaaaatgagagacgaagcaaaagcggaaacccccgataaacgcatcagatctcgtgagacttattcactatcacgagaacagcaggggaaaggcagctgtcagaaatctaagtccagaagctcaaagagaggcaaaagctccctactccccaagacctgggctgcttgccatgatgaagtaaaggacccagcaaagaggaaggaggaggaggaggaggaagaggaggaggaggaggaggaagaggaggaggaggaggaggagagggaaaaaatcagggcataa

SEQ ID NO: 8949 - DNA, 1599 bp, Homo sapiens
  SIMILAR (754)..(1494): 891254mologous to Homo sapiens putative p150,accession number U93564,Smith-Waterman Score=1137.
atggagaatgaatttgataagttgagagaaaaaggcttcagacgatcagtaataacaaacttctctgagctaaaggacgaagttcgaactcatcgcaaagaagctaaaaaccttgaaaaaagattagatgaatggctaactaaaataaacagtgtagagacgtccttaaatgactggatggagctgaaaatcatggcacgagaactaaaggatgcatgcacaatcttcagtagccaatttgatcaagtggaagaaagggtatcagtgattgaagatcaaatgaatgaaatgaagcgagaagagaagtttagagaaaaaagagtaaaaagaaatgaacaaagcctccaagaaatatgggactatgtgaaaagaccaaatctacatttgattggtgtacatcaaagtgacggggagaatggaaccaagttggaaaacactctacaggatattatccaggagaacttccccaacctagcaaagcaagccaacattcaaattcaggaaacacagagaacaccacaaagttactcctcaagaagagcaactccaagacacataattgtcagattcaccaaagttgaaatgaaggaaaaaatgttaagactaaaccacgaagaacttgaatccctgaatagaccaataacaggttctgaaattcaggcaattattaatagcctaccaaccaaaaaaagtccagaatcagatggattcacagccaaattctaccagagccaatatcatactgaatgggcaaaaactggaagcattccctttgaaaaccggcacaaaacaggatgccctctctcaccactactattcaacatagtggtggatgttccggctagggcaatcaggcaggagaaagaaataaagggtattcaattaggaaaagaggaagccaaattgtccctgtttgcagatgacatgaatgtatatttaaaaatccccatcgtctcagtccaaaatctccttaagctgataagcaacttcagcaaagtctcaggatacaaaatcaatgtgcaaaaatcacaagcattcctatacactaataacagacaaacagagagccaaatcatgagtgaactcccattcacaattgcttcaaagagaataaaatacctaggaatccaacttacaagggatgtgaaggacctcttcaaggagaactacaaaccactgctcaacgaaataaaagaggacacaaacaaatggaagaacattccatgctcatggataggaagaatcaatatcatgaaaatggccatactgcccaaggtaatttatagattcaatgccatccccatcaagctaccaatgactttcttcacagaattggagaaaactgctttaaagttcatatggaaccaaaaaagagcctgcattgccaagacaatcctaagccaaaagaacaaagctggaggtatcacactacctgacttcaaactgtactacaaggctacagtagccaaaacagcatggtactggtaccaaaacagcatggtactggtaccaaaacagagatatagaccagtggaacagaatagagcccttggaaataataccatacacctacaaccatctgatcttcgaaaaacctga

SEQ ID NO: 8950 - DNA, 1587 bp, Homo sapiens
  SIMILAR (190)..(1584): 921254mologous to Homo sapiens putative p150,accession number U93563,Smith-Waterman Score=2261.
atgaacatcgacgcaaaaatcctcaataaaatactggcaaaccgaatccagcagtacatcaaaaagcttatccaccatgatcaagtgggcttcatccctgggataaccaatgacaaaaaccacatgattacctcagtagatggagaaaaggcctttgacaaaattcaacagcccttcatgctaaaaactctcaataaactagtgttggaagttctggccagggcaatcaggcaagagaaaggaataaagggtattcaattaggaaaagaggaagtcaaattgtccctgtttgcagatgacatgattgtatatttagaaaaccccatcgtctcagcccaaaatctccttaagctgataagcaacttcaacaaagtctcaggatacaaaatcaatgtgcaaaaatctcaagcattcgtatacaccaataacagacaaacagagagccaaatcatgagtgaactcccattcacaattgcttcaaagagaataaaatacctaggaatccaacttacaagggacgtgaaggacttctttaaggagaactacaaaccactgctcaacgaaataaaagaggacacaaacaaatggaagaaaattccatgctcatgggtaggaagaatcaatattgtgaaaatggccatactgcccaaggtaatttatagattcaatgccatccccatcaagctaccaatgactttcttcacaaaattggaaaaaactactttaaagttcatatggaaccaaaaaagagcccacattgccaagacaatcctaagccaaaagaacaaagctggaagcatcgcgctacctgacttcaaactatactggaaggccacagtaaccaaaacagcgtggtattggtaccaaaacagagatatagatcaatggaacagaatagagccctcagaaataataccacatatctacaaccatctgatctttgacaaacctgacaaaaacaagaaatggggaaaggattccctatttaataaatggtgctgggaaaactggctagccatatgtagaaagctgaaactggatcccttccttacaccttatacaaaaattaattcaagatggattaaagacttaaatgttagacctaaaaccataaaaaccctagaagaaaacctaggtaatactattcaggccatgggcatgggcaaggacttcatgactgaaacaccaaaagcaatggcaacaaaagccaaaattgacaaatgggatctaattaaactaaagagcttctgcacagcaaaagaaactaccatcagagtgaacaggcaacctacagaatgggagaaaatttttacaatctacccatctgacaaagggctaatatccagaatctacaatgaactcaaacaaattaacaagaaaaaatcaaacaatcccatcaataagtgggcaaaggatatgaacagacgcttctcaaaagaagacatttatgcagccaacagacacatgaaaaaatgctcatcatcactggccatcagagaaatgcaaatcaaaaccacaatgagataccatctcacaccagttagaatggcgatcattaaaaagtcaggaaacaacaggtgctggtga

SEQ ID NO: 8951 - DNA, 1464 bp, Homo sapiens
  SIMILAR (790)..(1449): 911254mologous to Homo sapiens unknown,accession number AF149422,Smith-Waterman Score=1098.
atgggagactttaacaccccactgtcaacattagacagatcaacgagacagaaagttaacaaggatatccaggaattgaactcagctctgtaccaagtggacctaatagacatctaccgaactctccagcctaaatcaacagaatatacattcttctcagcaccacatcgcacttattccaaaattgaccacatagttggaagtaaagcactcctcagcaaatgtaaaagaacagaaattataacaaactgtctctcagaccacagtgcaatcaaactagaactcaggatgaagaaactcactcaaaatcactcaactacatggaaactgaacaacctgctcctgaatgactactgggtacataacaaaatgaaggcagaaataaagatgttctttgaaaccaacgagaacaaagacacaacataccagaatctctgggacacatttaaagcaactgctagcaagactaataaagaagaaaagagagaagaatcaaatagatgcaataaaaatgctaaaggtgttatcaccaccgatcccacagaaatacaaactaccatcagagaataccataaacacctctatgcaaataaactagaaaatctagaagatacagataaattcctggacacatacaccctcccaagactaaaccaggaagaagttgaatctctgaatagaccaataacaggctctgaaattgaggcaataattaatagcttaccaaccaaaaaacgtccaggaccagatggattcacagccgaattctaccagaggtacaaggaggaacagagaataaaatatctaggaatccaacttacaagggatgtgaaggacctcttcaaggagaactacaaaccactgctcaacgaaataaaagaggacacaaacaaatggaagaacattccatgctcatggataggaagaatcaatatcatgaaaatggccatactgcccaaggtaatttatggattcaatgccatccccatcaagctaccaaggactttcttcacagaattggaaaaaattactttaaagttcatacggaaccaaaaaagagcccgcattgccaagacaatcctaagcaaaaagaacatagctggaggcatcatgctacctgacttcaaactatactacaaggctacagtaaccaaaacagcatggtactggttccaaaacagagatatagaccagtggaacagaacagaggcctcagaaataacaccacacatctacaaccatctgatttttgacaaacctgaaaaaaacaagaaatggggaaaggattccctatttaataaatggtgctgggaaaactggctagccatatgtagaaagctgaaactggatcccttccttataccttatacaaaaattaattcaagatggattaaagacttaaatgttagacctaaaaccataaaatccctagaagaaaacctaggaataccattcaggacatag

SEQ ID NO: 8952 - DNA, 996 bp, Homo sapiens
  SIMILAR (200)..(304): 801254mologous to Homo sapiens putative p150,accession number U93574,Smith-Waterman Score=135.
atgggagactttaacaccccactgtcaacattagacagatcaacaaaacagaaagttaacaaggatatccaggacttgaacccagctctgtaccaagcagacctaatagacatctacagaactctccaccccaagtcaacagaatatacattcttctcagcaccacatcgcacttgttccaaaattgaccacatagttggaaagaataaaatacctaggaatccaacttacaagggatgtgaaggacctcttcaagcagaactacaaaccactgctcaaaaaataaaagaggacacaaacaaatggaagaacattccatgctcatggacaggaagaatcaatatcgtgaaaatggccatactgcccaaggtaatttatagatccagtgccatccccatcaagctaccaatgactgtcttcacagaattggaaaaaagtactttaaagttcatatggaaccaaaaaagagcccacattgccaagacaatcctaagccaaaagaacaaaactggaggcatcatgctacttgacttcaaactatactacaaggctacagtaaccaaaacagcatggtactggtaccaaaacagagacatagaccaatggaacagaacagagccctcagaaataataccacacatctgcaaccatctgatctttgacaaacctgacaaaaacaggaaatggggaaaggattccctatttaataaatggtgccgggaaaactggctagccatatgtagaaagctgaaactggatcccttccttacaccttatacaaaaattaattcaagatggattaaagacttaaatgttagatctaaaaccataaaaaccatagaagaaaacctaggcaataccattcaggacatagtcatgggcaaggacttcatggctaaaacaccgaaaacaatggcaacagaagccaaaatagacaaatgggatctaattaaactaagagcttctgcacagcaaaagaaactaccatcagagtga

SEQ ID NO: 8953 - DNA, 1188 bp, Homo sapiens
  SIMILAR (1)..(1122): 901254mologous to Homo sapiens putative p150,accession number U93563,Smith-Waterman Score=1838.
atgagtgaactcccattcacaattgcttcaaagagaataaaatacctaggaatccaacttacaacggatgtgaaggacctcttcaaggagaactacaaaccactgctcaacaaaataaaagaggacacaaacaaatggaagaatattccatgctcatggataggaagaatgaatatcgtgaaaatggccatactgcccaaggtaatttatagattcaatgctatccccatcaagctaccaatgactttcttcacagaattggaaaaaactactttaaagttcatatggaaccaaagaagagcctgcattgccaagacaatcctaagccaaaagaacaaagctggaggcatcaagctacctgacttcaaactgtactacaaagctacaataaccaaaacagcatggtactggtaccaaaacagagatacagaccaatggaacgaaacagagccctcaggtataacgccacacatccacaaccatctgatctttgacaaacctgagaaaaacaagcaatggggaaaggattccctatttaataaatggtgctgggaaaactggctagccatatgtagaaagctgaaactggaccccttccttacaccttatacaaaaattaattcaagatggattaaagacttaagtgttagacctaaaaccataaaaaccctagaagaaaacctaggcaataccattcaggacataggcatggccaaggacttcatgtctaaaacaccaaaagcaatggcaacaaaagctaaaattgacaaatgggatctaattaaactaaagagcttctgcacagcaaaagaaactaccatcagagtgaacagacaacctacagaatgggagaaaatttttgcaatctacccatctgacaaagggctaatatccagaatctacaaggaacttaaatttacaagaaaaaaatcaaacaacctcatcaaaaagtggatgaaggatgtgaacagacacttctcaaaggaagacatttatgcagccaacagacacatgaaaaaatgctcatcctcactggccatcagagaaatgcaaatcaaaaccacaatgagataccatctcacaccagttagaatggcagtcattaaaaagtcaggaaacaacagcactattcacaatagcaaagacttggaaacaacccagatgtccagcaatgatagactggattaa

SEQ ID NO: 8954 - DNA, 1085 bp, Homo sapiens
  SIMILAR (1)..(249): 721254mologous to Homo sapiens putative p150,accession number U93565,Smith-Waterman Score=286.
agaataaaatacctaggaatccaacttacaagggatgtgaaggacctcttcaaggagaactacaaactactgctcaacaaaataaaagaggacacaaacaaatggaagaacattccatgctcatgggtaggaagaatcaacatcgtgaaaatggccatactgcccaagccatatggaaaaagctgaaactggatcccttccttacaccttatacaaaaattcattcaagatggatcaaagacttcaatgttagacctaaaaccataaaaaccctagaagaaaacctaggcaataccattcaggacgtaggcctgggcaaggacttcatatctaaaacaccaaaagcaatggcaacaaaagccaaaactgacaaatgggatctcattaaactaaagagcttctgcacagcaaaagaaactaccatcagagtgaacaggcaacctacaaaatgggagaaaatttttgcaatctactcgtctgacaaagggctaatatccagaatctacaaagaactcaaacaaacttacaaggaaaaaacaaacaacctcatcaaaaagtgggtgaaggatatgaacagacacttctcaaaagaagacttttatgcagccaaaagggacatgaaaaaatgctcatcatcactggccatcagagaaatgcaaatcaaaactacaacgagataccatctcacagcagttagaatggccatcattaaaaagtcaggaaacaacaggtactggagaggatgtggagaaataggaacacttttacactgttggtgggactgtaaactagtacaatcattgtggaagacagtgtggcgattcctcagggatctagaactagaaataccatttgacccagcaatcccattactgggtatatacccaaaggattgtaaatcatgctgctataaagacacatgcacacgtatatttattgtggcactattcacaatagcaaagacttggaaccaagccaaatgtccaacaatgatagactggattaaggaaatgtggcacatacacaccatggaatactatgcagccataaaaaaggatgagttcatgtcctttgtagggacatag

SEQ ID NO: 8955 - DNA, 1321 bp, Homo sapiens
  SIMILAR (2)..(1276): 831254mologous to Homo sapiens putative p150,accession number U93572,Smith-Waterman Score=1786.
actaaaccaggaagacattgaatccctgaacagaccaataacaggttctgaaattgaggcaataattaatagcctaccaaccaaaaaaagtccaggaccagatggattcacagccgatttctaccagaggtacaaacaggagctagtaccattccttctgaaactattccaatcaatagaaaaagagggaatcctccctaattcatttgatgaggccagcatcatcctgataccaaagcctggcagagacacaacaaaaaaagagaattttagaccaatatccctgatgaacattgatgcaaaaattctggcaaaccaaatccagcagcagatcaaaaagtttatccaccacgatcaagttggcttcatccctgggatgcaaggctggttcaacatacacaaatcaataaatgtaatccagcatataaacagaaccaaagacaaaaaccacacgattatctcaacagatgcagaaaaggccttcgacaaaattcaacagcccttcatgctaaaaactctgaataaactaggtattgatgggacgtatctcaaaataataagagctatttatgatgaacccacagccaatatcatactgaatgggcaaaaactggaagcattccctttgaaaactggcacaagacagggatgtcctctctcaccactcctattcaacatagtattggaagttctggccagggcaatcaagcaggataaagaaatacaggatattcagttaggaaaagaagtcaaattgtccctatttgcagatgtcatgattgtatatttagaaaactccatcgtctcagtccaaaatctccttaagctgataagtaacttcagcgaagtctcaggatacaaaatcaatgtgcaaaaatcacaagcattcctctacaccaataaaagacaaagagagagccaaatcatgagtgaactcccattcacaattgcttcaaagagaataaaatacctaggaatccaacttacaagggatgtgaaggacctcttcaaggagaactacaaaccactgctcaatgaaataaaagaggacacaaacaaatggaagaacattccatgctcatggattggaagaatcaatatcgtgaaaatggccatactgcccaagataatttatgcagccaaaaaacacatgaaaaaatgctcatcatcactggccatcagagaaatgcaaatcaaaaccacaatgagataccatctcacaccagttagaatggcgatcattaaaaagtcaggaaacaacagaagtacccgtggcctgctcagctgtgactctgctgacctcaggacctcactggtcaag

SEQ ID NO: 8956 - DNA, 1759 bp, Homo sapiens
  SIMILAR (704)..(1756): 871254mologous to Homo sapiens putative p150,accession number U93563,Smith-Waterman Score=1679.
aaccaatgacaaaaaccacatgactatctcaatagatgcagaaaaggccttcaacaaaattcaacagccattcatgctaaaaactctcaataaactaggtattgatgtgacatatctcaaaataataagagatatttatggcaaacccacagccaatatcatactgaatgggcaaaaactgggagcattccctttgaaaactggcacaagacagggatgccctctcccaccactcctattcaatgtagtgttggaagttctggccagggcaatcaggcaggagaaagaaatgaagaatattcaattagaaaaagaggaagtcaaattgtccctgtttgcagatgacatgattgtatatttagaaaaccccatcatcttagccccaaatctccttaagctgataagcaacttcagcaaagtctcaggatacaaaacccatgtgcaaaaatcacaagcattcttatacaccaataacagacaaacagagagccaaatcacgagtgaactcccattcgcaattgcttcaaagagaataaaatacctaggaatccaacttacaagggatgtgaaggacctcttcaaggagaactacaaaccacagctcaacgaaataaaagaggacacaaacaaatggaagaacattccatgctcatggataggaagaatcaatattgtgaaaatggccatattgcccaagaattggaaaaaaactactttaaagttcatatgggaccaaaaaagagcctgcattgccaagactatcctaagcaaaaagaacaaagctggaggcatcacactacgtgacttcaaactatactacaaggctacagtaaccaaaacagcatggtactggtaccaaaacagagatatagaccaatggaacagaatagagccctcaaaaattataccacacatctacaaccatctgatctttgacaaatctgataaaaacaagcaatggggaaaggattccctatttaataaatggttctgggaaaactggctagccatatgtagaaagctgaaactggatcccttccttacaccttatacaaaaattaattcaagatggattaaaaaagtaaatgttagacctaaaaccataaaaaccctagaagaaaacctaggcaataccaatcaggccacaggcatgggcaaggacttcatgactaaaacaccaaaagcaatggcaacaaaagccaaaattgacaaatgggatctaattaaactaaagaacttctgcacagcaaaagaaactaccatcagagtcaacaggcacactacagaatgggagaaaatttttgcaatctactcatctgacaaagggctaatatccagaatctacaatgaactcaaacgaatttacaagaaaacaaacaaccccatcagaaagtgggtgaaggatacgaacagacatttctcaaaagaagacatttatgcagccaaaagacacatgaaaaaatattcatcatcactggccatcagagaaatgcaaatcaaaaccacaatgagataccatctcacaccagttagaatggcgatcattcaaaagtcaggaaacaacaggtgctggagaggatgtggagaaatagaaatgcttttacactgttggagggaccgtaaactagttcaactattgtggaagacagtgtggcgattcctcaaggatctagaactagaaataccatttgacccagccatcccattactggacatatacccaaaggactataaatcatgctgctataaagacacatga

SEQ ID NO: 8957 - DNA, 1011 bp, Homo sapiens
  SIMILAR (337)..(996): 911254mologous to Homo sapiens putative p150,accession number U93563,Smith-Waterman Score=1096.
actgctagcaagactaataaagaagaaaagagagaagaatcaaatagatgcaataaaaatgctaaaggtgttatcaccaccgatcccacagaaatacaaactaccatcagagaataccataaacacctctatgcaaataaactagaaaatctagaagatacagataaattcctggacacatacaccctcccaagactaaaccaggaagaagttgaatctctgaatagaccaataacaggctctgaaattgaggcaataattaatagcttaccaaccaaaaaacgtccaggaccagatggattcacagccgaattctaccagaggtacaaggaggaacagagaataaaatatctaggaatccaacttacaagggatgtgaaggacctcttcaaggagaactacaaaccactgctcaacgaaataaaagaggacacaaacaaatggaagaacattccatgctcatggataggaagaatcaatatcatgaaaatggccatactgcccaaggtaatttatggattcaatgccatccccatcaagctaccaaggactttcttcacagaattggaaaaaattactttaaagttcatacggaaccaaaaaagagcccgcattgccaagacaatcctaagcaaaaagaacatagctggaggcatcatgctacctgacttcaaactatactacaaggctacagtaaccaaaacagcatggtactggttccaaaacagagatatagaccagtggaacagaacagaggcctcagaaataacaccacacatctacaaccatctgatttttgacaaacctgaaaaaaacaagaaatggggaaaggattccctatttaataaatggtgctgggaaaactggctagccatatgtagaaagctgaaactggatcccttccttataccttatacaaaaattaattcaagatggattaaagacttaaatgttagacctaaaaccataaaatccctagaagaaaacctaggaataccattcaggacatag

SEQ ID NO: 8958 - DNA, 1314 bp, Homo sapiens; identical to SEQ ID NO: 7328
  SIMILAR (505)..(1227): 911254mologous to Homo sapiens putative p150,accession number U93572,Smith-Waterman Score=1131.

SEQ ID NO: 8959 - DNA, 1155 bp, Homo sapiens; identical to SEQ ID NO: 4229
  SIMILAR (367)..(1152): 901254mologous to Homo sapiens putative p150,accession number U93563,Smith-Waterman Score=1230.

SEQ ID NO: 8960 - DNA, 5286 bp, Homo sapiens
  SIMILAR (49)..(312): 861254mologous to Homo sapiens line-1 reverse transcriptase,accession number U83303,Smith-Waterman Score=377.
atgccctctctcaccactcctattcaacatagtgttggaagttcgggcagggcaatcaggcaggagaaagaaataaagggtattcaattaggaagagaggaagtcaaattgtctctgtttgcagacgacatgattgtatatttagaaaaccccatcatctcagcccaaaatctccttaagctgataagcaacttcagcaaagtctcaagatacaaaatcaatgtgcaaaaatcacaagcattcctatacaccaataacagacaaacagagagccaaatcatgagtgaactcccattcacaattgctacagagaataaaatatctaggaatccaacttacaagggatgtgaaggacctcttcaaggagaactacaaaccactgctcaacaaaataaaagaggacacaaacaaatggaagaacattccatgctcatgggtaggaagaatcaatattgtgaaaatggccacactgcccaagatgacttggatagcaaattggctcaggaacagtctgcaagctcagtgaataccagaacacccctcaactatggatcaagaacacagttcggtcacttttattccagtggtaacagacatggtaatatcacagaaaggcacaaaaaacactataatgaaacttccaatatgtctatctatgacatcctaagaccaggaactcctagggaaggttttaaaaccttttctcctaggacaagcacaatttatgatatgtataggacaagggagcccagagtctttaaagaagattatgtgcaaaagaatacttttggcagtacttcgctgtgttttgacagcaggcaacggtcggccttaccagccacagggcatttcacagcaagaagcttacattttccagccacaactcagagcaagagtgggtttataccaccaaggcaccagcagagtccaaagagaactcctttatcatccatcatatggaacagatcagattcctctagagacagggagaaccaggaagagttcctgagggcaccatcaccaatggaaattgatcccgctgacaagtatgtgtatcccaggggttttcaggagaataagagatatgaatcgtaccattcacagaatgtttaccaacgtgttagtttaaatgctcccatggagaatgcaatgagtcccgacacttttgagaactcagagaacatgccattctaccatcaaagcaacacatttaccagatctttcttcagcaatacctttggacgaagcggagaacagaggagatttggacaaggtcctttttggggccaagagaaaggacattctttctggtctgactttcatcgaagcaggaaatcattcagttcttctgacagagactttgaaatgatttccatggaagcaaatagtgtatcagccattcatggccataatgtttcttctgaacactgggaatcattttcttctggttatggaacagatgtttccagaggccaagaagagccacatccttggcagtttgattttcagagatccacactggatagcatggtggtatcacatggtaatgagacccagttgactcctcattttggcacaccaaatgtttgctccatgactggttcaagctatcacgtcaaatctagtgagttggtaagtcaacaggacagttctcctgtagaagtacatataaacaaagaagcttcctcatttggaattgctcagactctagcatcctcattcaaaacttccttttcccagatttctgatgacagaaggaatcctcagagtcccaacttgcagaatcccacagtcactttgcagaaaatttttccaaataagcctgcctctcatccaatgagaagccatacagaagtcactgtgaccagcagcaattcagttgactctctgcctcttgccaaaagccagcccaatatcttggtcacagaagtaaataatgagaaagacttaaatgaatctatttcagaagaagacaaacagctaagcaagatggaccagacaaacaaggcagatctgtcatcagctgcactaccagattcctcaccatcaaagaattcttcccttgatgctcctgtggttccatctactacagtgttctccaggagaagtccttcagacaaagatccatcgctaggagaaagagaagaaaaagacaatgctgggaagaaccaaaagaatcagtttattgtaagccactcagaaaaccaagagagaaatgatagtcctgtgcctacacatgatgaagtggttgatgtcaaatgccattcacactctccttttaggaatgaaagaggaaaaggaaaaataaggcatcatatatcctgtattgaaaagttaagcaaaacagaaagtatatcagtacccaccagtgatcacaggagcctcattgaagcaaatcaaagcaattccaaagtttctgaacttgacacaatttattgtaccttgccaagaaaatcaagcagttttctcatacatggcaggcagtcaggaagtaaaataatggctgcttcattgaggaatgggccacctcccttccaaatcaaaaataatgtggaagatgcaatggggaactatatgttaaacaaatttagtcccagttctcctgagtcagcgaatgaatgttccaaagtcctttcagactcagccctggaagcacctgaagccacagagagaatgacaaatgtaaaaagcagtggatctacttccgttagaaaaggaccacttccattcctcatcaacagggctatgtcatgtccctcaggggagccacatgcctcaactggaagagaaggaagaaaaaagccattgacctcaggcatggatgcttctgagctaacaccaagggcttgggagagaatcattagccctgtggaaagtgactcatctgttagagattgttctttaaccaaaagacaacaccaaaaggaaaacttccaagaatacactgagaaagaggacttgtcaggaaaagaacgtgggaaaacattacataaagttaagacgactagtacgttttctgtttctggtgatgaagataatgtaaaatgtctggaggtggtctcaatatattacactctaccgaggaaacccagcaaaaaattctgtaacctccttcaacagtatacacaaaatactaatttacttatagaatcacctcaagtggagactgaaacatttcctaacgctttagaaaaagacaaacagaattattctacacgagagcagtcaggaacaccttcatgtgaaaatctaaagatgtccgtcaactctgatcagacgctcaccactgaaaatatgactgccttccgattatcaaatagggggcccctagctcctacattacaggaaatggcttctgttgaggcagctgtttctcttcctgaagaggaatctaaagctagagagattttttcagataatttagctaaaacacctctaggtgattcagaaaacaagaaggaaagaggcaaaaagttgcaaagtgaaaccctgcatacttcattgatgcttcagagaaaaaatgtatccgaagaaaaatctgaaaattgtcaacaatccattaattcaagtaacagtggtccctctagtcttccagctctttcagaagttaatattggaaattcccaaactagaagaagttcttgggagtgtacagggagtggtagagccattccatttactggaagtggcaagtgtccccagaaagatcacacatccacagctgtaggtgatggctccagtggatcacagcctagggaaggcagaggggacattggaaccaactgccaaaaaatgactaataaaacactttctcactcagagagtcaagtctttgcccttactccagcattgcataaactacagcttggtgaggagactcagtcagatgaaccaaacttagagagtctgcagtctgaaccaagagaattacctcaaagaagtcaggaggcaaatatgacagagagcaggaaggctgaagatgaaatgcagaagtcagcttgggatcaaccttcacttcctgaaggaaacaaaaataaaaccaacttggatgacctagtaaagggggaaaatagatcttcagttaaacacagattggcagccatgtctaaagccagcagaaaattcccagctaaagatgtaagccccagaagacatgtagctactatcttcccccaaagtggaagcagatctggctttgaccatttatctcttggcacagtggagtgcaacccactgttccctgagcctactccaaaatctgcagagtccattggcgaaagcaggttgagtgagaacggaaagcatgtgaagaaatccgagaaccttctccccattactgtactacccaacagagaaccttctacacacgtcagcaaccagaagtctaacagcatttcacaacgacatcagaatgagtttaaaaacgtctcagaatcaccatcaaagcatgagaattctaaagacgtcacagcagctcagaatttagtaagagaatcaggagccccatcacccatcacattcaccagcctcagggaagcagaattctctgacaatcagaggaggctgagccctccttttccactggagcctgcacagaaatctagagtaagcagtccactggccagttttctgcagcaacaaaggagtgcttcatctctggagtgggaacctgagccacacctctatcgttcaaagagtttaaaaagcattaatgttcatggcgatctactacgaaaaagccatcctccaaaagtcagggagcgccatttttctgaaagcacttctattgacaatgccctgagtcgactgacccttgggaatgaattctctgtcaacaatgggtacagtcgaagattcagatctttttctgaactcccctcctgtgatggaaatgaaagttgggcttatcgcagcgggacaaaaacaggtcccaggtctgcaatatctatatacagacctatcgactatgggatctttgggaaagaacaacagttagctttcttagaaaatgtaaagaggtcacttacacaaggaagattatggaaaccaagttttcttaagaaccctggcttcctaaaagatgatttgaggaaccctcccaacccctcagagtcattaagctcaaattctcccagtagtcaggtgccagaagatggcttatctccaagtttattcacccctggagctgactctagcaggcatgaactaagagaaccccatgcctcctcagcctctcctggggcccacatcttctccacgggacacagtcatactgtggttgcttga

SEQ ID NO: 8961 - DNA, 1626 bp, Homo sapiens
  SIMILAR (712)..(1617): 921254mologous to Homo sapiens putative p150,accession number U93570,Smith-Waterman Score=1492.
atgggagactttaacatcccactggcaacattagacagatcaacaagacagaaagttaacaaggatatccaggaattgaactcagctctgcaccaagcagacctaatagacatctatagaactctccaccccaaatcaacagaatatacattcttctcagcatcacatcacacttattctaaaattgaccgcatagttggaagtaaaacactccttagcaaatgtaaaagaacagaagtgttaacaaactgtctcttagaccacagtgcaatcaaactagaactcaggattcagaaactcactcaaaaccgctcaactacatggaaactgaacaacctgctcctgaatgactactggaagttggtttttgaaaagatcaacaaaactgataggccactagcaagaccaataaagaagaaaagagagaagaatcaaatagatgcaataaaaaatgataaaggggatatcaccaccaatcccacagaaatacaaactacgaacagagaatactacaaacacctctatgcaaataaactagaaaatctagaagaaatgcataaattcctggacacatacaccagcccaagactaaaccaagaagaagttgaatccctgaatagatcaataacaggctctgaaattgaggcaataattaagagcctaacaaccaaaaaaagtccagaaccagacggattcacagccgaattctaccagagaataaaatacctaggaatccaacttacaagggatgtgaaggacctcttcaaggagaactacaaaccactgctcaacgaaataaaagaggacacaaacaaatggaagaacattccatgctcatggataggaagaatcaatatcgtgaaaatggccatattgcccaaggtaatttatagattcaatgccatccccatcaagctaccaatgactttcttcacagaattggaaaaaactactttaaagttcatatggaaccaaaaaagagcctgcattgccaagacaatgctaagcataaagaacaaagttagaggcatcacactacctgacttcaagctatactacaaggctacagtaaccaaaacagcatggtactggtaccaaaacagagatatagatcaagggaacagaacagagccctcggaaataataccacacttctacaaccatctgatctttgacaaacctgacaaaaacaagaaatggggaaaggattccttatttaataaatgctgctgggaaaactggctagccatatgtagaaagctgaaactggatcccttccttacaccttatacaaaaattaattcaagatggattaaagacttaaatgttagacctaaaaccataaaaaccctagaagaaaacctaggcaataccattcaggacataggcatgggcaaggacttcatgtctaaaacaccaaaagcaatggcaacaaaagccaaaattgacaaatcggatctcattaaactaaagagcttctgcacagcaaaagaaactaccatcagggtgaacaggcaacctacagaatgggagaaaatttttgcaatctactcatctgacaaagggctaatatgcagaatctacaatgaactcaaacaaatttacaagaaaaaaacaaccccatga

SEQ ID NO: 8962 - DNA, 2364 bp, Homo sapiens; identical to SEQ ID NO: 5444
  SIMILAR (331)..(1839): 951254mologous to Homo sapiens putative p150,accession number U93572,Smith-Waterman Score=2497.

SEQ ID NO: 8963 - DNA, 1140 bp, Homo sapiens
  SIMILAR (199)..(1050): 891254mologous to Homo sapiens putative p150,accession number U93564,Smith-Waterman Score=1375.
atgagtgaactcccattcacaattgcttcaaagagaataaaatacctaggaatccaacttacaagggatgtgaaggacctcttcaaggagaactacaaactactgctcaacaaaataaaagaggacacaaacaaatggaagaacattccatgctcatgggtaggaagaatcaacatcgtgaaaatggccatactgcccaagttcatatggaaccaaaaaagagcccgcattgccaagacaatattaagcaaaaagaacaaagctggaggcatcacgctacctgacttcaaactatactacaagtctacagtaaccaaaacagcatggtactggtaccaaaacagagatatagaccaatggaacagaacagagcgctcagaaataataccacacatctacaaccagctgatctttgacaaacctgacaaaaacaagaaatggggaaaggattccctatttaataaatggtgctgggaaaactggttagccatatggaaaaagctgaaactggatcccttccttacaccttatacaaaaattcattcaagatggatcaaagacttcaatgttagacctaaaaccataaaaaccctagaagaaaacctaggcaataccattcaggacgtaggcctgggcaaggacttcatatctaaaacaccaaaagcaatggcaacaaaagccaaaactgacaaatgggatctcattaaactaaagagcttctgcacagcaaaagaaactaccatcagagtgaacaggcaacctacaaaatgggagaaaatttttgcaatctactcgtctgacaaagggctaatatccagaatctacaaagaactcaaacaaacttacaaggaaaaaacaaacaacctcatcaaaaagtgggtgaaggatatgaacagacacttctcaaaagaagacttttatgcagccaaaagggacatgaaaaaatgctcatcatcactggccatcagagaaatgcaaatcaaaactacaacgagataccatctcacagcagttagaatggccatcattaaaaagtcaggaaacaacagaaaacctacactggatcgagcagttggtcatgaaaaaaatggtgatgatgacagcaataacaattacagccatacatcagagatattgcag

SEQ ID NO: 8964 - DNA, 2115 bp, Homo sapiens
  SIMILAR (712)..(1584): 801254mologous to Homo sapiens putative p150,accession number U93563,Smith-Waterman Score=1148.
atgccttatggatctgtattggcattccttcccgctgatgaaattctaggagcttttagtaaattaaagctgcatttgcatgaagaagccagagaaattactgactggtttgaagataatgacgtgcatggtcggataagaagacatgccctggagttgctgtttgaccatcagtattgtttccaccaaatttgtgatctgcatataagtactgctcacatgatagaggctgatgtccttcttccaagtgatggatcagaacacagccagccaattatggcccatccccctgaaacaaacagtgataatactctacaggagtggctgactgaagttatgaaaagcaataaaggcatcaagctggatttcaaaagtctggcagttgtagaaccatccatgatgctcttggaaaatgtgaagaggcatctgaagcgtcctgtatggattaatgccgatattcttcctggtccaaatggaaatagcaaagtaatagatgcaaaaccatttttagacaccgtgatatccttctttccagacgtgacgttttccctgggttggacaacaggatggcatcctgagaaagtcaatgaagggtacagttggacaatggtgaaagagatggaatatatatgtaatgaactaagtcagcctgtaacgttccctgtcagagcagcattagtcaggcagtcttgttctcagttactttggctgttaaagaaatcaaacaggattaagaaactcactcaaaaccgctcaactacatggaaactgaacaacctgctcctgagtgactactgggtacataacgaaatgaaggcagaaataaagatgttctttgaaaccaacaagaacaaagacacaacataccagaatctctgggacacatttaaagcagtgtgtagagggaaatttatagcactaaatgcccacaagagaaagcaggaaagatctaaaattggcaccctaacatcacaattaaaagaactagagaagcaagagcaaacccattcaaaagctagcagaaggcaagaaataactaagatcagagcagaactgaaggagatagagacacaaaaaacccttcaaaaaagcaatgaatccaggagctggttttttgaaaagatcaacaaaattgatagaccgctagcaagactaataaagaagaaaagagagaagaatcaaatagacgcaataaaaaatgataaagcggatatcaccactgatcccacagaaatacaaattaccatcagagaatactataaacacctctacgcaaataaacgagaaaatctagaagaaatggataaattcctggacacatataccctcccaagactaaaccaggaagaagttgaatctccgaatagaccaataacaggctctgaaattgagggaataattaatagcccaccaaccaaaaaaagtccaggacgagacggattcacagctgaatctaccagagtgttggaagttctggccagggcaatcaggcaggagaaggaaataaagggtattcaattaggaaaagaggaagtcaaattgtccctgtttgcagatgacatgattgtatatttagaaaaccctattgtctcagcccaaaatctccttaagctgataagcaacttcagcaaagtctcaagatacaaaatcaatgtgccaaaatcacaagcgttcctatacaccaataacaggcaaacagagagccaaatcatgagtgaacttccattcacaattgcttcaaagagaataaaatacctaggaatccagcttacaaaggatgtgaaggacctcttcaaggagaactacaaaccactgctcaacgaaataaaagaggacacaaacaaatggaagaacattccatgctcatggataggaagaatcaataccgtgaaaatggccatactgcccaaggtaatttatatgttcaatgccatcaccatcaagctaccaatgactttcttcacagaattggaaaaaactactttaaaattcatatggaaccaaaaaagagcccgcattgccaagacaatcttaagccaaaagagcaaagctggaggcatcatgctacctgacttcaaactatacgacaaggctgcagtaaccaaaacagcatag

SEQ ID NO: 8965 - DNA, 1065 bp, Homo sapiens
  SIMILAR (671)..(850): 951254mologous to Homo sapiens unknown protein,accession number M22333,Smith-Waterman Score=301.
atgggagactttaacaccccactgtcaacattagacagatcaatgagacagaaagttaacaaggatatccaggaattgaactcagctctgcaccaagtggacctaatagacatctacagaactctccaccccaaatcaacagaatatacattcttctcagcaccacactgcacttattccaaaattgaccacatagttggaagtaaagcactcctcagcaaatgtaaaagaatagaaattataacaaactgtctctcagaccacagtgcaatcaaactagaactcaggattaagaaactcactcaaaaccgctcaactacatggaaactgaacaacctgctcctgaatgactactgggtacataacgaaacgaaggcagaaataaagatgttctttgaaaccaacgagaacaaagacacaacattttctctgggacacatacaaagcaaaataccaactaccatcagagaatgctataaacacctctatgcaaataaactagaaaatctagaaggaatggataaattcctcgacacatacacccacccaagactaaaccaggaagaagctgaatctctgaatagaccaataacaggctctgaaattgaggcaataattaatagcttaccaaccaaaaaaaaaatccaggaccagatggattcacagccaaattctaccagagagaataaaatacctaggaatccaacttacaagggatgtgaaggacctcttcaaggagaactacaaaccactgctcaaggaaataaaagaggacacaaacaaatggaagaacattccatgctcatgggtaggaagaatcaatatcgtgaaaatggccatactgcccaagacacactggggtggcggggtgggtcccaaggcttcaggggacccgacctccatgtctttgccggatgcagcccatgctgcagctttcacaggttggagttcagtgcctgtggctctctcgagctagagttgcacgttggtgattctacaggtctggagtgttgggagcagcccagccctacagttctcttgggcatgacccaagtggaactgtga

SEQ ID NO: 8966 - DNA, 1419 bp, Homo sapiens
  SIMILAR (517)..(1416): 921254mologous to Homo sapiens putative p150,accession number U93564,Smith-Waterman Score=1398.
atgaagatgttctttgaaaccaatgagaacaaagacacaatgtaccagaatctctgggacaccattaaagcagtgtgtagagggaaatgtatagcactaaatgcccacaagagaaagcaggaaagatctaaaatcgacaccctaacatcacaattaaaagaactagagaagcaagagcaaacacattcaaaagctaacagaaggcaagaaataactaagatcagagcagaactgaaggaaatagagacacaaaaaccctttcaaaaaatcaatgaatccagagctgaaatacaaactaccatcagagaatactataaacacctctacacaaataaactagaaaatctagaagaaatggataaattcctggatgcatacaccctcccaagacgaaaccaggaagaaggtgaatccctgaagagaccaataacaggctctgaaattgaggcaataattaatagcctgccaaccaaaaaaagtccaggaccagacatattcacagccaaattctaccagagaaccaaagacaaaaaccacatgattatctcaatagatgcagaaaaggccttcgacaaaattcaacagcccttcatgctaaaaactttcaataagctaggtattgatggaatgtatcttaaaataatgagagctatttatgacaaacccacagccaatatcatactgaatgggcaaaaactggaagcattccctttgaaaactggcacaagacagggatgccctctctcaccactcctattcaacatagttttggaagttctggccaggacaatcaggcaagagaaagaaagaaagtgtattcaattaggaaaagaggaagtcaaattgttcctgtttgcagatgacatgattgtatatttagaaaaccccattgtctcagctcaaaatctcctgaagctgataagcaacttcaacaaagtctcaggatacaaaatcaatgtgcaaaaatcacaagcattcttatacaccaataacagacaaacagagagccaaatcatgagtgaactcccattcacaattgctacaaagagaataaaatacctaggaatccaacttacaagggatgtgaaggacctctttaaggagaactacaaaccactgctcaacaaaataaaagagaacacaaacaaatggaagaacattctatgctcatggataggaagaatcaatatcatgaaaatggccatactgcccaaggtaatttatagattcagtgccatcctcatcaagctaccaatgactttcttcacagaattggaaaaaactactttaaagttcatatggaaccaaaaaggagcccgcattgccaagtcaatcctaagccaaaagaacaaagctggaggcatcatgctacctgacttgaaactatactacaaggctgcagtaaccaaaacagcatga

SEQ ID NO: 8967 - DNA, 1893 bp, Homo sapiens
  SIMILAR (1499)..(1669): 961254mologous to Homo sapiens putative p150,accession number U93567,Smith-Waterman Score=294.
atgccgatggtagaggagctttacggcaactatggcatcatggccgataccacggagcgagtgggccagcataaagatgcctatcaagtgatactggatggtgtgaaaggtggtactaaggaaaaacgattagcagctcaatttattctgaaattctttaagcattttacagaattggctgattctgctatcaatgcacacttacagacagtaagtggaagacagcaacttgtaaagttggtggctgaacaggccgacctagaacagaccttcaatccctcagatcctgagtgtgtgggcaggctcttacagtgcactcagcaggcagtacccttcttctctaaaactgtccattccacaaggtctgtgacatatttctgtgagcaggttctccctaaccttggtatcttgactaccgcagtggaaggtcttgacatacagttggaggtattgaaattgttggtggagatgagttcattttgtggtgacatggaaaaactagaaacaaatttagggaaactatttgataagttattggaatacatgcccctccctccagaagaagcagaaaatggagggaatgctggtgatgaagaacccaaactacagttcagttatgtggaatgtttgttgtacagttttcaccagttgggccaaaaacttccagatttcttaacagccaaactgaatgcagaaaaactcaaagatttcaaaatcaggctgcaatactttgcacgaggcctgcaagtttatatcagacaacttcacttagctctccaggtgaaacagtgttttgcccaatatatggagaaggaaaatgggattgatgcaaaaatcctcaataaaatactggcaaaccgaatccagcagcacatcaaaaagcttatccaccatgatcaagtgggcttcatccctgggatgcaaggctggttcaatatacgcaaatcaataaatgtaatccagcatataaacagagccaaagacaaaaaccacatgattatctcaatagatgcagaaaaagcctttgacaaaattcaacaacccttcatgctaaaaactctcaataaattaggtattgatgggacgtatttcaaaataataagagctatctatgacaaacccacagccaatatcatactgaatgggcaaaaactggaagcattccctttgaaaactggcacaagacagggatgccctctctcaccgctcctattcaacatagtgttggaagttctggccagggcaatcaggcaggagaaggaaataaagggtattcaattaggaaaagaggaagtcaaattgtccctgtttgcagatgacatgattgtttatctagaaaaccccatcgtctcagcccaaaatctccttaagctgataagcaacttcagcaaagtctcaggatacaaaatcaatgtacaaaaatcacaagcattcttatacaccaacaacagacaaacagagagccaaatcatgggtaaactcccattcacaattgcttcagagaataaaatacctaggaatccaacttacaagggatgtgaaggacctcttcaaggagaactacaaaccactgctcaaggaaataaaagaggacacaaacaaatggaagaacattccatgctcatgggtaggaagaatcaatatcgtgaaaatggccatactgcccaagaattggaaaaaactactttaaagttcatatggaaccaaaaaagagcccgcattgccaagtcaatcctaagccaaaagaacaaagctggaggcatcacactacctgacttcaaactatactacaaggctacagtaaccaaaacagcatggtactggtaccaaaacagagatatagatcaatggaacagaaataatgccgcatatctacaactatctgatctttga

SEQ ID NO: 8968 - DNA, 1575 bp, Homo sapiens
  SIMILAR (292)..(1362): 971254mologous to Homo sapiens putative p150,accession number U93564,Smith-Waterman Score=1809.
atggagctgaaaaccaaggctcgagaactacgtgaagaatgcagaagcctcaggagccgatgcgatcaactggaagaaagggtatcagcaatggaagatgaaatgaatgaaatgaagcgagaagggaagtttagagaaaaaagaataaaaagaaatgagcaaagcctccaagaaatatgggactatgtgaaaagaccaaatctacgtctgattggtgtacctgaaagtgatgtggagaatggaaccaagttggaaaacactctgcaggatattatccaggagaacttccccaatctagcaaagcaggccaaccatataaacagagccaaagacaaaaaccacatgattatctcaatagatgcagaaaaagcctttgacaaaattcaacaacccttcatgctaaaaactctcaataaattaggtattgatgggacgtatttcaaaataataagagctatctatgacaaacccacagccaatatcatactgaatgggcaaaaactggaagcattccctttgaaaactggcacaagacagggatgccctctctcaccgctcctattcaacatagtgttggaagttctggccagggcaatcaggcaggagaaggaaataaagggtattcaattaggaaaagaggaagtcaaattgtccctgtttgcagacgacatgattgtttatctagaaaaccccattgtctcagcccaaaatctccttaagctgataagcaacttcagcaaagtctcaggatacaaaatcaatgtacaaaaatcacaagcattcttatacaccaacaacagacaaacagagagccaaatcatgggtgaactcccattcacaattgcttcaaagagaataaaatacctaggaatccaacttacaagggatgtgaaggacctcttcaaggagaactacaaaccactgctcaaggaaataaaagaggacacaaacaaatggaagaacattccatgctcatgggtaggaagaatcaatatcgtgaaaatggccatactgcccaaggtaatttacagattcaatgccatccccatcaagctaccaatgactttcttcacagaattggaaaaaactactttaaagttcatatggaaccaaaaaagagcccgcattgccaagtcaatcctaagccaaaagaacaaagctggaggcatcacactaccttacttcaaactatactacaaggctacagtaaccaaaacagcatggtactggtaccaaaacagagatatagatcaatggaacagaacagagccctcagaaataatgccgcatatctacaactatctgatctttgacaaacctgagaaaaacaagcaatggggaaaggattccctatttaacagaagcagtaatgatgcagcagggtgcacatgcattggcggggatgggacagcagcaggggtgaggcagcagcatccatgcatccatgctcatgccagtgatgggacagatgtggttgtgggtgccagtaaagcagtggggaggtgcaccatggatgagtgtgcaccagcaagtggcaggggaaggctgcagttgggggaagctgtgggtcagtgg

SEQ ID NO: 8969 - DNA, 2685 bp, Homo sapiens
  SIMILAR (1099)..(2649): 951254mologous to Homo sapiens putative p150,accession number U93572,Smith-Waterman Score=2587.
atggtgaagggatcaattcaacaagaggagctaactatcctaaatatttatgcacccaatacaggagcacccagattcataaagcaagtcctgagtgacctacaaagagacttagactcccacacattaataatgggagactttaacaccccactgtcaacattagacagatcaacgagacagaaagtcaacaaggatacccaggaattgaactcagctctgcaccaagcagacctaatagacatcaacagaactctccaccccaaatcaacagagtatacatttttttcagcaccacaccacacctattccaaaattgaccacatagttggaagtaaagctctcctcagcaaatgtaaaagaacagaaattataacaaactatctctcagaccacagtgcaatcaaactagaactcaggattaagaatctcactcaaagccgctcaactccatggaaactgaacaacctgctcctgaatgactactgggtacataacgaaatgaaggcagaaataaagatgttctttgaaaccaacaagaacaaagacaccacataccagaatctctgggacgcattcaaagcagtgtgtagagggaaatttatagcactaaatgcctacaagagaaagcaggaaagatccaaaattgacaccctaacatcacaattaaaagaactagaaaagcaagagcaaacacattcaaaagctagcagaaggcaagaaataacgaaaatcagagcagaactgaaggaaatagagacacaaaaaacccttcaaaaaatcaatgaatccaggagctggttttttgaaaggatcaacaaaattgatagaccgctagcaagactaataaagaaaaaaagagagaagaatcaaatagacacaataaaaaatgataaaggggatatcaccaccgatcccacagaaatacaaactaccatcagagaatactacaaacacctctacgcaaataaactagaaaatctagaagaaatggatacattcctcgacacatacactctcccaagactaaaccaggaagaagttgaatctctgaatagaccaataacaggctctgaaattgtggcaataatcaatagtttaccaaccaaaaagagtccaggaccagatggattcacagccgaattctaccagagagctatctatgacaaacccacagccaatatcatactgaatgggcaaaaactggaagcattccctttgaaaactggcacaagacagggatgccctctctcaccgctcctattcaacatagtgttggaagttctggccagggcaatcaggcaggagaaggaaataaagggtattcaattaggaaaagaggaagtcaaattgtccctgtttgcagatgacatgattgtttatctagaaaaccccatcgtctcagcccaaaatctccttaagctgataagcaacttcagcaaagtctcaggatacaaaatcaatgtacaaaaatcacaagcattcttatacaccaaaaacagacaaacagagagccaactcatgagtgaactcccattcacaattgcttcaaagagaataaaatacctaggaatccaacttacaagggatgtgaaggacctcttcaaggagaactacaaaccactgctcaacgaaataaaagaggacacaaacaaatggaagaacattccatgctcatgggtaggaagaatcaatatcgtgaaaatggccatactgcccaaggtaatttacagattcaatgccatccccttcaagctaccaatgactttcttcacagaattggaaaaaactactttaaagttcatatggaaccaaaaaagagcccgcatcgccaagtcaatcctaagccaaaagaacaaagctggaggcatcacactacctgacttcaaactatactacaaggctacagtaaccaaaacagcatggtactggtaccaaaacagagatatagatcaatggaacagaacagagccctcagaaataatgccgcatatctacaactatctgatctttgacaaacctgagaaaaacaagcaatggggaaaggattccctatttaataaatggtgctgggaaaactggctagccatatgtagaaggctgaaactggatcccttccttacaccttatacaaaaatcaattcaagatggattaaagatttaaacgttagacctaaaaccataaaaaccctagaagaaaacctaggcattaccattcaggacataggcgtgggcaaggacttcatgtccaaaacaccaaaagcaatggcaacaaaagccaaaattgacaaatgggatctaattaaactcaagagcttctgcacagcaaaagaaactaccatcagagtgaacaggcaacctacaacatgggagaaaattttcgcaacctactcatctgacaaaggtctaatatccagaatctacaatgaactcaaacaaatttacaagaaaaaaacaaacaaccccatcaaaaagtgggcgaaggacatgaacagacacttctcaaaagaagacatttatgcagccaaaaaacacatgaagaaatgctcatcatcactggccatcagagaaatgcaaatcaaaaccactatgagatatcatctcacaccagttagaatggcaatcattaaaaagtcaggaaacaacagggacatggatgaaattggaaaccatcattctcagtaa

SEQ ID NO: 8970 - DNA, 2088 bp, Homo sapiens
  SIMILAR (1)..(858): 791254mologous to Homo sapiens putative p150,accession number U93569,Smith-Waterman Score=1119.
atggtaaagggatcaattcaacaagaagagctaactatcctaaatagatatgcacccaatacaggagcacccagatccataaagcaagtcctgagtgacctacaaagagacttagactcccacacaataataatgggagactttaacaccccactgtcaacattagacagatcaacgagacagaaagttagcaaggatatccaggaattgaactcagttctgcaccaagcggacctaatagacatctacagaactctccaccccaaatcaacagaatgtacattcttctcagcaccacaccgcacttattccaaaattgaccacatagttggaagtaaagcactcctcagcaaatataaaagaacagaaattataacaaactgttgctcagaccacagtgcaaccaaactagaactcaggattaacaaactcactcaaaaccgctcaactacatggaaactgaacaacctgctcctgaatgactactgggtacataatgaaatgaaggcacaaataaagatgttctttgaaaccaatgagaacaaagacacagcataccagaatctctgggacacatttaaagcaatgtgtagagggaaatttatagcactaaatgcccacaagagaaagcaggaaagatctaaaattgacaccctaacatcacgattaaaagaactagagaagcaagagcaaactttacattcaaaagacagcagaaggcaagaaataaatgcagaaaaggcctttgacaaaattcaacagcccttcatgctaaaaactctcaatacactagatattgatgaaacgtatctcaaaataataagagctatttatgacaaacccacagtcaatatcatactgaatgggcaaaaactggaagtattccctttgaaaactggcacaagacagggatgccgtctctcgccactcctattcaacataatgttggaagttctggccagggcaatcaggcaagagaaagaaataaagggtattcaattaggaaaagaggaagtcaaattgtccctgtttgcagatgacatgattgtatatctagaaaaccccatcatctcagcccaaaatctccttaagctgataagcaacttcagcaaagtctcaggatataaaatcaatgtgcaagaatcacaagcatttctgtacaccaataacagacaaacagagagccaaatcatgagtgaactcccattcacgattgctgcaaagagaataaaatacctaggaatccaacttacaaaggatatgaaggacctcttcaaggagaactacaaaccactgctcaacaaaataaaagaggacacaaacaaatggaagaatattccatgctcatggataggaaaaatcaatatcgtgaaaatggccatattgcccaaggctacagtaaccacaacagcatggtactggtaccaaaacagagatatagaccaatggaacagaacagaggcctcagaaatgacaccccacatctacagccatctgatctttgacaaacctgacaaaaacaagaaatggggaaatgattccgtatttaataaatggtgctgggaaaactggctagccatatgtagaaagctgaaacaggatcccttccttacaccttatacaaaaattaattcaagatggattaaagaattaaatgttagacctaaaaccataaaaaccctagaagaaaacctaggcaataccattcaggacataggcatgggcaagaacttcatgactaaaacaccaaaagcaacggcaacaaaagccaaaatagacaaatgggatctaattaaactaaagagcttctgcacagtaaaagaaactaatatcagagtgaacaagcaacttatagaatgggagaaaatttttgcaatctacccatctgacaaagggctaatatccagaatctacaaagaacttaaacaaatttacaagaaagaaacaaacaaccccatcaaaaagtgggccaaggatataaacagacacttctcaaaagaagacatttatgcagccaatagacacatgaaaaaatgctcatcatcactggtcatcagagaaatgcaaatcaaaaccacaatgagatag

SEQ ID NO: 8971 - DNA, 2409 bp, Homo sapiens
  SIMILAR (41)..(214): 891254mologous to Homo sapiens putative p150,accession number U93563,Smith-Waterman Score=273.
atgagtgaactcccattcacaattgcttcaaagagaatattcaaagagaataaaatacctaggaatccaacttacaacggatgtgaaggacctcttcaaggagaactacaaaccactgctcaacgaaataaaagaggacacaaacaaatggaagaacattccatgctcatgcataggaagaatcaatatcgtgaaaatggtcacactgcccaagaactagaaaagcaagagcaaacacattcaaaagctagcagaaggcaagaaataactaaaatcagagcagaactgaagaaaatagagacacaaaaaacacttcaaaaaattaatgaatccaggagctggttttttgaaaagatcaacaaaattcatagaccgctagcaagactaataaagaagaaaagagagaagaatcaaatagacgcaataaaaaatgataaaggggatatcaccaccaatcccacagaaatacaaactaccatcagagaatactacaaacacctctatgcaaataaactagaaaatctagaagaaatggataaattcctcgacacatacaccctcccaagactaaaccaggaagaagttgaatctctgaatagaccaataacaggatctgaaattgtggcaataatcaatagcttaccaaccaaaaagagtccaggaccagatggattcacagccgaattctaccagaggtacaaggaggaactggtaccattccttctgaaactattccagtcaatagaaaaagagggaatcctccctaactcactttatgaggccaacatcatcctgataccaaagccaggcagagacacaactaaaaaagagaattttagaccaatatccttgatgaacattgatgcaaaaatcctcaataaaatactgtcaaaccaaatccagcagcacatcaaaaagcttatccaccatgatcaagtgggcttcatccctgggatgcaaggctggttcaacatacgcgaatcaataaatgtaatccagcatataaacagaaccaaagacaaaaaccacatgattatctcaatagatgcagaaaaggccttcgataaaattcaaccgcccttcatgctaaaaactctcaataaattagcccaaaatctccttaagctgataagcaacttcagcaaagtctcaggatacaaaatcaatgtgcaaaaatcacaagcattctgttacaccaataacagacaaacagagagccaaatcatgagtgaactcccattcacaattgcttcaaagagaataaaatacctaggaatccaacttacaagggatgtgaaggaccgcttcaaggagaactacaaaccactgctcaacgaaataaaagaggacacaaacaaatggaagaacattccatgctcatggataggaagaatcaatattgtgaaaatggccatactgcccaaggtaatttatagattcaatgccatccccatcaatctaccaatgcctttcttcacagaattggaaaaaactactttacagttcatatggaaccaaaaaagagcccgcattgccaagacaatcctaggccaaaagaacaaagctggaggcatcatgctacctgacttcaaactatactacaaggctacagtaaccaaaacagcatggtactggtaccaaaacagagatgtagaccaatggaacagaacagagccctcagaaatcatgccgcatatctacaactatctgatctttgacaaacctgagaaaaacaagcaatggggaaaggattccctatttaataaatggtgctgggaaaactggctagctatttgtagaaagccgaaactggatcccttccttacaccttatacaaaacttaattcaagatggattaaagatgtaaatgttagacctaaaaccgtaaaaaccctagaagaaaacctaggcaataccattcaggacataggcatgggcaaggacttcatgtctaaaacaccaaaagcaatggcaacaaaagccaaaatggacaaatgggatctaattaaactgaagagcttctgcacagcaaaagaaattaccatcagagtgaatggacaacctacagaatgggagaaactttttgcaatctactcatctgacaaagggctaatatccagaatctacaatgaattcaaacaaatttacaagaaaaaaacaaacaaccccatcaaaaagtgggtgaaggacttgaacagacacttctcaaaagaagacagttatgtagccaaaaaacacatgaaaaaatgctcaccatcactggccatcagagaaatgcaaatcaaaaccacaatgagataccatctcacaccagttagaatggcaatcattaaaaaagtcaggaaacaacaggtgctggagaggatgtggagaaacaggaacacttttactctgttggtgggactgtaa

SEQ ID NO: 8972 - DNA, 2057 bp, Homo sapiens
  SIMILAR (1)..(1047): 911254mologous to Homo sapiens putative p150,accession number U93568,Smith-Waterman Score=1627.
atgttctttgaaaccaatgagaacaaagttataacataccagaatctctgggacacatttaaagcagtgtgtagagtgaaatttatagcactaaatgcccacaggaaaaagcaggaaagatctaaaattgacaccctaacatcacaattaaaagaactagagaagcaagagcgaacacatttaacagctagcagaaggcaaaaaataactgagatcagagcagaactaaaggagatagagacacaaaaaacccttcgaaaaatcaatgaatccaggagctggttttttgaaaagatcaacaaaattgatagactgctagcaagactaataaagaagaaaacagagaagaatcaaatagatgcaataaaaaatgataaaggggatatcaccaccgatcccacagaaatacaaactactatcagagaatactataaacacctctatgcaaatatactagaaaatctagaagaaatggataaattccttgacacatacaccctcccaagaataaaccaggaagaagttgaatctctgaatagaccaataagaggctctgaaattgaggcaataattaatagcttaccaaccaaaaaaagtccaggaccagatgcagtcacagccgaattctaccagaggtacaaggaggagctggtgccattccttctgaaactattccaatcagtagaaaaagagggaatcctccctaactcattttatgaggccagcatcatcctgataccaaagcctggcagagacacaacaaaaaaagagaattttagaccaatatccctgatgaatgtcgatccaaaaatcctcaataaaatactggcaaaccgaatccagcaacacatcaaaaagcttatccaccatgatcaagtgggcttcatccctgggatgcaaggctggttcaacatacgcaaatcaattaacgtaatccagcatataaacagaaccaacgataaaaaccacatgattatctcaatagatgcagaaaaggcctttgacaaaattcaacagcacttcatgctaaaaactctcaataaattagagaataaaatacctaggaatccaacttacaagggatgtgaaggacctcttcaaggagaactacaaaccactgctcaacgaaataaaagaggacacaaacaaatggaagaacattccatgctcatgggtaggaagaatcaatatcgtgataatggccacactgcccaagaattggaaaaaagctactttaaagttcatatggaaccaaaaaagagcccgcatcaccaagtcaatcctaagccaaaagaacaaagctggaggcatcacgctacctgacttcaaactatactacaaggctacactaaccaaaacagcatggtactggtatcaacacagagatataaaccaatggaacagaacagagccctcagaaataataccacacatctacaaccatctgatctttgacaaacctgacaaaaaacaagaaataggggaaggattccctatttaataaatggtgctgggaaagctggctagacatatgtagaaagctgaaactggatcccttccttacaccttatacaaaaattaattcaagatggattaaagacttaaacgtaagacctaaaaccataaaaaccctagaagaaaacctaggcaataccattcaggacataggcatgggcaaggacttcatgtctaaaacaccaaaagcaatggcaacaaaagccaaaattgacaaatgggatctaattaaactaaagagcttctgcacagcaaaagaaactaccatcagagtgaacaggcaacctaaagaatgggagaacatttttgcaatctactcatctgacaaatggctaatatccagaatctacaaagaactcaaagaaacttacaagaaaaaaacaaacaaccccatcagaaagtgggcaaaggatatgaacagacacttctcaaaagaagacatttatgcagccaacagacacatgaaaaaaatgctcatcatcactggccatcagagaaatgcaaatcaaaaccacaatgagataccatctcacaccagttag

SEQ ID NO: 8973 - DNA, 4344 bp, Homo sapiens
  SIMILAR (3636)..(3677): 921254mologous to Homo sapiens putative p150,accession number U93574,Smith-Waterman Score=69.
atggataaattcctcaacacatacactctcccaagactaaaccaggaagaagttgaatctctgaatagaccaatagcaggctctgaaattgtggcaataatcaatagcttaccaaccaaaaagagtccaggaccagatggattcacagctgaattctaccagaggtacaaggaggaactgctgataagcaacttcagcaaagtctcaggatacaaaatcaatgtacaaaaatcacaagcattcttatacaccaacaacagacaaacagagagccaaatcatgagtgaactcccattcacaattgcttccaagagaataaaatacctaggaatccgacttacaagggatgtgaaggacctcttcaaggagaactacaaaccactgctcaatgaaataaaagaggacacaaacaaatggaagaacattccatgctcatgggtaggaagaatcaatatcgtgaaaatggccatactgcccaagaggaaacagccttctgcactcacagccgaagggaaagcagcaggttggggcttcttgtggccaacttcagagcctgtcaccaggaaaggtttagaagagaacgctcagtcccggcaggagtccacgcggaggctcatccttgttgggagaacaggggccgggaagagcgccactgggaacagcatcctgggccagagacggttcttctccaggctgggggccacgtctgtgaccagggcctgcaccacgggcagccgcaggtgggacaagtgccacgtggaagtcgtggacactccggacattttcagctcccaagtgtccaagacagatcctggctgtgaggagagaggtcactgctacctgctctcggcccccggaccccacgcgctgctcctggtgacccagttgggtcggttcaccgcccaggaccagcaggcggtgaggcaggtgagggacatgttcggggaggacgtcctaaaatggatggtcatcgtcttcaccaggaaggaggacctggccgggggctccctgcacgattacgtgagcaacacagagaaccgggccttgcgcgagctggtggccgagtgcgggggccgggtctgtgcctttgataaccgggccaccggccgggagcaggaagcccaggtggagcagctgctggggatggtcgagggcttggtgctggagcacaagggcgcccattactccaacgaggtgtatgagctggcgcaggtgctgcgctgggcaggccctgaggagcggctccggcgggtggcggagcgcgtggcagccaggggagaatggacagaagaaatatttgaaaaggaaatggttaagacttttctaaaagtattgaaggacaccaaactacagatccaagaaacagagagctccaagcagggctcccctttgtcttccacaatgattggaagcctcctgaggccctcaccagaagaagatgccagcactgtgaggccctcaccagaagaagatgccagcactgtgcttcctgcacagcctgcaaactggtgggctccatcacgtgccagacagcttaccagggtcagtcacgagcccagagtcaaaccctgcaagggcttgttctggtcctctttggaccagagtgcctttctgatcctggttagcagaaactttccagaagcagagcctctgagtcatggagctttcagccccagcacatggctcctccttaactgcgtctgctcaacctccctcagccctgtgaacagcatccccgcacacagacgcagagcaggactctctctgctgccacttcaccttcctgagagaggaccagcggccagagcctcagtgactgccaccctggaggacagggcacaacaaccgtttctggagagaatgggaggattccagaggggcaaatatggaactatggctgaaggtagatcagaagataacttgtctgcaacaccaccggcattgaggattatcctagtgggcaaaacaggctgcgggaaaagtgccacagggaacagcatccttggccagcccgtgtttgagtccaagctgagggcccagtcagtgaccaggacgtgccaggtgaaaacaggaacatggaacgggaggaaagtcctggtggttgacacgccctccatctttgagtcacaggccgatacccaagagctgtacaagaacatcggggactgctacctgctctctgccccggggccccacgtcctgcttctggtgatccagctggggcgtttcactgctcaggacacagtggccatcaggaaggtgaaagaggtctttgggacaggggccatgagacatgtggtcatcctcttcacccacaaagaggacttagggggccaggccctggatgactatgtagcaaacacggacaactgcagcctgaaagacctggtgcgggagtgtgagagaaggtactgtgccttcaacaactggggctctgtggaggagcagaggcagcagcaggcagagctcctggctgtgattgagaggctggggagggagcgagagggctccttccacagcaatgacctcttcttggatgcccagctgctccaaagaactggagctggggcctgccaggaagactacaggcagtaccaggccaaagtggaatggcaggtactgcctgtagtcttcttggcaggccccagccctgcctctctggagcagctgggcatccaggaagaggttattgctgtagaaggagccctctcgctccctccccagcctctcgatcgcagccaggagctctgcctgctgctgcctctgctcctccccggcagcccggttgttgaaggcacagtaccttctctcacattcctgcaccagtgctcgggtagaaaatccacccaggccccacagaagaataacttctcaggcttcgctactatgaaaaacccatacaacccattccagagcaacatgaggaccttgctgtgtgcaaagtttcacacaatgaagcatgcaggcctgggtgaaggaatacctcctgacaactccgggaatgatggctatgctaataatgggtatagtgcccgtgaagaagaaaatgagacactcactgaaaatctgagaagcaaagtaactgctataaaatctttttccattgaaataggccatgaagttaaaacccaaaataaattattagctgtaatggattcacaatttgattctacaactggatttctagtgttggaagttctggccagggcaatcaggcaggagaaagaaataaagggtattcaattaggaaaagaggaagtcaaattgtccctgtttgcagatgacatgattgtacatttagaaaaccccatcgtctcagcccaaaatctctttaagctgataagcaacttcagcaaagtctcaggatacaaaatcaatgtgcaaaaatcacaagcattcttatacaccaataacagacaaacagagagccaaatcatgagtgaactcccattcacaattgcttcaaagagaataaaatacctaggaatccaacttacaagggatgcaaaggacgtcttcaaggagaactacaaaccactgctcaatgaaataaaagaggacacaaacaaatggaagaacattccatgctcatggataggaagaatcaatatcgtgaaaatggccatactgcccaggaattggaaaaaactacttcaaagttcatatggaaccaaaaaagcccgcatcaccaagacaatcctaagcaaaaagaacaaagctggaggcatcacgctacctaacttcaaactatactacaaggctacagtaaccaaaacagcatggtactggtaccaacacagagatatagaccaatggaacagaacagaggcctcagaagtaacaccacacatctacaaccatctgatctttgacaaacctgacaaaaacaagaaatggggaaaggattccctgtttaataaatggtgctgggaaaactggctagccatatgtagaaagctgaaactggatctcttccttacaccttatacaaaaattaatccaaggtggattaaagacttaaatcttagacctagaaccataaaaaccctagaagaaaacctaggcagtatctttagggacataggcatgagcaagggcttcatgactaaaacaccaaaagcaaaggcaacaaaagccaaaacagacaaatgggatctaattaaactaaagagcttctgcacggcaaaagaaactaccatcagagtgaacaggcaacctacagaatgggagaaaatttttgcaatctatccatctgacaaagggctaatatccagaatctataaagaactcaaacgaatttacaagaaaaaaacaaccccatcaaaaagtgggcaaagggtatga

SEQ ID NO: 8974 - DNA, 387 bp, Homo sapiens
  SIMILAR (145)..(333): 521254mologous to Human herpesvirus 6 U88,accession number X83413,Smith-Waterman Score=200.
ttagcagtgtctggggctcttcctgctggtagtcaatcgcatgcccttggtggtgacaccaaagatgtctccaaacatggccagaagtccccagggaggtaaaatcatccccagctgaaagtcgctggcctgaagaatggctgctgcgtctgcatgtgcgtttgtgtctgtctgcgtctgcgtccgcgtctggatctgggtctgtgtctgtgtctgtgtctgtgtctgcgtctgcgtctgtctgcgtctgcgtctgtctgcgtctgcatctgcgtctgcatctaggtctgggtctgtgtctgtgtctgtctgtgtctcagcctcccaaagtgctgggattacaggcatgagccacagcgcccggcctaggagcacccacatcttcat

SEQ ID NO: 8975 - DNA, 735 bp, Homo sapiens
  SIMILAR (382)..(684): 511254mologous to Human herpesvirus 6 U88,accession number X83413,Smith-Waterman Score=315.
tcagccacttccaccaggaagcacagccagcagtgactgcagaaggtgctgcccatgacagcagccagcagggagctcccccttcagcaccaacagctgacctgtgagcagggcctgtggcaactgcttcgagtcctgggaatcacacaccaggccccactgaaatggcaggggacatggatcttctgtggagggagcaggagaggagatccgggccacttctgtctgtgatacctcagtggcaatggtggagaaaaaggtttctgtcatgcactgccggaccacaggctccgtgtcctgcaccagcacccgccccatgcttgtgtagaaactgacactgtggatttgggaataaccagcatttctctggctgatgtgagagtctgcgtctgcatgtgcgtttgtgtctgtctgcgtctgcgtccgcgtctggatctgggtctgtgtctgtgtctgtgtctgtgtctgcgtctgcgtctgtctgcgtctgcgtctgtctgcgtctgcatctgcgtctgcatctaggtctgggtctgtgtctgtgtctgtctgtgtctgtgtctgcgtctgtatctgtctgcgtctgtgtctgtgtctgcgtctgcgtttgtctgcatctgcgtctgcatctaggtctgtgtctgtgtctatgtctgtgtctgtgtctgtctgtgtactgtactcggaatacacagtttcctcacagccagaaatgcacatcaacccattggccat

SEQ ID NO: 8976 - DNA, 795 bp, Homo sapiens
  SIMILAR (408)..(211): 421254mologous to Strongyloides stercoralis IgG and IgE immunoreactive antigen recognized by sera from patients with strongyloidiasis,accession number U90353,Smith-Waterman Score=125.
tcattcttccccggtaacatccacagggtccttccgcatcagcacacagctccccactgcgtggtcctgttcttgaactgatggcctaacatcaacaaagcctctgagccctgagaccctcctctggctgggagccacggtatccatggcaaccatggctgacacagaggacgatgcggacatcgtgggaaacaaagccacatctgtgctgggaccctcttcctcccgtgcctgtgcgggaccctcttcctcccgtgcctgtgcgggaccctcttcctcccgtgtctgtgcgggaccctcttcatcccgtgtctgtgcgggaccctcttcatctcgtgcctgtgtgggaccctcttcatcccgtgcctctgtctgaccctcttcatcccgtgtctgtgtgggactctctatttgtgcgtcctcagctctcacacctgccaggcctgtcatcccctgcaggatgaagcctggtgtccatggcttgcccttagcacctcccacaacattgtaagccttgtagctccttcctatgggctgctgaatccacacagccctttgaagagagtatggccctgccgacaccctgattgcagacttctggcccccgggactgtgtgtgagtttctgttgtttcacactgtctggtttgtggcacttttttccagcaaccacaggacactcattcaccctctggccagcaggaatgtgcaccagcctggggggcatatgcaggaccccagcagctttgagcccacactcatccaccaccttgatgtcaacttgacttgttgtcat

SEQ ID NO: 8977 - DNA, 1623 bp, Homo sapiens
  SIMILAR (277)..(600): 491254mologous to Human herpesvirus 6 U88,accession number X83413,Smith-Waterman Score=320.
tcatccctgtgttccctgggcccaacagaatagagagtcccacacagacacgggatgaagagggtcagacagaggcacgggatgaagagggtcccacacaggcacgagatgaagagggtcccgcacagacacgggatgaagagggtcccgcacagacacgggaggaagagggtcccgcacaggcacgggaggaagagggtcccgcacaggcacgggaggaagagggtcccagcacaggtacaggatgaagagggtcactgccagaagccagggcgctgcgtctgcatgtgcgtttgtgtctgtctgcgtctgcgtccgcgtctggatctgggtctgtgtctgtgtctgtgtctgtgtctgcgtctgcgtctgtctgcgtctgcgtctgtctgcgtctgcatctgcgtctgcatctaggtctgggtctgtgtctgtgtctgtctgtgtctgtgtctgcgtctgtatctgtctgcgtctgtgtctgtgtctgcgtctgcgtttgtctgcatctgcgtctgcatctaggtctgtgtctgtgtctatgtctgtgtctgtgtctgtctgtgtcttttctatctggttcttcagtgcttcatctgcagttgataatttcagggggccagcggtggtgttgacgtaagacaatgtgctcactcccatttgctcattcccatcactctttcccaggccatttttttctgatcttccaatctcgttccttccaagtctctttccaccctcattgcacattttggtaatggcatcatcttgcctctgagggttaagagtgctacatggtctctgccgttttgggatcctctcttctccgtggacactagggaggccagttctatagcagcctcccgtcatcaatcctgtactgcagatgatgaccacaaccggatttggcaacgccgccggggcttccttcactggtgcatgtcttacagtcttcacaagcagagtcctctggggctcccttgggctgggtgtgaaggcaggagctccagtctgaaccgctgtagcattgcagtgccctgagagaatattgtgcctcaggggtacttgtgcaggaaaaaccaaaccaaagctagaattcctggatgtggctgttttcacatagggcttgcattccgccttcagccagcagctctggacccggaggtactccccaaagcagccctcaggccagtctgcagtgccctggcagttgagcttcccttggccccaggtcaagctgtgggctctgttctctgctcctggtcttgcagcaaatgccatttctgtggccaggtcagctgttggtgctgaagggggagctccctgctggctgctgtcatgggcagcaccttctgcagtcactgctggctgtgcttcctggtggaagtggccgggagcgctggttcctgagagctgccacctcacgtgctgtccttgtccccatgggtcggtgttggctgccctccctccatccttcccgtccatctccacagtctgtgccccgttcaggccaggaaaagcctcttcctggttctcctctctgtagccctgtctcatctgagcccaccttacattttcatccacctgagacattctcctagtaatcagaccctcctcccccat

SEQ ID NO: 8978 - DNA, 234 bp, Homo sapiens
  SIMILAR (4)..(96): 401254mologous to Homo sapiens KSRP,accession number U94832,Smith-Waterman Score=56.
agtggtcccccaggtcctccagggggtccaggcatgcccccgggggccgaggccgaggaagaggccaaggcaattggggtccccctggcgggggatgaccttctccatccccactcacaagtgtgggctggtcatcggccgattgaccaggcccaggtggcccaggccctgctggcccaatggggcccttcaatctgggcccttcaaccaggggccacccggggctcccccaca

SEQ ID NO: 8979 - DNA, 926 bp, Homo sapiens
  SIMILAR (263)..(355): 961254mologous to Homo sapiens KSRP,accession number U94832,Smith-Waterman Score=187.
caggtggcgagaatgtgaaagccataaaccagcagacgggagccttcgtagagatctcccggcagctgcacccaacgggaccccaacttcaagttgttcatcatccgggggttcacccgagcgagattgaccacgccaagcagcttatcgaggaaaagatcgaggtgggttggggcgggctctggggatttggtctcacagcccggatcccagcccacttaccttggttactctccttccttctagggtcctctctgcacagttgggaccaggcccaggtggcccaggccctgctggcccaatggggcccttcaatcctgggcccttcaaccaggggccacccggggctcccccacagtgagtatcctctgcctcctgggttttgaggccgggggcttactgagctggcaagaagaatagcagaccccatttccctttccctagaagtgcagggcgggggccctcatccaagcccatttttgtggataccatcaacaggccctctcctgtctactggtagagcatgtgcctttcagcatccctccgtgcacgtgcaagtttcgcggcttctttcatgtcctcaagctgacgctgcgcgtccttcgagttgcttcttgtctaggcctttcccaggcgccccgttgagcctggtggtctgggtctctggcgcctccccactgaaaaacatccccaccccaggtggtccggctgcggccacccccgcaccactgctcaagcatccctttcttctctcctgcagtgccggggggccccctcctcaccagtacccaccccagggctggggcaatacctacccccagtggcagccgcctgctcctcatgacccaagtaagtgatgggccacctggcggagggcaggccctgttctgtccccccgtctcacccgaggtatctcctgcaggcaa

SEQ ID NO: 8980 - DNA, 611 bp, Homo sapiens
  SIMILAR (60)..(443): 641254mologous to Homo sapiens KH type splicing regulatory protein; KSRP,accession number AF093748,Smith-Waterman Score=418.
gcgaccgcggaccccaacgccgcgtgggccgacgactatctcacactactaccagcagcccccgggcgccggtcccctgccccgcaccggcccctgcggccccaccggctcagggtgagccccctcagcccccacccaccggccagtcggactacactgagtgggcctgggaagagtattacaaaaagatcggccagcagccccagcagcccggagcgcccccacagcaggactacacgaaggcttgggagggagtactacaagaagcaagcgcaagtggcccaccggaggggggtccaggagctcccccaggctcccagccagactacagttgccgcctgggcggaatattacagacagcaggccgcttactacggacagaccccaggtccttggcggcccccagccgccgcccacgcagcagtggacagcagcaggctcaatgaatcgaatgaatgtgaacttcttcatctgtgaaaaatcttttttttttccattctggttctgtttgggggcttctgttttgtttggcgagagagcgatggctgccgtggggagtactggggagccctcgcggcaagcagggtgggggggacttgggggcatgcggg

SEQ ID NO: 8981 - DNA, 1662 bp, Homo sapiens
  SIMILAR (71)..(187): 941254mologous to Homo sapiens KSRP,accession number U94832,Smith-Waterman Score=198.
cggcgttgcagggctctggggtgggctcttcttttaaacttgtgtctctgctctctcggtgctggcctcagatgacgggacagggcccgagaagattgctcatataatggggcccccagacaggtgcgagcacgcagcccggatcatcaacgacctcctccagagcctcagggtaggtggccccgggtgctgaaggggctggcagggcctccaggggagtgcaagaccagaccggcttccagggttcatcatcctcctcctcctcttgtcttgcagagtggtcccccaaggtcctccaagggggtccaggcatgcccccggggggccgaaggccgaaggaagaaggccaaggcaatttgggggtccccctgggcggggaagatgaccttctccatccccactcacaagtgtgggctggtcatcggccgaggtggcgagaatgtgaaagccataaaccagccaacggggagctttcgtagagatctgccggcagctgccacccaacgaggacggccaacttcaagttgttcatcataccggggttcaccaccagcagattgaccacgccaagcagcttaacgaagtaaaagatgaagggtcctctttgcccagttggaccaggcccaggtggcccaggccctggctggcccaatggggcccttcaatcctggagcccttcaaaccaggggccacccggggctcccccacatgccaagaaggccccctcctcaccagtacccaccccagggctgcggcaatacctacccccagtggcagcagcatgctcctcatgacccaagtatctctgcaggcaaagcagctgcagcggccgcggaccccaacgccgcgtgggcgcctactactcacactactaccagcagcccccgggccccgtccccggcccgcaccggcccctgcggccccaccggctcagggccagcagccccagcgcccggagcacccccacagcaggactacacgaaggcttgggaggagtacacaagaagcaagcgcaagtggcaccggaggggtccaggagctcccccaggctcccagccagactacagtgcgcctgggcggaatattacagacagcaggccgcttactacggacagacccaggtcctggcggcccccagccgccgcccacgcagcagggacagcagcagcaatgggtagcgccggaaaccccttccccgcggggtgtgcccttgatgcctgcagcgggggccgtgtggccggaggtcccgggagtccccacgcaccgccagggaagcattcgctgggtccagaggtaaacgaagaggcctccctgcgccggctgcttgttcctgtgtgccgctgtcgtgatgctggggagcgctgagactcgcaggcgggacttctgaactgctggggagtcggggggcaggcagacagcgcggacggtgggcaccggcccggccgccaccacctcgctcacaatctggccacttgggaagaaaacgtctattttttccccttctctgcatcacttttttgggttttggtctttttattcttttattttttaaacccatgatcttttttcctgtgtccaagtgactgtgttgcaggcggcccggctctggcagggactggtggggacgcggggagcggcccaggccccttgcccgccgggctc

SEQ ID NO: 8982 - DNA, 1778 bp, Homo sapiens
  SIMILAR (1362)..(1598): 961254mologous to Homo sapiens bA108L7.5 (novel protein similar to Plasmodium POM1 and C. elegans F46G11.1 (Tr:Q20485)),accession number AL133215,Smith-Waterman Score=404.
atgccagtgttgcctgtaactgcaactgaaatccgccagtatttgcgggggcatgggatccccttccaggatggtcacagttgcctgcgggcactgagcccctttgcagagtcttcacagctcaaaggccagactggtgttaccacttccttcagcctcttcattgacaagaccacaggccactttctctgcatgaccagcctagcagaagggagctgggaagacttccaggccagcgtggaggggcgaggggatggggccagggaggggtttctgcttagcaaggcaccagaatttgaggacagcgaggaggtccggaggatctggaaccgagcaatacctctctgggagctgcctgatcaggaggaggttcagctggctgatacaatgtttggccttaccaaggttacagatgacacactcaagcgtttcagtgtgcgatatctgcgacctgctcgcagtcttgtcttcccttggttctcccctgggggctcaggattacgaggcctgaagctcctagaggctaaatgccagggggatggagtgagctacgaggaaaccactattccccgacccagcgcctaccacaatctgtttggattaccactgattagtcgtcgagatgctgaggtggtactgacgagtcgtgagcttgacagcctggccttgaaccagtccacggggctgcctacccttactctaccccgaggaacgacctgcttaccccctgccttactcccttacctggaacagttccggcggattgtattctggttgggggatgaccttcggtcctgggaagccgccaagttgtttgcacgaaaactgaaccccaaacgatgcttcttggtgcgaccaggagaccagcaaccccgtcccctggaggccctgaacggaggcttcaatctttctcgtattcttcgtaccgccctgcctgcctggcacaagtccatcgtatctttccggcagcttcgggaggaggtgctaggagaactgtcaaatgtggagcaagcagctggcctccgctggagccgctttccagacctcaatcgtatcttgaagggacatcgaaagggcgagctgacggtcttcacagggccaacaggcagtggaaagacgacattcatcagtgagtatgccctggatttgtgttcccagggggtgaacacactgtggggtagcttcgagatcagcaatgtgagactagcccgggtcatgctgacacagtttgccgaggggcggctggaagatcaactggacaaatatgatcactgggctgaccgctttgaggacctgcccctctatttcatgactttccatggacagcaaaagcatcaggactgtaataggtacaatgcaaccatgcagtctacgtctatgacatttgtcatgtgatcatcgacaacctgcagttcatgatgggtcacgagcagctgtccacagacaggatcgcagctcaagactacatcatcggggtctttcggaagtttgcaacagacaataactgccatgtgacactggtcattcacccccggaaagaggatgatgacaaggaactgcagacagcgtccatttttggctcagccaaaggaggggagtggtctgccccgcactccaccagcagccgacccagtgcccagcctaagagtgactcgacggtggccgaggctgcccctctggcctctgacttcacagcttactggatttggtttttgacctggggaagggggcgagcatcacgtgaccgagaattcggctacctggctgccttaaactaa

SEQ ID NO: 8983 - DNA, 1583 bp, Homo sapiens
  SIMILAR (285)..(677): 691254mologous to Homo sapiens bA108L7.5 (novel protein similar to Plasmodium POM1 and C. elegans F46G11.1 (Tr:Q20485)),accession number AL133215,Smith-Waterman Score=397.
  misc_feature (1)...(1583): n = a,t,c or g
tgtcacccttgattgtctcttccgccagaatgcatgcaggcagggacctgcccctctatttcatgactttccatggacagcaaagcatcaggactgtaatagatacaatgcaacatgcaggtctacggtctatgacatttgtcatgtgatcatcgacaacctgcagttcatgatgggtcacgagcagctgtccacagacaggatcgcagctcaagactacatcatcggggtctttcggaagtttgcaacagacaataactgccatgtgacactggtcattcacccccggaaagaggatgatgacaaggaactgcagacagcgtccatttttgggctcagccaaaggcaagccagggnaggcagacaatgttcttgatcctgcagggacagggaagctgggtaaccggggccaggggaaacggtattttgcaggtgttcccaaggaaccgttttgatgggagatgtagggtgtcttcccgcttgagttcaacaagaactccctcaccttctccattccaccaaagaacaaggcccggctcaagaagatcaaggatgacactggaccagtggccaaaaagccctcttctggcaaaaagggggctacgacacagaactctgagatttgctcaggccaggcccccactcccgaccagccagacacctccaagcgttcaaagtgaaggccgtgcagagctggtctctgaaatgagcttgataggataggctggagcataaacctctgcaagggctcctctatcctgtggtcctgagctgtgtgcccttctcagtatgaggggcctaacctagagcaggtttccatagtgagaaaattcaatgtagcagactactgagaaactactgtgttgctcaggctttgtttgaggtcctgtatatacagccctgaaaagagagataaagtccctgcatgcatgcattctggcggaagagacaagcaagcaatgaacaaattagcagaaaacctagttttagtgaaaaatgctgtaaagaaaatagaaatgcgatagagtgctggcaggctagtgtagataagtggtctgaaaaggtgtctctgagccgagggcatgtgagctggggcctaaacaactagaaggagagagccacgtgaacatccggcgaaggggacccaggcagagagaaaaggaaatgccaagccctgaggtaggaatgagcaggtcagattcaaggcagtgaggtcaggccgcatgaacctggaggggaatcggggacttcatgcgaaactccagcctaggctttcaaagtcaaagggtgaatacagtgggtacccaagctcctctgctcccccactttgtagagcctagcatgaaggtggcattgtactagaattgaatcctaggtgcttagccctgcaatatcagggcctcactggtgggagctgctctcgggctgggttgcttgggcgtagagccatagggggaagctgtcagcccggattgtcctgcctatcctagtcactgatgccattgtgtgcttcctcaagactgtctggagtcagtgacattttatagagccttttccagttttactaaaaaatttttccattg

SEQ ID NO: 8984 - DNA, 612 bp, Homo sapiens
  SIMILAR (252)..(308): 471254mologous to bacteriophage lambda Rz1 protein precursor,accession number U37314,Smith-Waterman Score=64.
atggacaatggaggcagtgactggagtgacgcatctacaagccaaggaacaccaagctcagtggctggttctgaaagtgagaaacttaaggaacactcagaaaaaggtatagagcctttcactgccgaatcacaatttttaaggcgcttactgaggtctgcaaaaacttctcagctcttcactgtgaattttcatggggattctttttcttctgcagttttttcttccttgcctcttcttgaggttaaaattgtttgccatctcaaccacagccttgttggtttttgcaacctccttgtccttggcaaatcctttgaaatcacggatgaacctcttgagggtcttcttccagatgtcatttatacgttccttggtaacatcaccccaagcccaagcaagggtcctgatggagtcgtagatgtaatcctttcagaattgcatcagcgtcttctccgtgtcttcctttgttgcagtaataacctgagcaaagctgctcctcctcaggcagtgggccttaaaagctgctgtaactcctttacccattggttggtaatccttaatctcttgtttcaagatcagtcacttgatgtggcctcttactggcaacaatag

SEQ ID NO: 8985 - DNA, 2423 bp, Homo sapiens
  SIMILAR (479)..(1723): 601254mologous to Homo sapiens dJ73M23.3 (KIAA0319),accession number AL031230,Smith-Waterman Score=1025.
gcccaggttatctagtgtcctctcagaatttataactactcatatttattttttgctctcagaaacaacctacaactatgaatggaatttaataagcctctacgtagtggacccatcacgtcttgcatgttgaactgtacaacttttctttatgttacagttgtccgtcggactttatgtcttcaatgtgggtaatgacatatgcctacacaagatgggctcagtcactgtccttttttttgttacagccagaagagtcaacctgccacctgtagcagttataaaacttatgtcttcctcttcttgtatttcattcttgtctttatttcttaatcttgtagaaagtacagatgatactgaaatagtgagttatcattgggaagaaataaacgggcccttcatagaagagaagacttacttgtgcttctttacttttttgttttgttttgtttttatttttgtatttgctattacttagggagtacagacgccataccttcatttatctgcaatgcaggaaggagattatacatttcagctcacaggattgcagacttaatgcaaagagataatactttttcacactgtttctgtaattccagaaaacaatagacctccagtggctgtggccggccctgataaagagctgatcttcccagtggaaagtgctacctgcctgtcatattcaaaaccccatgccccctcccttatgttaaccacttctatgttttatagaggccccagtgcagtggagatggaaaatattgacaaagcaatagccactgtgactggtctccaggtggggacctaccacttccgtttttattctatcactggtgttttaaatcaatctctttgctttcattttgctatatttgacttagaaaataatagtcctcccagagcccgggctggtggcagacatgttcttgtgcttcccaataattccattactttggatggttcaaggtctaagaagcccagaaattgggacccgaggattgacagctgccctgtgatccgtgttctttcgcaggatgtcatcgatggctctgaccacagtgtggctctgcagcttacgaatctggtggagggggtgtacactttccacttccttatgctctaaagcctgtgcaaatgtccaagtgcaaatcctgtatcttctctttccccagaccctaggaagagtggcctggtggagctgaccctgcaggttggtgttgggcagctgacagagcagcggaaggacacccttgtgaggcagctggctgtgggcgtgtcatggtagtcaccatctgaccatgtggctgtcctctctcattgtctcctccacagcaccgtgattgtgttttatgtacagagcaggccgcctttcaaggttctcaaagctgctgaagtggcccgaaatctgcacataagctgaatccagggattcccttttctgcatgctgccctcagccctacacacctctttgcaggttgccttctgaagtgttctggccatggtcactgcgaccccctcacaaagcgctgcatttgaaaataaagttgttctacaaatagcctgtaactatgtccactttggttttcttgtgtttcagagtggagtatattctatgtgacagtgttgaaatcctagctctcagttacctttctaaagatctgagttgagcttttcattgttcctttcagacaaaaaaggactaaaatcaggaaaaaaacgttgaatatgtactaggtacatctcaagtactttacccattgaattctaatcctgcccatagcggtacgaggtatgtgcaatgattatccccacgactgacagctggaagtgaatcacggcgttcctcctcagatgcttctgtgcttctctctaggtatcaagcaccgaagcacagagcacaactccagcctgatggtatccgagtctgtgaggagttttgacagggactgtctgcaaagcctaaactatttactatctggccttttacagaaagaaaaaaatttgcagaaggctggactaacatcccctgctccttccctgtgggaagacaagtgttccggaagaactgagcatgctcagtcagctcgccttcctctgaaggaagacacggagaagacgctgatgcaattctgaaaggattacatctacgactccatcaggacccttgcttgggcttggggtgatgttaccaaggaacgtataaatgacatctggaagaagacactcaagaggttcatccgtgatttcaaaggatttgccaaggacaaggaggttgcaaaaaccaacaaggctgtggttgagatggcaaacaattttaacctgggggtggaagaagaagacattgaggagctcctacaggtggttcctgaggaactgactaatgaggagttgttggaactggaacaggaacacatacctc

SEQ ID NO: 8986 - DNA, 456 bp, Homo sapiens
  SIMILAR (103)..(213): 321254mologous to Equus caballus This CDS feature is included to show the translation of the corresponding C_region. Presently translation qualifiers on C_region features are illegal,accession number L38393,Smith-Waterman Score=64.
tttttttttttttttttaaacccaacatccattgatctttatttgatttgacaaaatctgcatttttaaaagacaggtaacaaaatctgaggttatactgaatctgacaaattgagttctatagtatctagaatatcatataagaaatatcaactgagggaaaagagaagtaccacatgcagatgctcctggcaaggggggaactgtatctgcaggtgaggtccagagtgtgcagtgcataagaaaatcctacagaaaatgccgttaacttacttggatgaaatgtttttcctttgagggggaggaagaggtggtaaagagcggccgctccaacatcagaatggtaataaaaatatttaaatcatggcactagggcacctttgaggaaaagaacatcttaaccagagtaggctcattgcataattctttagtaatatgtacaattttcaagtaatt

SEQ ID NO: 8987 - DNA, 396 bp, Homo sapiens
  SIMILAR (10)..(375): 881254mologous to Homo sapiens unnamed protein product,accession number AK025605,Smith-Waterman Score=639.
atggctaccgctaaagatcgaattcagtattatcaactagatgaagtctttgtttttccatatgatatgggaagtagatggaggaactttaaacaggtatttacgtggtcaggggtccctgaaggagatggacttgagtggccagtaagagaaggctgtcaccaatacagcttaacagttcgctataaagtaatagaagattatagtggtgcctgctgccctctgaataaaggaatcaaaaccttcttcacaagtccctgcaccgaagagcctcgaatacagctgcaaaaaggggaattcattttagccacaagaggtttacgatactggttatatggagacaaaattcttgatgattcctttatagaaggtatggaaatggaagggcatgtttaa

SEQ ID NO: 8988 - DNA, 502 bp, Homo sapiens
  SIMILAR (254)..(406): 271254mologous to Human immunodeficiency virus type 1 Tat protein,accession number U57291,Smith-Waterman Score=62.
ggtgtgccaaaaacacctttcctgatcatacacatataagtaaacacccataccgagttccccctgactctagttaggagctgtctttaaccacattagtccctattcgggatcatcaaatttgggaaatacctgttcctagcttgttatgaacatttaaaaatcttatttttttccccttcaaactgtgcttataatagatagcaaagtggggaataaaagtctaactacaagcttattaatttgaagtaataggacttactgctttcagtaatgtcactgtcatccatcagactatttcacctcaatttcattttctccctcaggtgtttcaagaataaggggttggttccctagaaaatgtgtggaaaagtgtccctgtgatgctgaaacagatcaagccccagagggggagaagaaaaatagatagctgctgttaaaacaaaattatcctttaagtctgcttaattacttgaaaattgacatattactaaagaaatat

SEQ ID NO: 8989 - DNA, 1089 bp, Homo sapiens
  SIMILAR (311)..(219): 1001254mologous to Mus musculus putative v-SNARE Vti1a,accession number AF035209,Smith-Waterman Score=156.
ctaaatgagggccacatggtcactctcttgacatgtcactctcttgttctcttgacgtttaggaaccagcctgagacttctgtcttcagtcaagtcctcctgtctgttttccactttgagttgagaggaaactccttggttctctcctcttgttcccttacttggactcataaacctctttaagacatcatccatctcctccagaactaactggggacaggcgggagtcgtgggaccctcgcaatcttgctggtgatctctgcagtgagcaccgcgaagtcctgctcgtaaccttcgaagtcggacgacatggcggctccggaacgagtagcccaggccaaagccggggacagctctcaacccagccgcttcctggttgttcgtcgcaatctcggttctccggaaattgggttgcgtgcgtgctttattttccgctccgactttaagataagtaagttcgcaaaggaaaagcgccccaattagtgcctccccccagaaaagcgtatgaaaatatgcaagttctgagggatcattagaagcgttttttccccccttcgtgttctgggaatcggctccggatccacacgctacaaggcacagcagcttgcttccggagggaggtttgaggcggcgaacctccggaagtgacagtaacagagactgcgcagggggcctgagcgggagagtcctggcgagggcgctggccgagaggtgctcggcttgtagcaggtcccgcactccagcctctcgctgccagggtttgctctctgcttgtcctgggatacaactggaggaagtgtgaatttcatcatgttgataaattggactgtcatgattctttataattacttcaatgccatgtttgtcggtccgggctttgtccctctggggtggaaaccggtaagaaagattcataaccaaacattttgtgcgtgtgctattgttgctgcgatagctctcctttgggtggaacacagtgaagatcgacatgagtgcagcccggagagatcctcttccaattgttccatttggattagctgcatttgctaccaccttgtttgccttgggattagctttaggaacaaccat

SEQ ID NO: 8990 - DNA, 817 bp, Homo sapiens
  SIMILAR (194)..(445): 891254mologous to Homo sapiens unnamed protein product,accession number AK025605,Smith-Waterman Score=435.
ggactaccgctatagcgatagaccctaccattgcacttactgattgattgactgggcctgcagcttcatggtcctggggcttaaatgtggacagaattaaggcccctctactcattcgactgactcttcactggtactcccaatcacatcaataaccgtcacaatctaaactgatgtggatgggaatatgggaattaggcaggataccatggatgaacagtattgtaaagtctgccaagcatacaaggcaccacgttcacatcactgcacaaagtgtaacacatgtgtgatgaagatggaccatcactgtccttggatcaacaactgttgtggttaccaaaatcatgcttcgttcacactgattctccttttagcaccactgggttgtatccatgctgctttcatttttgtgatgactatgtacacacagctttattcattcgggatggaaaataatttcttcaggaaacaaaacttctatttgagttcatgggattggaaggaggaagggctaaaggatccggatttcagtattatccaactaggatggaagtcttttgtttttttccatatggatatgggggaagtagatggggaggggactttttaaacagggtattttacgtgggttcagggggtccctgaaggagatggacttgagtggccagtaagagaaggctgtcaccaatacagcttaacagtgagtatttttgttcaaatagcccttcctttttgcctcgccttctttcccttaactccccctcaactcaagtgacattttgtagtaaaataagtaatatgaatgttttcactatgg

SEQ ID NO: 8991 - DNA, 1581 bp, Homo sapiens
  SIMILAR (1316)..(585): 471254mologous to Homo sapiens unnamed protein product,accession number AK025605,Smith-Waterman Score=416.
  misc_feature (1)...(1581): n = a,t,c or g
catgaaggccactaaatttaatgggagctgtttgtctttttatacccaacatccattgatctttatgtgatttgacaaaatctgacatttttaaaagacaggtaacaaaatctgaggttatactgaatctgacaaattgagttctatagtatctagaatatcatataagaaatatcaactcgagggaaaagagaagtaccacatgacagatgctcctgggcaaggggggaactgtatctgcagggtgaggtccagagtgtgcagtgcattaaggaaaatcctacaggaaaatgccgttaactttactttggatgaaaatgtttttcttttttgagggggggagggaagagggtgggtaaagagggggcagggattttcaaagggcatatggcaggaatgggctttcttccctttttccaaaatgggtaataaaaatattttaaatccatgggcactagggcacctttggaggaaaagaacatcttaaccagagtaggctcattgcataattctttagtaatatggtacaattttcccggtaattaagcagacttaaaggataattttggttttaacagcagctatctatttttcttctcccccctctggggcttgatctgtttcaggcatcacagggacacttttccacacattttctaggggaacccaaccccttattcttggaaacaccttctataaaggaatcatccaagaattttgtctccatataaccagtatcgtaaacctcttgtggctaaaatgaattcccctttttgcagctgtattcgaggctcttcggtgcagggacttgtgaagaaaggttttgattcctttattcagagggcagcaggcaccactataatcttctattactttatagcgaacacttctgactctcttatctgcttttttgtttcaactgttctattgttaagctgtattggtgacagccttctctttactggccacgtcaagtccatctccgttcagggacccctgaccacgtaaatacctgtttaaagttcctccatctacttcccatatcatatggaaaaacaaagacttcatctagttgataatactgaattcggatctttagccttctcttcaatccatgactcaatagaagttttgtttctgagaattattttcatctggataaaaaacaacatcccaacagctatggttgttcctaaagctaatcccaaggcaaacaaagtggtagcaaatgcaagctaatcccaaatggaacaatttggaaggaggatctctccgggncttgcacttcatgtcgaatcttcacctgtgttccaccccaaaggagagccgatgataaagctgtgtgtacatagtcatcacaaaaatgaaagcagcatggatacaacccagtggtgctaaaaggagaaacagtgtgaacgaagcatgattttggtaaccacaacagttgttgatccaaggacagtgatggtccatcttcatcacacatctgttacactttctgcagtgatgtgaacgtggtgccttgtatgcttggcagactttacaatactggagatacatggtatcctgagaaattctcgg

SEQ ID NO: 8992 - DNA, 789 bp, Homo sapiens; identical to SEQ ID NO: 3389
  SIMILAR (310)..(639): 661254mologous to Homo sapiens dJ138B7.3.2 (lethal (3) malignant brain tumor (l(3)mbt) protein (Drosophila) homolog (isoform 2) (KIAA0681)),accession number Z98752,Smith-Waterman Score=382.

SEQ ID NO: 8993 - DNA, 984 bp, Homo sapiens; identical to SEQ ID NO: 3390
  SIMILAR (469)..(717): 471254mologous to Homo sapiens dJ138B7.3.3 (lethal (3) malignant brain tumor (l(3)mbt) protein (Drosophila) homolog (isoform 3) (DFKZp586P1522)),accession number Z98752,Smith-Waterman Score=179.
  misc_feature (1)...(984): n = a,t,c or g

SEQ ID NO: 8994 - DNA, 867 bp, Homo sapiens; identical to SEQ ID NO: 3391
  SIMILAR (658)..(807): 641254mologous to Homo sapiens dJ138B7.3.3 (lethal (3) malignant brain tumor (l(3)mbt) protein (Drosophila) homolog (isoform 3) (DFKZp586P1522)),accession number Z98752,Smith-Waterman Score=165.

SEQ ID NO: 8995 - DNA, 1740 bp, Homo sapiens
  SIMILAR (1031)..(1120): 461254mologous to Cloning vector pBACe3.6 levansucrase,accession number U80929,Smith-Waterman Score=67.
atgaaagagaaacctgctgttgaggttcgactggataaatggctatgggctgcccgtttttataaaacccgcgcgctggcccgtgaaatgattgaaggcggtaaggtgcattacaacgggcagcgcagcaagccgagcaaaatcgtcgagctgaatgccacgctcactctgcgccagggaaatgacgaacgcacggtgattgtaaaggcgattactgaacagcgtcgccccgccagcgaggcagccttgctgtatgaagagactgcggaaagtgtagagaaacgcgaaaaaatggcgctggcacagatgattatgccgcaacatgaccaattacatcgctatctgtttgaaaactttgccgtgcgcggcgaactggtaaccgtttcggaaaccctgcaacagatccttgagaaccacgattatccgcagcccgttaaaaacgtgctggcagaactgctggttgcgaccagcctgttaaccgctacgctgaaatttgatggtgatatcaccgtacagctgcagggcgacggtccgatgaatctggcggttattaacgagataaatgaacgtgcccagaatcctctgctctgtgccttccgatgtgtgaacacttatgggtcatatgaatgcaaatgtcccgtgggatatgtgctcagagaagaccgtaggatgtgcaaagctgtattcccatattgtcagaatgagagctcagatgttttatggcaatttgactccactagtcagatcttcctaaagggtactcctaaaaccacggtaaggagaggtggagagcacaacctgaagaaccccgatgagtgtgaagataatcccaatatctgtgatggtggtcagtgcgcgggtatccctggaagaaacaggtgcttgtgttatgatggattcatggcatctgaagacatgaagacttgtgtagatattgatgagtgctcccttccgaacatctgtgtctttggaacttgccacaacctccctggcctgttccgctgtgagtgtgagataggctacgaactggacagaagcggcgggaactgcacagaggaccccgaccactcaaaatcacggagtggaagatcacaaaacgattggggacggaggaggaaaacatataaaaacgttcagcagtttatcgatgaaggcaattatacatccggcgacaaccatacgctgagagaccctcactacgttgaagacaaaggccataaataccttgtattcgaagccaacacgggaacagaaaacggatgcggaggcgaagaatctttatttaacaaagcgtactacggcggcggcacgaacttcttccgtaaagaaagccagaagcttcagcagagcgctaaaaaacgcgatgctgagttagcgaacggcgccctcggtatcatagagttaaataatgattacacattgaaaaaagtaatgaagccgctgatcacttcaaacacggtaactgatgaaatcgagcgcgcgagtgttttcaaagtgaacggcaaatggtacttggtcactgattcacgcgggtcaaaagtgacgatcgatgggattaactcaaacgatatttacatgcttgggtatgtatcaaactctttaaccggaccttacaggccggttgacaaaacagggcttgggctggaaatgggtctggatcccaacgatgtgacattaacttactctcactttcgagtgccggaagccgaggcggcaatgtgggtgtcacacgcgacgtga

SEQ ID NO: 8996 - DNA, 1746 bp, Homo sapiens
  SIMILAR (96)..(995): 251254mologous to Ensis minor nuclear protein,accession number L41834,Smith-Waterman Score=208.
  misc_feature (1)...(1746): n = a,t,c or g
atgacgacaagtacgatgacacatatgatgacgatgcactttcctatcatcgtctgtgctgacagtagagatgatgtcgatgtcactaatgatgtgaacgatcacgacgacagcgcgaaaagaaagtcacatagagagagaccaatcgcagccaagagaacggagacaaagaacgacgacgacgagcgcgaccgaaacgagcacaaaagcgcgttcatagagcgcgaaataacagacggcacaacatacgcgaacaacggcggcgattataatgcgcgacacacaagcgaggcgcgtataaaggccgacaaaacacgccgcagaacaacggcaaaataccacgggcaaacagaggcgctaaacaaagcgcgtaaaagcggcgaagaaggagggcgaataacgacggcgaaaaatggcgcgacgaacgacgccacaaacgcggcgataaacacgcgcgaaacgacgcataaatcggccgagacacggcgcgaaaaagcgcgcctaaaatggcgcctaaaaagcgcgccaaagaggcaccgcgtaaatagacgcgacgaaaacgcgcggacaacaacgcggcataagaaacggcgaaacaggcgcgtaaaacgagccgaaagaagcggagctgaacgaacgccgtacaaacagcggcaccaacagacgcgcgaaaagagaacgtgtaaacgacggcaaacaaaggtcgaacgaaggcgaaatagacgtgaagagaccacgaaaacgacggaacgagagcgtacaacaagacaccaaagaaagccgcgaaaagaacgcgtaacaatctacggatacataacgccacaaaaggcggcgacaataggggccagacgagacgcgcgtgaacaaagccgcgcaaataccgacccgacgaaaatcggtataacacaagctcgcctgaacgaacgccgagaaagcggcgcggaaaaagtgagcaagagacaagactgcacaaagggcgcaataagcggaccggtacaactccaggaagacacaacaacgactataaaagggacacacacacaccgagcggtaaagacaggcgaggatgcacacaagacacgctcaaaacctcgatactcaacactctacacgactctgcaatgcgtgatcgacgttcacgatcgacgctcttcgtctacgatgtgtcatcgatatgatcaactatattcgcggtctcacgctctcactatgatcatcgttaacaaanctcttcgacaatgtatacgtatgctgtctttccatgatcgtcatcgatcactagcgatcgacggtgactccgcctctacaggatcccctgccttccgatgtgtgaacacttatgggtcatatgaatgcaaatgtcccgtgggatatgtgctcagagaagaccgtaggatgtgcaaagacacgtgtacggaaaaggcgtttcctgctggtggttgcgaggtcgacaagacacatacggtgccacaagagcgggcgtacatccatcgtacaagattaggccgcgcgcgcacaaagaagagagacctataccggcgcgcacataacgaccgtcgacgacaaaagagcgccgcttactatgagagcaccagtgtacgacgcgcgcacaaatataatagcgggaagtccgacacccagaatggaagtcaccaccgtcaaaaattgcgtcagtatggggatgccggaaaaagtcattatctgcagtacaacatccattttatgtatcctttattcaatacatga

SEQ ID NO: 8997 - DNA, 1675 bp, Homo sapiens
  SIMILAR (42)..(290): 631254mologous to Homo sapiens Human secreted protein, SEQ ID NO: 7870,accession number G03789,Smith-Waterman Score=248.
ttttttttgagatgaagtctcactctgttgcccaggctggagtgcagtgcagtggtgtgatcttggctcactgcaacctccacctcctggagtcaagtgattctcctgcctcagccttcagagtagctgggatcatagatgcccgtccccatgcctggttaatttttgtatttttagtagagacagggtttcaccatgttggccaggctggtctcgaacttctgagctcaagtgatccacccaccttggcctcccaaagtgctgagattacagcatgagacaccatgcccagctgtgagcctgtatcttaatcaaagtcctgagaataaccttgaagaagactcccttgcaatgagcaacaacagaagaagcaagggacctggaatctggcaaaaccctgggtttgaaatcctggctctgtcaactttcctggttgaaagtgacttgaagtaatgaaacatgaaccctttcctgggtagcgttttacagcacaaagcaaatttgaggaataaatgaaagaagcacgtctaagtgcctaagcaatgcgctggacacagtgccggtgctcagccatcatgtcacaccagcactgaccggtgagcataaacccctggggatgcccagagctggtacagccaggagctccagaagcgtgggattctcagagggaagtggagctcactgctctacaggtcctattcaagttagaaagtaagatacaatgcacacaaagccaaattgtcatcattcagctcctattacaggggaactaagagctgcattgaaaattacttgcaaagcttgtaagtggttctgccacttattagccgtgtgaaccttagcaaattacctagcatctctgagtttcaacttcctcatctgcaaaatagaaatgataataatagctgcatcgcaagagttgttggaaaaataaaaatgaggtatcataggaggtaacatgtatggagcatttaccataggccaagcactgttctaagaacttcggacatgttatctcactggtataagtacttaggtgcctacaacataaacagcacctggtaaattaagtattgaaaaaaatgctatggggcagaggaaggaatgctaagcttctgtgagaagagaaggcagcttgttgcacaggtgaaaagaacaagctgcagttgagagaagaaaagtataagagttgctaggtgtgacgatctcaggacttttcaaccactacaaatttaaacagccaccctaaatcaccccaaaggacagactcgagttgttctttttgtctttaatgtttgcgcctctccgaatcagagaagaagctgccaggattcccagtacatacccaaaccatgatgacaataccctcgaactgtgcaaacttttgtgcatctaccgctatgtaaaggaagctgatgtcagtaagactgggggtgtaccagtaggccatgtttgtgaccgaagctcaatttgccatcacagtgtggccacacctacctcactaatattttaatagtgggataaataattcaatagggataaagcctggattttcctcttattctctcttagtgcttacattcttggcatgatatcgatgtgccatagacaagccaatatgtgagtgtactctatttgaataaagtatagcctttttacattgaaaaaaaaaaaa

SEQ ID NO: 8998 - DNA, 447 bp, Homo sapiens
  SIMILAR (400)..(441): 661254mologous to Homo sapiens similar to ubiquitin-specific proteinase of S.cerevisiae,accession number D80012,Smith-Waterman Score=49.
  misc_feature (1)...(447): n = a,t,c or g
gttggggcattccgacgaggagaagatggcggcggcgggggaagcagcgtgagcagccggaggatcgcggagtcccaatgaaacgggcagccatggccctccacagcccgcaggacaagaatatcagagaattgagtttggtgtcgatgaagtcattgaacccagtgacactttgccgagaacccccagctacagtatttcaagcacactgaaccctcaggcccctgaatttattctcggttgtacagcttccaaaataacccctgatggtatcactaaagaagcaagctatggctccatcgactgccagtacccaggctatgccctctgtatggatggaagntctaatgtggaggcggaagttttggacaatgatggtgtctcaagtggtcttggacaagggagcgtaaaagaagaaaagcggcacctggatattacagtatttgg

SEQ ID NO: 8999 - DNA, 559 bp, Homo sapiens
  SIMILAR (154)..(351): 871254mologous to Homo sapiens similar to ubiquitin-specific proteinase of S.cerevisiae,accession number D80012,Smith-Waterman Score=295.
ttaggtaaattaatgtttattcataaggatttttaatgttatttgttattctaaaacttgcaaaaattccatctgttataggagttattgaaatagtcatagatgggtgtatgtgcgggggagaagatggcggcggcgggggaggcagcgtgacagccggaggagcgccgagtcccattgaaaccggcagccatggccctccacagcccgcagtatatttttggagattttagccctgatgaattcaatcagttctttgtgactcctcgatcttcagttgagcttcctccatgcagtggaacagttctgtgtggcacacaagctggggataaactacctcctgctgacggcacgggctctgcatcaggcacccttcctgtcagccagcccaggtcctgggccagtctctttcacgattctaagccctcttcctcctggccggtggctaatgtggaaactaagtatttccctcccgccatatctccctggtttctgtaagcaggttgagttcaagaaggggttttccagtttaaggggtcctgtagcaggattggtggtt

SEQ ID NO: 9000 - DNA, 1491 bp, Homo sapiens
  SIMILAR (14)..(805): 301254mologous to Human herpesvirus 6 U88,accession number X83413,Smith-Waterman Score=180.
tcataaatttttctgtctgtgttttggctcgttttttcctcggcgtcgttgtgctttgtgtgtcgtgctgttggtttcgttgcgtctgtgcttgtgtgtgtgctctggccttcccgttctgctcgtgttgtgtggtggtgctgtgtcctgttggttgtcggtggtactctgttcgcggtgtctgctgtttgtcgtttgtgcgctcttctgtggcttcttgcttcggttcctcttctgtttgtgtgtgttccttgttcggttcggctcgttgtcggtgtggtgcttggctcttggtgccgtggtgtgctttccaccttgctctgttgtcgcgtcctgtggttgctgtgattgggtctggctttgctgtggcgctgtggtggctttggttgggcttctgtgttgtgtgctcgtgtgtgcttggtcctttcgctgtggttcgtggcttgtgtggtgtgtggtggtggttctggtggttcgttgctgtggtgttggtgtggttcgtgcgtagtggactgtgctggagtggttctggtctgttgtttcgttggtggtccttatgatgtcgttggtgggtgccgcgtgtattcctggtatggggtctgctgggtctgcagtgttgtgtgtcgtgtcattgatctcgtccctgttgtttgtgttgggtgtcacatagcgaggatgttggtctgtgtggtgtatgtcacttgttgtgggtggtctgtggtctggcggtgatgtagttggtgtcggtgtgttgtgcggcttgtgtgcctgtgtgctgtttgattcatattgcgcgtgtgtatgcttcgagtgtgcggtggggggttttgtcggtggttgcttccttgggagttgcctgatatgattgctggctgcgggctgtggagggccatggctgcccgtttcattgggactcgcgatcctccggctgctcacgctgcttcccccgccgccgccatcttctgcccgcacatacacactcgcatcggccgccgcgcctgcgcactggccgccgccgcggggcgcggggaggccggcccgctgctgcgcccaccgcagataaccctgtgaacatgtgatgctgttgttgcgtccatctatcgtaagaagttgcgcggtgtgagttactccatgtcgggtgcccgctgttgcgccaaaaccggtccatactcggaaacaggacgcgggcctaaatagtatagtgggaatccgcactgatacagaatttgatgcctcggtggttgttggacattgatgcgcgcttgtaacgggttgtggtgaagtatgtctccagacgttgaatctggattgtggtactgggcgccatacgagcacaccataaccgattgttgtgctaacaaaggtgatgcacgcctttcgcactggtggtgtaacgcgcccaaagccaaccaaggccatccattgaaccataattttaacccaccaggctcttggcgatagagcttggcggtcgtgaaaaattgcccccat

SEQ ID NO: 9001 - DNA, 2629 bp, Homo sapiens
  SIMILAR (2445)..(4): 921254mologous to Homo sapiens similar to ubiquitin-specific proteinase of S.cerevisiae,accession number D80012,Smith-Waterman Score=3846.
ttacagcaggtccactcggcggtaatacaggaggtaggctgtgcgttcagcagttggtttcaccacctggtactggttgatcaccttgactgtctggtcatcgatgcgcagccagccattcagaccgatctggaagacgtctgtagtgtaatggccgcccgtcgcactgttgccgtgatggtagaccactgcaaagagccgataggttcggtggcatttaaaattcttatttttaacccctggagaaagcagttctttactaatttccaagtccacaggatattcaatatttttgataagcttctggcacccaccagtcttctcataaacgaatcgtttcaggtgcagcacgaggacaggagggagtttttccagagtcactcttcgacttatctcaacctcttgtttggtttttgtggtataaccttggacagattctcttgccaccaagctctccagtgcatcctggactgtgcgtatcttgtctgactggatatccaactgcaacgtgaaaaatggctgcaaagtggcagattcttttgaactctgctggtaaaccacagacctgatgtgtccaccaaaaatgccggtgattggagtctgaacaaaatccgcctggcgggtgacggaagtcttgttccgggggcccacttgttcccattcatcctcgcttccttcaccttgttcttcctgctcttcttcattgaccgagtggtttttggggccgttggaaatcgtaagtttttcattacttggtgagagaagcttctttaggttcaacatttcctcatgaagtccatttagaatgaagcctaagtattcctcagcatcttcttgtcgacccttttcagacaggcttgacttgttaactgtcaggagtctgtaaatatatgtgggctcaaaggcagctccagggcgaatatccctcacgattttatctccaagagcttgtcggggttttggaggtactggcatattagtgaactcattcattagccgaacaaagctgtctatcatgggtgttgacgtacaaggcctttgcactttggaatacagaggaatgaacttcatcaggtggtacatcggcgggcaagcaaccaatgcctgcagtgtagcattaatgtagcaccagttccctttattgatcagcccacggggttgcaacgacactggtttatggattagggttacattctccagcaactctgcaatctttatggctacaggatcctctgaaaccggaacaagcccttctttgacttcaacctgcttttcagaaaccaggggagatatggcgggaggggaatacttagtttccacataggccaccggcgaggaggaagagggcttagaatcatgaaagaggctggcccaggacttgggctggctgacaggaagggtgcctgatgcagagcccgtgccgtcagcaggaggtgatgcactctcgggtttggttgggtccaagtctatgctttccgtggtgtgcaactccaccccgttggtagctgtgccctcacccgaggattcaagtatttgtccattagcaactccaaggttttcagtagtatcggtaccaacgcagggctgagccccagctgtccttgacagggtgtctctgccagcctctgcagggaagcaggactgaccaaaatcagccccggggcccccctctggctgccctgcagtcctggtgtcactgccgagtgctccggggaaaggactgtcaggcacaatgtcactgacagagtctgtggagttctgggggctgttacaagtcctgggcgtaactgacgggggcatgtcacccataaattctgcatcctctgcactgacactgttcgggactgctgaattggcatggccattgaccagggcttctgtggagatactatcatcgccaccatctttcaaatagctgtaatatccaggtggccgctttttcttctttttacgctccctttgtccaagaccacctgagacaccatcattttccaaaacttccgcctccacattagaacttccatccaaagcgagggcagagcctgggtactggcagtcgatggagccatagcttgcttctttagtgaaacccacaaggggttattttggaagctgtacaaccgagaataaattcaggggcctgagggttcagtgtgcttgaaatactgtagctgggggttctcggcaaagtgtcactgggttcaatgacttcatcgacaccaaacctcaattctctgatattcttgtccatcaggtagtttatccacagcactgtgtgccacacagaactgttccactgcatggaggaagctcaactgaagatcgaggagtcacaaagaactgattgaattcatcagggccaaaatctccaaaaatatactgcgggctgtggagggccatggctgccggtttcaatgggactcggcgctcctccggctgctcacgctgcctcccccgccgccgccatcttctcccccgcacatacacccatctatgactatttcaataactcctataacagatggaatttttgcaagttttagaataacaaataacattaaaaatcgttatgaataaacattaatttacctaaaagaaaaaaaaagacaaagaaaaaaaagttttgccg

SEQ ID NO: 9002 - DNA, 747 bp, Homo sapiens
  SIMILAR (2)..(655): 591254mologous to Homo sapiens hnRNP G protein,accession number Z23064,Smith-Waterman Score=578.
agctcttgaagcagtatttggcaaatatggacaaatagtggaagtacacttgatgaaagactgtgaaaccaacaaatcaagaggatttgcttttatcacctttgaaagaccagcagacgctaaggatgcagccagagacatgaatggaaagtcattagatggaaaagccatcaaggtggaacaagccaccaaaccgtcatttgaaagtggtagacgtggaccgcctccacctccaagaagtagaggccctccaagagttcttagaggtggaagaggaggaagtggaggaaccagggaacctccctcacggggaggacacatggatgactgggaagagatagttaccgaggtccacctcgaagggaatcgctgccctcttgtagagagctccacctacacgagggcgcccccatcttatggtggaagcagtcgctatgatgattacagcagctcacgtgacggatatggtggaagtcgagacagttactcaagcagtcgaagtgatctctactcaagtggtcgtgatcaggttggcagacaagaaagagggcttcccccttctatggaaagggggtaccctcctccacgtgattcctacagcagttcaagccgtggaacaccaagaggtggtggccgtggaggaagccgatctgatagagggggaggcagaagcagatactagaaacaaacaaaactttgtaccaaaatcccagttcaaagaaacaaaaagtggaaactattctatca

SEQ ID NO: 9003 - DNA, 513 bp, Homo sapiens
  SIMILAR (147)..(305): 921254mologous to Mus musculus heterogeneous nuclear ribonucleoprotein G,accession number AF031568,Smith-Waterman Score= 255.
gttatggccagcaatggcagagtttaaaacctcccacccagttgagaaagtaaacttttaatacaagaattctgtaaattcagatttaaaatgttgtatatatacaatttatagtgttgccatattacctgaccattgaccctgcaggtaactcacgtagtgctccacctacacgagggcccccgccatcttatggtggaagcagtcgctatgatgattacagcagctcacgtgacggatatggttgaagtcgagacagttactcaagcagccgaagtgatctctactcaagttatgatagaatagtttccactcttttttttgtttctttgaactgggattttggtccaaagttttgtttgtttctagtatctgcttctgcctccccctctatcagatcggcttcctccagggccagcacctcttggtgctccgcggcttgaactgctgtaggaatcacgtgaagaagggtaccccctttctacagaagggggaagccctctttcttgtctg

SEQ ID NO: 9004 - DNA, 1582 bp, Homo sapiens
  SIMILAR (12)..(326): 1001254mologous to Homo sapiens Human hnRNP G protein,accession number W93958,Smith-Waterman Score=541.
cggaaaaaaaaatggttgaagcagatcgcccaggaaagctcttcattggtgggcttaatacggaaacaaatgagaaagctcttgaagcagtatttggcaaatatggacgaatagtggaagtactcttgatgaaagaccgtgaaaccaacaaatcaagaggatttgcttttgtcacctttgaaagcccagcagacgctaaggatgcagccagagacatgaatggaaagtcattagatggaaaagccatcaaggtggaacaagccaccaaaccatcatttgaaagtggtagacgtggaccgcctccacctccaagaagtagaggccctttccaagaggtcttataggtggaagaggaagaagtggaggaaccaggggacctccctcacggggaggacacatggatgacggtggatattccatgaattttaacatgagttcttccaggggaccactcccagtaaaaagaggaccaccaccaagaagtgggggtcattctcctaagagatctgcacctcctaagagatctgcaccagttcacagcagcagtggaatgggaggaagagctcctctatcacgtggaagagatagttatggaggtccacctcgaagggaaccgctgccctcttcgtagagatgtttatttgtccccaagagatgatgggtattctactaaagacagctattcaagcagagattacccaagttctcgtgatactagagattatgcaccaccaccacgagattatacttacccgtgattatggtcattccagttcacgtgatgactatccatcaagaggatatagcgatagagatggatatggtccgtgatccgtgactattcagatcatccaagtggaggttcctacagagattcatatgagagttatggtaactcacgtagtgctccacttacacgagggcccccgccattcttatggtggaagcagtcgctatgatgattacagcagctcacgtgacggatatggtggaagtcgagacagttactcaagcagccgaagtgatctctactcaagtggtcgtgatcgggttggcagacaagaaagagggcttcccccttctatggaaagggggtaccctcctccacgtgattccctacagcagttcaagccgcggagcaccaagaggtggtggccgtggaggaagccgatctgatagagggggaggcagaagcagatactagaaacaaacaaaactttggaccaaaatcccagttcaaagaaacaaaaaaaagagtggaaactattctatcataactacccaaggactactaaaaggaaaaattgtgttaccttttataaattccctgttaagttcccctccataatttttatgttcttgtgaggaaaaaagtaaaacatgtttaattttatttgactttcgcattgcttttcaacaagcaaatgttaaatgtgttaagacttgtactagtgttgtaactttccaagtaaaagtatcccctaaaggccacttcctatctgatttttcccagcaaatgaggcaggcaattctaagatcttccacaaaacatctagccatctaaaatggagagatgaatcat

SEQ ID NO: 9005 - DNA, 631 bp, Homo sapiens
  SIMILAR (2)..(385): 741254mologous to Homo sapiens core1 UDP-galactose:N- acetylgalactosamine-alpha-R beta 1,3- galactosyltransferase,accession number AF155582,Smith-Waterman Score=489.
gagttcctccattgaagacttagcactggggagatgcatggaaattatgaatgtagaagcaggagattccagagataccattggaaaagaaacttttcatccctttgtgccagaacaccatttaattaaaggttatctacctagaacgttttggtactggaattacaactattatcctcctgtagagggtcctgggttgctgctctgatcttgcagtttcttttcactatgttgattctacaaccatgtatggagttaggaatacctcgtttatcatcttcgtccatatgggttatttatacaggatattcaacctaccttacctgaacgtatactaaaggaaattagtccaagcaaacaaaaatggaaggatacaaaagtgaagtttagggaaatccttgaaagaaaatcatgaatgaacaaaggtaatatgtcttagcactgcactgaaaaaggacttctgcatttctgacatagaacactggaatcccagtgaggaattctaagtgaacattccttatagaaacctttcacatgaatgactataaactgaagctttaaatgagctgtgaagtgtgttaaaatgtgttttgatacagtaatatataaatatatctatatatatgaggaa

SEQ ID NO: 9006 - DNA, 1424 bp, Homo sapiens
  SIMILAR (840)..(917): 881254mologous to Homo sapiens core1 UDP-galactose:N- acetylgalactosamine-alpha-R beta 1,3- galactosyltransferase,accession number AF155582,Smith-Waterman Score=145.
gatacactttcgggaaatggcctctaaatcctggctgaattttttaaccttcctctgtggatcagcaataggatttcttttatgttctcagctatttagtattttgttgggagaaaaggttgacacccagcctaatgttcttcataatgatcctcatgcaaggcattcagatgataatggacagaatcatctagaaggacaaatgaacttcaatgcagattctagccaacataaagatgagaacacagacattgctgaaaaggctcgaggagaaagttagaattctttgctgggttatgaccggccctcaaaaacctagagaaaaaggccaaacacgtcaaagctacttgggcccagcgttgtaacaaagtgttgtttatgagttcagaagaaaataaagacttccctgctgtgggactgaaaaccaaagaaggcagagatcaactatactggaaaacaattaaagcttttcagtatgttcatgaacattatttataagatgctgattggtttttgaaagcagatgatgacacgtatgtcatactagacaatttgaggtggcttctttcaaaatacgaccctgaagaacccatttactttgggagaagatttaagccttatgtaaagcagggctacatgagtggaggagcaggatatgtactaagcaaagaagccttgaaaagatttgttgatgcatttaaaacagacaagtgtacacatagttcctccattgaagacttagcactggggagatgcatggaaattatgaatgtagaagcaggagattccagagataccattggaaaaggaaactttttccatccctttgtggccagaaccaccattttaatttaaaaggttatctacctagaacgttttggtactggaattacaactattatcctcctgtagagggaggagagctcaggttccttttctctacagtgaccattagacattccaaagcactgtcacttggtgtagctcagtgctcttggttactgaagcaacaagtgatctctgatgacaaaacaaagagaccagactttcctgaccgttccagaataatgaaagaaagggtccagatagtactttatgagagcggccaagctccagtggaatcctctccacccttaccaggctactgctctgccctctttgctacctgtttccaggtcaccaaaggtaatttctctcaagatccaacccaagctattctatatacacaagctgataagattgaaggctggatgagagcctctggggaaagggttgctgaacagcaaagtggacagacagctatggatggtgggaagaaggaagcagaatggaaaagaactaggaaagccaagtacagagatgatgtgtgttccaagcaccacccaccttaccccacccctgtcccgcccagcttagaggactga

SEQ ID NO: 9007 - DNA, 479 bp, Homo sapiens
  SIMILAR (1)..(240): 511254mologous to Homo sapiens DNA replication and repair associated protein (DRASP),accession number Y82741,Smith-Waterman Score=221.
cgctggagtggcatcactcggcagcacatgcgcaaggctgtccccttccaggtggcccagaaagagatccttaagctcctgaagggcaaggtggtggtggggcacgcgctgcacaacgacttccaggcgctcaagtatgtccaccctcggagccagacccgggataccacgttccacaaacttggggtcatagattgtccagtcactggctccctccctgtcagcacagcacagaggaaggggctaactgaatcttttaccacttctggcctggctccagaactttgttctagattccttaaaagtcggtagctgatgtcaaactcaattgagcagtagctttgatcccttggtctgggggtcgaaggaagatggcgctgttatcagcggggaaatgtactatttaagatcagctttgttgtaaaaccatttgttctagaataaaactcaattggaaacgtgaaaaaaaaaaaaaaaaa

SEQ ID NO: 9008 - DNA, 1650 bp, Homo sapiens
  SIMILAR (1)..(123): 681254mologous to Homo sapiens HEM45,accession number U88964,Smith-Waterman Score=134.
atcactcggcagcacatgcgcaaggctgtccccttccaggtgcccagaaaagagatccttaagctcctgaagggcaaggtggtggtggggcacgcgctgcacaacgacttccaggcgctcaagtatgtccaccctcggagccagacccggggataccacctatgtcccaaacttcctcagcgagcccggcctccacacccgggcccgggtctctctaaaggacctggccctgcagctgctgcacaagaagatccaggtgggccagcacgggcactcatcagtagaagatgccacgacagccatggagctctaccggctggtggaggtgcagtgggaacagcaggaggcccgcagcctctggacctgccccgaggacagagaacctgacagcagcacagacatggaacagtacatggaggaccagtactggcccgatgacctggcccacggcagcagaggaggagccagggaggcacaggacagaaggaattgagaagggggcggggctccctggctgggcttccggtgtggccggtaggaagtgggggccaggaagacagcgggcactccttcctgggcagggtggggcaggatgcagtgagccagccccaaggccaagaggaagtgggggcatctgttaccttgacaccctctgcacacagcatagccctctctctctccagggctgtgggttctttctcctgactcctgtggttttgctaatggcactttacagactccatggagatgtcaggtggaccatcttctagggcccagcaggagtagggaatgtgccaacagactgcccaggttgccgtggccttccccaccccccagatctcctgagtcatcatgctgtgctaatgaaagggatcatatcatcctctctggggatggtgggtggggatgtcaatatcctggagctcccttaccccaactcaatgacttgggggtaaagttctcttccttttgttgcctacctcttcctccactcatttgggttcagaataaacatgccctgaagttaaagaggagttaagtcctaaaggaggcatttcttccccacctccctgacctggaactctggctacagccattgtaggaactccgtgcctggcctgtcagctccctgctaggctacagtggaatagcagagcccacaggcttctcgtggggagttggctccttaacatttcttggcaacagaaagccccaggcacagctcatggaggagggaaggcaggtaagctttggatgagaactggcatatttattttgacccaaatcagggatttccccagtccacccagtaatgggctcttaagcaaaagtctgagaaacaagacagtggtttgaattctggggcctttgtgtaggattgtgcctgacctttatttatttattaacagcagggccactcgtctagggcagtggagtctgcgtgtctcctggggctggggcagggcattggcagttatgcagtggccctgaacctggtctggtgcccccgaacctggtctgatgccccctcagctctgtgacaatcactgtggctgttgggttttctcctatttctaaaaatgttctcttctttcctaagtgacagttttgaagtattggataacccaatagctcaggtcacacgggacg

SEQ ID NO: 9009 - DNA, 402 bp, Homo sapiens
  SIMILAR (10)..(363): 301254mologous to Homo sapiens Protein encoded by human UCP3 gene reading frame 2,accession number W81589,Smith-Waterman Score= 95.
atgctggagcctggccggcagtgctggggagcgtgtggacctgaaaccaggcagccgcgtccaggccccactgcgctgcgcgtactatggccggggaagaacaggcggcttgtgtgcatgaagacaggacccagtgtcggggggacaaagctgccccgcaagctgcccatctctgtgggccgccgcgagggtctggctcggtcagcacggcccccagagctagataatgtcctgtctgctccagttgccctggccctggggccccggaagacaccccagaggaagtggatgtcggtgctgcctccgcacacaggagcccccggctctgctgcagccacctcacccaccgatggcccaaacactgagagaggaagtcggaagacgtgggtggaccccagctga

SEQ ID NO: 9010 - DNA, 2073 bp, Homo sapiens; identical to SEQ ID NO: 6662
  SIMILAR (1930)..(1856): 481254mologous to Arabidopsis thaliana F24O1.6,accession number AC003113,Smith-Waterman Score=55.

SEQ ID NO: 9011 - DNA, 1956 bp, Homo sapiens
  SIMILAR (446)..(420): 1001254mologous to Homo sapiens junctophilin type3,accession number AB042636,Smith-Waterman Score=42.
tcaggcttcactgaggggtgagaagcgcaggtttacaaagctctggctgggaagaaattgagtaaccactcctcgcgattcctgctcacagcacgtttcctgctcgaaaaccagaagagcctccacgtcccgactagctctgtccacacatccattgcgcagctgtatgaggtgaaatccgcactgtcccatgaagactgtgaggggagttgccacccgcacacggcccaggagcgccagcagcttggggaccaccacaggcctcagggtctcttcagtccgacgggtccagctgtcgataaaaccaggctgctctcgggttaatgaaaactcgtcaaattctccatgcagcagcagccagccgggcacatgctgtcctgccctgcccgactgtgtgcagggaagcaggtcccctgggccatgaccaccaggataggcgctgagcctcccggcagcaggattcacaacagccacggagtggaagcagagccagctgtccagtggaggatgaacacacagcggggaagacatgggccgtgcaaccgcggctgccacagagaaagcgcaggagcagtgcatgctgcgtgagaagctgggcaccaggcagaaagcagagtccgggagccgaggggcagactggcttgcagcacttctgttcagcaccacgcactgcctggcagccacgagcgagcagagccctgctggggtgagggcctggccgtgcgcagatcctatgtagccaccgtcccacagcccttcattcccaaagcccttcattcctgcagcacaggggcacagactcttggagcagctggggttgagcacgttgcggggagcgcaaggatcccatgctgccgtactggacttgagctcatccccattctcctcgtcggactctagagcgacaggcaaggatttctggggcggggagaaggtcaagtcccaacgcagcaaccggggctcggccccgcccagccgcaggctcgccagtttctgcacggcgggctccgcggaggaggccggcctgaagttctccttgttctgggccttggaccgcagtctctgcaccccgaagccccggtcctcggggcggtggtcgtcccccaagccccggcaggcgccgcccttgctgtagcgtcttttctgggggtgcgtctccatcctcagcaagggtttcatctccatccggtagttgctcagcttctcctcctgcagctccagcagcctggagcctccggggctgtggttgctggcccggtggtgggaagtccacgtgaacacggggggtgactccgtccgccgctcccgcggcttggggttcccgggctgcttgcggcccgaacctcgggtgcggaagtcatccacgagcaggccgccgcgcagggcaccgctgcggacacccctggagcccccggcctgctcctcgccccagctgctgcgggcgcagtccccggcccggccctccaggagcatctggatgtccccgccccgctcctcgtccaccgacacctgcctcgagaagtgggcgaccttgttcctggcggcgggcgcgggcggcggggtggccgcggggctggtggggaagctctgcagggggctgtcgtcgggggtcaggtcggagggagtggtgcccttgcggtacagctcggggctctcctgctgcaggggtgtcccggtggacagcacctcgatgtcgtcacaggaggtctgacgcttcggcctctggtactccagcccgttttcccggtgctggaaggaaggggagaactctttggcagtgatcctggcgatccgcgcctcctcctgggctttctgagctgctgtgagggctgcctcggcctttgcccgagagtgggaggtccaaggctccgcttccttctgggtccacaccgcttccttccgggcgcacaccgcttccttccgggcgcagcccctccacacgccgcagcccttcat

SEQ ID NO: 9012 - DNA, 2280 bp, Homo sapiens
  SIMILAR (1133)..(1336): 331254mologous to Gallus gallus high molecular mass nuclear antigen,accession number D88440,Smith-Waterman Score=84.
atgacacggccagggcatacacgaacaaagagcgccgaaatcaaggcacaactgggagacaaccaagtgacggggcgcgccaagactcacatgaggactcgaaaacaaaagggcgaagggcacagaggcccacacgagggcatgcccgtagggcaagagtacagaacaagacaccacctggaccaacacgggaagaaacgaacaacaggggcccagaccaaagggagaacagacacaacgcaaaacagagagaaaaccaggaagagagcgacaggtgcaggtgttatcctcaccaccagggcgatggtgctaggatgtggggcctttgggaggactcccatctcgggcaaaggccgaggcagccctcacagcagctcagaaagcccaggggaggcgcggatcgccaggatcactgccaaagagttctccccttccttcagcaccgggaaaacgcacccgccccggggccacctcttggtgcctctgcccagcccatactacccagcactgctctcgcagcacccgccccagggcccgccctgtggtgcctctgccccgccttctgctctgctgcagagggcaccacctcccggaacacgcacactccacacgacctccaggaccaagggtgacctgcggaaccacaccctggctgccaaggcaaagtctcaaagcaatgctccgcgaggatcactattaaaaaagtctaatagcttctacaatatacctttaaaacaggtctcctgtttaattaccattagcaagcattcgaggaatgaggtgtctgtttatcagacatccagacccagggcagctgccacggatgtcccgcgtacgaccgagcctcagtgtgggatgcagctggagctgcacacgaggccattggccatcgtcctgctgtcctacagccccgagaggccaggggctttgagaacacagtcagggacccggatctcgcagcaaactcccgtggccgacagggccttgtggaggcctgaccccgtcatgctggagcctggccggcagtgctggggagcgtgtggacctaaaccaggcagccgcgtccaggccccactgcgctgcgcgtactatggccgggaagaccctctcaggagggtgtggctgcgtggatgtcggtgctgcctccgcacacaggagcccccggctccgctgcaccacctcacccaccgatggcccaaacaccgagagaggaagtcggaagactgggtggaccccagggcctccaggcttctggccttgcccacggcctcctacgagcaataccacaaccccactggggctcatggacagcgcacggcctggaaaagcaccggctcctttcacggacttccgcaccccttcggggctgctgctgcctggttgggccgtgagggcacggagagaggaggatggatgcgggtgagcgtcctcacaaagaagcgaggacgctggatgcccccacaccggcaaggatgctgaatgctcccacactggcgagaacgctggatggacgccctcacaccggcaaggatgctggacgccctcacactggtgaggacactggatggacgccctcacaccgagagacagacaaaaagaagtgtcaaagaagatgtggagaaactggaacccctgtatgctgctggtgggaaggaaggatgatgcagccccagtggaaacagtttggcagctccttaaaaggctgtgacaaaccctgtgcccacgctgcctccactgccgggagactcagggctgggggagacatgccctggtcaccactgcggagactcagggctgggggagacatgccctggccaccagtggtgagccagcgagacaggaccccacgcgcgctgacccggggacgccatggaactcactcgcgattcctgcacgcgcgctgacccggggacgccatggaactcactcgcgattcctgctcacagcacgtttcctgctcgaaaaccaggagagcctccacgtgccgactagctctgtccacacatccattgcgcagctctgcagcggaaggaccttcagtaaagacgctggtttgtaacgagagaagcgttccaaagtgtcacacgacattgtttattactaaaaggagcagaatttctttttaatcttgacagtgttgttttcgtaacagtatgatttaaactgttacattcatttaggaaaactttttttcatttcataagtaatcaagctatctttccagcttaaaagcaaagaaaaaaggctcagggtaactttttaaaccacttcatcaataag

SEQ ID NO: 9013 - DNA, 423 bp, Homo sapiens
  SIMILAR (103)..(273): 961254mologous to Homo sapiens HSPC335,accession number AF161453,Smith-Waterman Score=291.
  misc_feature (1)...(423): n = a,t,c or g
ggggccacgggtgctgtcctggagccgagagctgcnncnttcttggcgcgccctgcacacctccccggtctgcgccaagaaccgggcggcccgagtacgcgtaagcaagggggtaaccagttggagatctgtgccgtggtcctgaggcagttgtctccacacaagtactacttcctcgtgggctacagtgaaactttgctgtcctacttttacaaatgtcctgtgcgactccacctccaaactgtgccctcaaaggttgtgtataagtacctctagaacaatccccttttttccatcaagctgtagcctgcagagaatggaaacgtgggaaaggaatggtatgtgggggaaatgcatcccctcagaggactgaggcatagtctctcatctgctattgaataaagaccttctatcttgaaaaaa

SEQ ID NO: 9014 - DNA, 347 bp, Homo sapiens
  SIMILAR (230)..(346): 941254mologous to Homo sapiens HSPC335,accession number AF161453,Smith-Waterman Score=210.
gacctcgctgcgctcatgggtcgccgggcattcagatttgggagaagtagccccagaaataaaagcatcagagagacgaacagctgtggccattgcagatttggaatggagagaaatggaaggagatgattgcgagttccgttatggagatggtacaaatgaggctcaggacaatgattttccaacaggtgctgtcctggagccgagagctgccttgcgcttggccccccctgcacacctccccggtctgcgccaagaaccgggcggcccgagtacgcgtaacgagggggacaagccggtgacctacgaggaggcacacgcgccgcactacatcgcccaccgtaaag

SEQ ID NO: 9015 - DNA, 374 bp, Homo sapiens
  SIMILAR (10)..(264): 361254mologous to Homo sapiens HB9 homeobox protein,accession number U07664,Smith-Waterman Score=91.
gcggccgcgggaggaagcgaaggaggcgggagcggagacctcgctgcgctcatggcgtcgcccgggcattcagatttgggagaagtagccccagaaataaaagcatcagagagacgaacagctgtggccattgcagatttggaatggagagaaatggaaggagatgattgcgagttccgttatggagatggtacaaatgaggctcaggacaatgattttccaacagatcaggatactgggcccagagcttccaaacaacctgccaagggccacacactgggcagaagtgttttctttgtctttttcccattgccttttactaccatgctacttaaaaaataaaaagttattccatgtctggacaagaaaaaaaa

SEQ ID NO: 9016 - DNA, 883 bp, Homo sapiens
  SIMILAR (7)..(57): 941254mologous to Homo sapiens Hepatocellular carcinoma marker L4 peptide L4B (aa821-838),accession number Y06539,Smith- Waterman Score=83.
  misc_feature (1)...(883): n = a,t,c or g
ggaattcggcccatagacaagagacagctcctggatccacctggtgacctgagcagggctgcagcccagatggagaaacagggcgacggcttccgggcactggcaggcctggccttctgcgaccctgagaagcaacacatctggcacatcccaggcctgtggcacggagcacctcccatggccgcagggagcttggcctacagtgaagccatatttgaattgaagagatgcctactcgaaaacatcaggaacggcttgtcgaaccaaaacaaaaacatccagcacctcattgagctggatgagcgcggttgtgagtgtgaagagaaacccagttcaggtgtaggaggctgctgtgggaagccctgtctgatggggaacccgtgtggggctgtgctctggtgcctgagaatggctggtgcccaatcgacatgagaagacgagcaaaagacagagggtttggagtctcctcaaccagtgtttaaaagaggaagttgaccttcacagaccagcttcaggagatgttaccaagaatatcacagcccccagggtagggagacaagcagcagtttgttctgtctcagctcctgtcaaggatcctgcggggtgggccctctgtatagctgctctctgtcactggcccctggagtgggagcagcgtccttagtcactgcaggcccagncgggcaggtggtcccaggacaagaggtggggaagnttgncctgaaggaaggagaagtaggccttggttccccgccaaacccaangggctnccagggggncccagaattcaaggttgggggngtgcccctggggggtnaaagnaanccccnaaaggnanccgtttttttggctttnncnttnnnaagggttcccccnnancccc

SEQ ID NO: 9017 - DNA, 3719 bp, Homo sapiens
  SIMILAR (716)..(225): 391254mologous to Homo sapiens HSPC335,accession number AF161453,Smith-Waterman Score=179.
  misc_feature (1)...(3719): n = a,t,c or g
tttttttttttttttttcaagatagaaggtctttgttgaagagcagatgagagactgatgcctcactcctctgaggggaggcgttgtcgcccacataccattcctttcccacagtttccattctctgcaggctcaaggcttgatggaaaaaaaggggattgttctagaggtacttatacacaacctttgaagggcaacagtttggaggtggagtcgcaacaggaacatttgtaaaaagtaggacagcaaaagtttcactgtagccccacgaggaagtaagtaacttgtgtggagacaaactgcctcaaggaccacgggcacagatctcccaactgggttaccccggcggctttaaaaccagctgggtcaagccaggcagcctggggaagggtacccccacatgaactttgcgaaggaaaacatcctcccaccgtttcgctctgggggcatgggtcctctccatcccaggttacctgtgtgccagcgacagaccagcctttgacggtggggcgatgtgagtgcggcgcgtgtgcctcctcgtaggtcaccggcttgtcccccttgcatacgcgtactcgggccgcccggttcttggcgcagaccggggaggtgtgcagggcgcgccaagcgcaagagcagctctcggctccaggacagcacctccgactcgcagggacctgccgagtcgccccactcacccgtggccccagcaacccgctgcacacggaggccgccatcttgggccaagcggagcgcgggacgtaccacagcgcgcaagtccttggccaagcctctggttcgaatggtggcaagtgggctgtggatgaggtcgggggggatgtaagaggaggcgctggcactgacatggctgcccaggggtgagcccagaagccatgggagtagccgtctcaccagctcaatgagctgctggatgtttttgttttggttcgacaagccgttcctgatgttttcgagtaggcatctcttcaattcaaatatggcttcactgtaaggcaaagctcactgcggcccatgggaggtgctccgttccacaggccctgggatgtgcccagatgtgctgcttctcagggtcgcagaaggccaggcctgccagtgcccggaagccgtcgccctgtttctccatctgggctgcagccctgctcaggtcaccaggtggatccaggagctgtctcttgtctctgggcctagggccgggaacagatacatcatgaaggtgtctggtatacaaactggtagttgggcatgtgccccgttttttctaacctcagaaatgcatgcagaatagctgctggaatgtccttggtttcagctagactgatcacggtgacattgctcagtcccaggagcagagtggccaaggaagcctccagctcaaatctgtccccagctgacgtcaaggccccacctatcaagcccccggagtctatcaccaggatgtggtcacagcccaggtcctggctgaagccctcagccacctgtgatgagcttgcatgaagggccccctcgaggacctcaagttcttcccctgtggcaaacccgcagcccaaaccatggttgttgaggagtgtggacttgcccgtgccatggcacntcccgacggttgacagaaccaccagccttgaccgtctctccagtcggacgtgcagctccttcaggagccctgtgacccagcggacgggcatgttcaggcgtgctcccatcgattaggctccagaggcagccctgtcagcagcagctccgaggccaagcctgggaagtgggcaaaacgcctctggcctgccggcagcctccctgcctccacaagacagctctcagcctcataaaactgtcccatctcccgcaagaagtgttccacccctaggggctcaggccagagcggctcccccacgtctgtggtgcccccatgctttggtctcagggtgagaagcgtctccggaggctgtctcagtcgcggctgggccacccgtgccaggccccactccatccacctcaggaagtactgcttctcactcaaggaggggctgctgatccccgagatgaactcctgcacccccgaggagggatcatggccgttctgctgcattcgaagttctagcagccgccgcctcagctcagccctgtgcttctcaggggggtccacggcccactggagctggcagaactccttctccacttgggctgcctttctccaggggtccccctgcagcctcagctcgtcccttctgtaggcatccgagtctttgattttcctggtaatcctctccatccggtctttcgctttctgacactcctcacagtcctcgtcgacctttaggcccagtttgcgggctgcgtgcgccatgtcctccacagatacccgcctgcagggtgcccgcagcacattcccaacgatggcccggatcctcttcacgaagctgtcgctgtcagtgctgctgacctttaccaggacatgtgagtggtctattttcagcacaggaattaacttattcagaaatctcaggtttgtgttgcgcttcccacggtagggactcaggatgaagtagtattttgtggttgactccttcatggagtacagcaatttgtattccttcttactgatattgtcagtcaatataaacacagcggaggagatttctgtcaagagcttaaactgcagccagtgagacccgatgtcacctctcaggttcagaaaggccacaggttctgggaaaatgtccaagtcctcccttccgctgggaaaaaaccaggaaatttctaccaacccatccgaaatctcccgggcattggtgcccaagttgaggtcccgatgccagaagcagtcccactgcctgtggcccgggctgaggacggcgttgagaagctgggacttggagttgctactgacgtccatgcgcacgaaggcgaaggcgggcgccctggacaagaccacgctgtcttcccggaagctccccatgccccttgggggctgggaccaccatgtcctcacaatgccccgcatggcccacagcagaaatgtatggtagtggttctccgagtcaggcaacacgagtgggagtgcaaactggcagagggccattttcaacgctatttcttgttgcaggaaactgtctgaggagagcagcagggcacagagaaggtctaaggggttcactggcgtatcaggggtgggcagctcagaaaaggaataaatgtcggcagcaaggtcatcagctgggtcccagtagatgatctcctcttccatctggctctccttctccacaggcctggcgtctgggagcacgtccagcaccatagtggtattcctggcatcagcattgagggcctgcaacttcctgaggaaattccagggcaagtctttgggaacctgaggggcccagttcttcatactgtcaaaactgatctgcagagagtcctggaggctgagtttctggacctggtacgtctctaggcccaaaagtgacagcatttcttgaagcctgcttctctccactgttggaaaatcattgtcctgagcctcatttgtaccatctccataacggaactcgcaatcatctccttccatttctctccattccaaatctgcaatggccacagctgttcgtctctctgatgcttttatttctggggctacttctcccaaatctgaatgcccgggcgacgccatgagcgcagcgaggtctccgctcccgcctccttcg

SEQ ID NO: 9018 - DNA, 742 bp, Homo sapiens
  SIMILAR (624)..(424): 281254mologous to Methanothermobacter thermautotrophicus DNA- dependent RNA polymerase, subunit H,accession number AE000876,Smith -Waterman Score=80.
  misc_feature (1)...(742): n = a,t,c or g
aagnagcantagattatgggaanaaaantctgggaaaacggaaaccggtaatccccctccggggttaaaccngccttgaacccaagngtccaggngaaagccctttatatggantatccggcatttatccaaccccgttngtcgggaaatgggattacancgtgtgagcccacaatgcccagcctgtaaatttttacacatttaaattcctgacaangtgagggatatgtataatgtatacatatataccaaagtgaggtaaatgtataatgacatttgcattatacagatacatgccaagggttccagtaaagtttggccagcttcccttagattgtattgcccagtggaatggccagaggccatttatttaaacctccgaccttacccctatagccggggagacccatggccagagtctcagtaggtggttgattgttgttactgatggctcttcctgagcatgtgaacccatggtcctcttctgcctcctagcactgctgctgcaggacttgttcctcgggtcttatcccagagttctggctgcatttgacattcaggtattcttcttgggcacttcagatagaatgtaaaacacaggttcttgagtactttatgcttaactcatggctttggctactcaataggttatgatcttggggtgaattatgccattttatcccacttcactcacctgtaaaacggggattaaatttttacctccaagagttctttatttaaa

SEQ ID NO: 9019 - DNA, 678 bp, Homo sapiens
  SIMILAR (327)..(461): 311254mologous to Schizosaccharomyces pombe actin-like protein,accession number AL136235,Smith-Waterman Score=57.
ggcacgagagtgaatatgatactaatgaagatgggtttttcagggattgtggtccatcaggagtctgtgtgtgccacctatggaagtggcttaagcagcacgtgtattgtagacgttggggaccagaagacaagtgtatgctgtgtggaggatggggtgtctcatcggaatactcggctttgtctggcatacggaggatctgatgtgtcaagatgtttttactggctaatgcagcgagctgggttcccttacagagaatgccagttaacaaataaaatggattgtcttcttctgcaacaccttaaagaaactttttgtcatttagatcaaggacatctctgggcttcaggaccatgagtttcagattccgacatcctgattctcctgccctgctttaccagtttcgattaggagatgaaaaactgcaggctccaatggctttgttttaccccgcaactttttggatttgttggacaggaaaatgacgacctttgcacacagatctcagggcgatcctgaagatcctcacgatgaacattacctgctggccacacaaagctcacgagaacagtctgcagaagctactgctgaccgaaagtctgcatccaaacctattggatttgaaggggatcttcgtggccagtcctctgatcttccagaaagactccattcccaggg

SEQ ID NO: 9020 - DNA, 2226 bp, Homo sapiens
  SIMILAR (245)..(1141): 311254mologous to Schizosaccharomyces pombe actin-like protein,accession number AL136235,Smith-Waterman Score=359.
atggtcctcttctgcctcctagcactgctgctgcaggacttgttcctcgggtcttatcccagagttctggctgcatttgacattcagcccctgcgccgggcagccccacccccgccttttcggagccctctggggcgactccgcggcggccatcttgactgtgggcagccggccgtgcgcctgcgcggtggcccttccatcccggcagtcgtggctgcagcgctgaggcgagaggctgagatatggtgttacggagaacggaaaggagaagggcggcgagaaggagaaggagcagcgcggcgtgaagcggcccatcgtgcccgcgctggtgccggagtcgctgcaagagcaaatccagagcaacttcatcattgtcatacatccaggttcaacaactttaaggattggtcgagccacagacactcttcctgccagcattcctcacgtcattgcccgaagacacaaacaacaagggcagcccctatacaaggacagatggctcctaagggagggactaaataaaccagaaagtaatgaacaaagactaaatggccttataatggtggatcaagcaatatggtctaataagatgtccaatggtacaagacgcaatcctgtgtcccctgaacaggcacgctcctacaataagcagatgcgacctgcaattttagatcactgttcgggaaataagtggacaaatacatctcatcaccctgagtatttagtaggagaagaggccttgtatgttaatccactggactgttacaatattcactggcctatcagaagaggtcagttaaatattcacccaggccctgggggctctcttacagctgttctggcagatattgaagtaatatggtctcatgcgatacaaaaatacttggaaatcccactgaaagatttaaagtattatagatggatcttggtaattcctgatatctataataagcagcatgtgaaagaactagtgaatatgatactaatgaagatgggtttttcagggattgtggtccatcaggagtctgtgtgtgccacctatggaagtggcttaagcagcacgtgtattgtagacgttggggaccagaagacaagtgtatgctgtgtggaggatggggtgtctcatcggaatactcgcatcttttcctggagatcaggacatctctgggcttcaggaccatgagtttcagattcgacatcctgattctcctgccctgctttaccagtttcgattagaagatgaaaaactgcaggctccaatggctttgttttaccccgcaacttttggaatcgttggacagaaaatgacgactttgcagcacagatctcagggcgatcctgaggatcctcacgatgaacattacctgctggccacacagagcaaacaagaacagtctgcaaaagctactgctgaccgaaagtctgcatccaaacctatttgaatttgaaaggggattcttgtgggccagccctctgatcttccagaaagactccattcccaggaggtagatttggggtctgcacagggagatggcctgatggccggcaacgattccgaggaggcccctcactgcactgatgtccaggaagactgccatctcgctgtttgaaggaaaagccctgggcctgggataaagcccatcctccatagccatagactgctgttcatctgacgacaccaaaaagaagatgtacagctccatcctagtggtgggaggtggttttgatgttttcattaaagcttcaagaattttttgcagcacagaattctcaacaaaatgcccaccatcccttcaggccgattatttgaaaatgtggatgtgatcacaaggcctaaaggacatggacccccggctgattgcatggaaaggaggggcagtgttggcttgtttggatacaacacaggaactgtggatttatcagcgagagtggcagcgctttggtgtccgcatgttacgagagcgggctgcgtttgtgtggtgaatggggaggaaatgtcactgccgaagaccaaaaacattgcttcttggtataaaagactcttacagaatatgtgtattgtaatttattgatctggatgcttaagtgtcatggacagtaaatgaatttgaactttatgttgaggacatgacattggtttgaaaatataaactgcttttgagcagtttagtcatggcatttgagaataaataggaactttctcttcagttgtaaaaaaaaaaaaaa

SEQ ID NO: 9021 - DNA, 759 bp, Homo sapiens
  SIMILAR (316)..(741): 581254mologous to Homo sapiens similar to ankyrin of Chromatium vinosum,accession number D79994,Smith-Waterman Score= 356.
atgagacggattgtggcactggtggaaacgggagagcagccctttggagcagccacagtgggaagcaggtttgggtgtttggaggatttggggactgatcaaagagaaagacatgaccatgagatggcagcagcacacacatattttattggtgatggtgacactctgacagaagacgaggatgaagacacttggggaatggccaaagggcaccatgccattaacattgaaggtttcaagttggccagggtggaagatgaaatgcagtttcaagaacgtgaacctgagaaggtgaaaatcagagggagaacaaggggctataccttcatcatgctggcggccctcgcagctgcggaagcagaggacatgcaggttggggaagaactctggctgaaaggtgagcctcaaagccagtcagctggggcagatggccctcatgctgcagtcagttactgtgcagatcggcatggtgtatggtctgccggcctgtggggctcaggtcaacctccaggacgacaagggctccatggtcctcattgtgccagcaagcacgggcacatggagatcatcaagctgctgctggcccagctgggctgcaacgtccacctgcaggacaatgatggcagcaccatgctctcgatcgccctggaagtggggcacaagggcatcactgttcttctgtatgcccacatcagctttgcaaaagctcagtctccgggcacccctaggcttggaatgaagccacagagtttcatttga

SEQ ID NO: 9022 - DNA, 5440 bp, Homo sapiens
  SIMILAR (2)..(5437): 1001254mologous to Homo sapiens myoferlin,accession number AF182316,Smith-Waterman Score=9664.
caacatgaccccttctgaattgatggatgagatcatcagcatccgggtttataattctcactctctgcgggcagattgtctgatgggggaatttaagattgatgttggatttgtttatgatgaacctggccatgctgtcatgagaaagtggcttcttctcaatgacccggaagataccagttcaggttctaaaggttatatgaaagtcagcatgtttgtcctgggaaccggagatgagcctcctcctgagagacgagatcgtgataatgacagtgatgatgtggagagtaatttgttactccctgctggcattgccctccggtgggtgaccttcttgctgaaaatctaccgagctgaggacatcccccagatggatgatgccttctcacagacagtaaaggaaatatttggaggcaatgcagataagaaaaatctcgtggatccttttgtagaagtttcctttgctggaaaaaaggtttgtacaaacataattgagaaaaatgcaaacccagagtggaatcaggtcgtcaatcttcagatcaagtttccttcagtgtgtgaaaaaataaaactaacaatatatgactgggaccgtcttactaaaaatgatgtagttggaacaacatatctacacctctctaaaattgctgcctctggtggggaagtggaagatttctcatcttcgggaactggggctgcatcatatacagtaaacacaggagaaacagaggtaggctttgttccaacgtttggaccttgttacctgaatctttatggaagccccagagagtacacgggattcccagacccctatgatgagctgaatactggaaagggggaaggagttgcctacagaggcaggatcttggttgaattagccacttttcttgagaagacaccaccagataaaaagcttgagcccatttcaaatgatgacctgctggttgttgagaaataccagcgaaggcggaagtacagcctgtctgccgtgtttcattcagccaccatgttgcaagatgttggtgaggccattcagtttgaagtcagcattgggaactatggcaacaagtttgacaccacctgtaagcctttggcatcaacaactcagtacagccgtgctgtatttgatggcaactactattattacttgccttgggcccacaccaagccagttgttaccctgacttcatactgggaggatattagtcatcgcctggatgcggtgaacactctcctagctatggcagaacggctgcaaacaaatatagaagctctaaaatcagggatacaaggtaaaattcctgcaaaccagctggctgaattgtggctgaagctgatagatgaagttatagaagacacgagatacacgttgcctctcacagaaggaaaagccaacgtcacagttctcgatactcagatccgaaagctgcggtccaggtctctctcccaaatacatgaggcggctgtgaggatgaggtcggaagccacagatgtgaagtccacactggcagaaattgaggactggcttgataaattaatgcagctgactgaagagccacagaacagcatgcctgacatcatcatctggatgatccggggagagaagagactggcctatgcacgaattcccgcacatcaggtcttgtactccaccagtggtgagaatgcatctggaaaatactgtgggaaaacccaaaccatctttctgaagtatccacaggagaaaaacaacgggccaaaggtgcctgtggagttgcgagtgaacatctggctaggcttaagtgctgtggagaagaagtttaacagcttcgcagaaggaactttcaccgtctttgctgaaatgtatgaaaatcaagctctcatgtttggaaaatggggtacttctggattagtaggacgtcataagttttctgatgtcacaggaaaaataaaactcaagagggaattttttctgcctccaaaaggctgggaatgggaaggagagtggatagttgatcctgaaagaagcttgctgactgaggcagatgcaggtcacacggagttcactgatgaagtctatcagaacgagagccgctaccccgggggcgactggaagccggccgaggacacctacacggatgcgaacggcgataaagcagcatcacccagcgagttgacttgtcctccaggttgggaatgggaagatgatgcatggtcttatgacataaatcgagcggtggatgagaaaggctgggaatatggaatcaccattcctcctgatcataagcccaaatcctgggttgcagcagagaaaatgtaccacactcatagacggcgaaggctggtccgaaaacgcaagaaagatttaacacagactgcttcaagcaccgcaagggccatggaggaattgcaagaccaagagggctgggaatatgcttctctaattggctggaaatttcactggaaacaacgtagttcagataccttccgccgcagacgctggaggagaaaaatggctccttcagaaacacatggtgcagctgccatctttaaacttgaaggtgcccttggggcagacactaccgaagatggggatgagaagagcctggagaaacagaagcacagtgccaccactgtgttcggagcaaacacccccattgtttcctgcaattttgacagagtctacatctaccatctgcgctgctatgtctatcaagccagaaacctcttggctttagataaggatagcttttcagatccatatgctcatatctgtttcctccatcggagcaaaaccactgagatcatccattcaaccctgaatcccacgtgggaccaaacaattatattcgatgaagttgaaatctatggggaaccccaaacagttctacagaatccacccaaagttatcatggaactttttgacaatgaccaagtgggcaaagatgaatttttaggacgaagcattttctctcctgtggtgaaactgaactcagaaatggacatcacacccaaacttctctggcacccagtaatgaatggagacaaagcctgcggggatgttcttgtaactgcagagctgattctgaggggcaaggatggctccaaccttcccattcttccccctcaaagggcgccaaatctgtacatggtcccccaggggatcaggcctgtggtccagctcactgccattgagattctagcttggggcttaagaaatatgaaaaacttccagatggcttctatcacatcccccagtcttgttgtggagtgtggaggagaaagggtggaatcggtggtgatcaaaaaccttaagaagacacccaactttccaagttctgttctcttcatgaaagtgttcttgcccaaggaggaattgtacatgcccccactggtgatcaaggtcatcgaccacaggcagtttgggcggaagcctgtcgtcggccagtgcaccatcgagcgcctggaccgctttcgctgtgacccttatgcagggaaagaggacatcgtcccacagctcaaagcctcccttctgtctgccccaccatgccgggacatcgttatcgaaatggaagacaccaaaccattactggcttctaagctgacagaaaaggaggaagaaatcgtggactggtggagtaaattttatgcttcctcaggggaacatgaaaaatgcggacagtatattcagaaaggctattccaagctcaagatatataattgcgaactagaaaatgtagcagaatttgagggcctgacagacttctcagatacgttcaagttgtaccgaggcaagtcggatgaaaatgaagatccttctgtggttggagagtttaagggctcctttcggatctaccctctgccggatgaccccagcgtgccagcccctcccagacagtttcgggaattacctgacagcgtcccacaggaatgcacggttaggatttacattgttcgaggcttagagctccagccccaggacaacaatggcctgtgtgacccttacataaaaataacactgggcaaaaaagtcattgaagaccgagatcactacattcccaacactctcaacccagtctttggcaggatgtacgaactgagctgctacttacctcaagaaaaagacctgaaaatttctgtctatgattatgacacctttacccgggatgaaaaagtaggagaaacaattattgatctggaaaaccgattcctttcccgctttgggtcccactgcggcataccagaggagtactgtgtttctggagtcaatacctggcgagatcaactgagaccaacacagctgcttcaaaatgtcgccagattcaaaggcttcccacaacccatcctttccgaagatgggagtagaatcagatatggaggacgagactacagcttggatgaatttgaagccaacaaaatcctgcaccagcacctcggggcccctgaagagcggcttgctcttcacatcctcaggactcaggggctggtccctgagcacgtggaaacaaggactttgcacagcaccttccagcccaacatttcccagggaaaacttcagatgtgggtggatgttttccccaagagtttggggccaccaggccctcctttcaacatcacaccccggaaagccaagaaatactacctgcgtgtgatcatctggaacaccaaggacgttatcttggacgagaaaagcatcacaggagaggaaatgagtgacatctacgtcaaaggctggattcctggcaatgaagaaaacaaacagaaaacagatgtccattacagatctttggatggtgaagggaattttaactggcgatttgttttcccgtttgactaccttccagccgaacaactctgtatcgttgcgaaaaaagagcatttctggagtattgaccaaacggaatttcgaatcccacccaggctgatcattcagatatgggacaatgacaagttttctctggatgactacttgggtttcctagaacttgacttgcgtcacacgatcattcctgcaaaatcaccagagaaatgcaggttggacatgattccggacctcaaagccatgaacccccttaaagccaagacagcctccctctttgagcagaagtccatgaaaggatggtggccatgctacgcagagaaagatggcgcccgcgtaatggctgggaaagtggagatgacattggaaatcctcaacgagaaggaggccgacgagaggccagccgggaaggggcgggacgaacccaacatgaaccccaagctggacttaccaaatcgaccagaaacctccttcctctggttcaccaacccatgcaagaccatgaagttcatcgtgtggcgccgctttaagtgggtcatcatcggcttgctgttcctgcttatcctgctgctcttcgtggccgtgctcctctactctttgccgaactatttgtcaatgaagattgtaaagccaaatgtgtaa

SEQ ID NO: 9023 - DNA, 4845 bp, Homo sapiens
  SIMILAR (4)..(2943): 861254mologous to Homo sapiens fer-1 like protein 3,accession number AF207990,Smith-Waterman Score=4372.
tgggctgtatttgatggcaactactattattacttgccttgggcccacaccaagccagttgttaccctgacttcatactgggaggatattagtcatcgcctggatgcggtgaacgctctcctagctatggcagaacggctgcaaacaaatatagaagctctaaaatcagggatacaaggtaaaattcctgcaaaccagctggctgaattgtggctgaagctgatagatgaagttatagaagacacgagatacacgttgcctctcacagaaggaaaagccaacgtcacagttctcgatactcagatccgaaagctgcggtccaggtctctctcccaaatacatgaggcggctgtgaggatgaggtcggaagccacagatgtgaagtccacactggcagaaattgaggactggcttgataaattaatgcagctgactgaagagccacagaacagcatgcctgacatcatcatctggatgatccggggagagaagagactggcctatgcacgaattcccgcacatcaggtcttgtactccaccagtggtgagaatgcatctggaaaatactgtgggaaaacccaaaccatctttctgaagtatccacaggagaaaaacaacgggccaaaggtgcctgtggagttgcgagtgaacatctggctaggcttaagtgctgtggagaagaagtttaacagcttcgcagaaggaactttcaccgtctttgctgaaatgtatgaaaatcaagctctcatgtttggaaaatggggtacttctggattagtaggacgtcataagttttctgatgtcacaggaaaaataaaactcaagagggaattttttctgcctccaaaaggctgggaatgggaaggagagtggatagttgatcctgaaagaagcttgctgactgaggcagatgcaggtcacacggagttcactgatgaagtctatcagaacgagagccgctaccccgggggcgactggaagccggccgaggacacctacacggatgcgaacggcgataaagcagcatcacccagcgagttgacttgtcctccaggttgggaatgggaagatgatgcatggtcttatgacataaatcgagcggtggatgagaaaggctgggaatatggaatcaccattcctcctgatcataagcccaaatcctgggttgcagcagagaaaatgtaccacactcatagacggcgaaggctggtccgaaaacgcaagaaagatttaacacagactgcttcaagcaccgcaagggccatggaggaattgcaagaccaagagggctgggaatatgcttctctaattggctggaaatttcactggaaacaacgtagttcagataccttccgccgcagacgctggaggagaaaaatggctccttcagaaacacatggtgcagctgccatctttaaacttgaaggtgcccttggggcagacactaccgaagatggggatgagaagagcctggagaaacagaagcacagtgccaccactgtgttcggagcaaacacccccattgtttcctgcaattttgacagagactacatctaccatctgcgctgctatgtctatcaagccagaaacctcttggctttagataaggatagcttttcagatccatttgctcatatctgtttcctccatcggagcaaaaccactgagatcatccattcaaccctgaatcccacgtgggaccaaacaattatattcgatgaagttgaaatctatggggaaccccaaacagttctacagaatccacccaaagttatcatggaactttttgacaatgaccaagtgggcaaagatgaatttttaggacgaagcattttctctcctgtggtgaaactgaactcagaaatggacatcacacccaaacttctctggcacccagtaatgaatggagacaaagcctgcggggatgttcttgtaactgcagagctgattctgaggggcaaggatggctccaaccttcccattcttccccctcaaagggcgccaaatctatacatggtcccccaggggatcaggcctgtggtccagctcactgccattgagattctagcttggggcttaagaaatatgaaaaacttccagatggcttctatcacatcccccagtcttgttgtggagtgtggaggagaaagggtggaatcggtggtgatcaaaaaccttaagaagacacccaactttccaagttctgttctcttcatgaaagtgttcttgcccaaggaggaattgtacatgcccccactggtgatcaaggtcatcgaccacaggcagtttgggcggaagcctgtcgtaggccagtgcaccatcgagcgcctggatcgctttcgctgtgacccttatgcagggaaagaggacatcgtcccacagctcaaagcctcccttctgtctgccccaccatgccgggacatcgttatcgaaatggaagacaccaaaccattactggcttctaagtgcttaagcagtatgtcaacagcactcagcaaaatggcttctccagcgacagtgcatctgacagaaaaggaggaagaaatcgtggactggtggagtaaattttatgcttcctcaggggaacacgaaaaatgcggacagtatattcagaaaggctattccaagctcaagatatataattgtgaactagaaaatgtagcagaatttgagggcctgacagacttctcagatacgttcaagttgtaccgaggcaagtcggatgaaaatgaagatccttctgtggttggagagtttaagggctcctttcggatctaccctctgccggatgaccccagcgtgccagcccctcccagacagtttcggggattacctgacagcgtcccacaggaatgcacggttaggatttacattgttcgaggcttagagctccagccccaggacaacaatggcctgcgtgacccttacataaaaataacactgggcaaaaaagtcattgaagaccgagatcactacattcccaacactctcaacccagtctttggcaggatgtacgaactgagctgctacttacctcaagaaaaagacctgaaaatttctgtctatgattatgacacctttacccgggatgaaaaagtaggagaaacaattattgatctggaaaaccgattcctttcccgctttgggtcccactgcggcataccagaggagtactgtgtttctggagtcaatacctggcgagatcaactgagaccaacacagctgcttcaaaatgtcgccagattcaaaggcttcccacaacccatcctttccgaagatgggagtagaatcagatatggaggacgagactacagcttggatgaatttgaagccaacaaaatcctgcaccagcacctcggggcccctgaagagcggcttgctcttcacatcctcaggactcaggggctggtccctgagcacgtggaaacaaggactttgcacagcaccttccagcccaacatttcccagatactacctgcgtgtgatcatctggaacaccaaggacgttatcttggacgagaaaagcatcacaggagaggaaatgagtgacatctacgtcaaaggctggattcctggcaatgaagaaaacaaacagaaaacagatgtccgttacagatctttggatggtgaagggaattttaactggcgatttgttttcccgtttgactaccttccagccgaacaactctgtatcgttgcgaaaaaagagcatttctggagtattgaccaaacggaatttcgaatcccacccaggctgatcattcagatatgggacaatgacaagttttctctggatgactacttgggtttcctagaacttgacttgcgtcacacgatcattcctgcaaaatcaccagagaaatgcagattggacatgattccggacctcaaagccatgaacccccttaaagccaagacagcctccctctttgagcagaagtccatgaaaggatggtggccatgctacgcagagaaagatggcgcccgcgtaatggctgggaaagtggagatgacattggaaatcctcaacgagaaggaggccgacgagaggccagccgggaaggggcgggacgaacccaacatgaaccccaagctggacttaccaaatcgaccagaaacctccttcctctggttcaccaacccatgcaagaccatgaagttcatcgtgtggcgccgctttaagtgggtcatcatcggcttgctgttcctgcttatcctgctgctcttcgtggccgtgctcctctactctttgccgaactatttgtcaatgaagattgtaaagccaaatgtgtaacaaaggcaaaggcttcatttcaagagtcatccagcaatgagagaatcctgcctctgtagaccaacatccagtgtgattttgtgtctgagaccacaccccagtagcaggttacgccatgtcaccgagccccattgattcccagagggtcttagtcctggaaagtcaggccaacaagcaacgtttgcatcatgttatctcttaagtattaaaagttttattttctaaagtttaaatcatgtttttcaaaatatttttcaaggtggctggttccatttaaaaatcatctttttatatgtgtcttcggttctagacttcagcttttggaaattgctaaatagaattcaaaaatctctgcatcctgaggtgatatacttcatatttgtaatcaactgaaagagctgtgcattataaaatcagttagaatagttagaacaattcttatttatgcccacaaccattgctatattttgtatggatgtcataaaagtctatttaacctctgtaatgaaactaaataaaaatgtttcacctttaaaaaaaaaaaaaaaaaa

SEQ ID NO: 9024 - DNA, 339 bp, Homo sapiens
  SIMILAR (142)..(333): 1001254mologous to Homo sapiens fer-1 like protein 3,accession number AF207990,Smith-Waterman Score=344.
atggctgtgcttcctcttccatccaatcctcatgaccagccacagaacagcatgcctgacatcatcatctggatgatccggggagagaagagactggcctatgcacgaattcccgcacatcaggtcttgtactccaccagtggtttcctagaacttgacttgcgtcacacgatcattcctgcaaaatcaccagagaaatgcaggttggacatgattccggacctcaaagccatgaacccccttaaagccaagacagcctccctctttgagcagaagtccatgaaaggatggtggccatgctacgcagagaaagatggcgcccgcgtaatggctgtatga

SEQ ID NO: 9025 - DNA, 2305 bp, Homo sapiens
  SIMILAR (2)..(262): 1001254mologous to Homo sapiens myoferlin,accession number AF182316,Smith-Waterman Score=466.
caagttgtaccgaggcaagtcggatgaaaatgaagatccttctgtggttggagagtttaagggctcctttcggatctaccctctgccggatgaccccagcgtgccagcccctcccagacagtttcgggaattacctgacagcgtcccacaggaatgcacggttaggatttacattgttcgaggcttagagctccagccccaggacaacaatggcctgtgtgacccttacataaaaataacactgggcaaaaaagtcattgaaagaccgagatcactacattcccaacactctcaacccagtctttggcaggatgtacgaactgagctgctacttacctcaagaaaaagacctgaaaatttctgtctatgattatgacacctttacccgggatgaaaaagtaggagaaacaattattgatctggaaaaccgattcctttcccgctttgggtcccactgcggcataccagaggagtactgtgtttctggagtcaatacctggcgagattcactgaggaccaacacaagctgcttcaaaatgtcgccagattcaaaggcttcccacaacccatcctttccgaagatgggagtagaatcagatatggaggacgagactacagcttggatgaatttgaagccaacaaaatcctgcaccagcacctcggggcccctgaagagcggcttgctcttcacatcctcaggactcaggggctggtccctgaggcacgtgggaaacaaggactttgcacagcaccttccagcccaacatttcccaggggaaaactttcagatgtggggtgggatgtttttccccaagagtttgggggccaccaggccctcctttcaaacatcacaccccggaaagccaagaaatactacctgcgtgtgatcatctggaacaccaaggatgttatcttggatgagaaaagcatcacaggagaggaaatgagtgacatctacgtcaaaggcttggattcctggcaatgaagaaaacaaacagaaaacagatgtccattacagatctttggatggtgaagggaattttaactggcgatttgttttcccgtttgactaccttccagccgaacaactctgtatcgttgcgaaaaaagagcatttctggagtattgaccaaacggaatttcgaatcccacccagggctgatcattcagatatggggacaatgacaagttttcctctggatgactacttgggttttcctagaactttgacttgccgtcacacgattcatttcctgcaaaaatcaccaggaggaaattgcagggtttggacatgatttccgggaccttcaaaggccatgaacccccttaaagccaagacagcctccctctttgagcagaagtccatgaaaggatggtggccatgctacgcagagaaagatggcgcccgcgtaatggctgggaaagtggagatgacattggaaatcctcaacgagaaggaggccgacgagaggccagccgggaaggggcgggacgaacccaacatgaaccccaagctggacttaccaaatcgaccagaaacctccttcctctggttcaccaacccattgcaagaccatgaaagttcatcgtgtggcgccgctttaagtgggtcatcatcggctttgctgttcctgcttatcctgctgctcttcgtgggccgtgctcctcttactcttttgccgaactattttgttcaatggaagattgtaaagccaaatgtgttaacaaagggcaaaggcttcatttcaagagtcatccagcaatgagagaatcctgcctctgtagaccaacatccagtgtgattttgtgtctgagaccacaccccagtagccaggttacgcccatgtcaccgagccccattgatttcccagagggtcttaggtccctgggaaaagtcagggccaacaaggcaacgtttggcattcatgtttatctctttaaggtatttaaaagttttatttttctaaagtttaaatcatggtttttccaaaatatttttccaaggtggctgggtccccatttaaaaatcatcctttttatatgtgtccttcggttcctagacttcagcttttggaaattgctaaatagaattcaaaaatctctgcatcctgaggtgatatacttcgatatttgtaatcgaactgaaagagctgtgcattataaaatcagttagaatagttagaacaattcttatttatgcccacaaccaatgctatattttgtatggatgtcataaaagtcatatttaacctctgtaatgaaactaaataaaaatgtttcccctttaaaaaaaaaaaaaaaaaaa

SEQ ID NO: 9026 - DNA, 407 bp, Homo sapiens
  SIMILAR (8)..(406): 961254mologous to Homo sapiens 40-kDa keratin protein,accession number J03607,Smith-Waterman Score=630.
gaatgcagtggagacgcaatataagctcatggccgagcagaaccggaaggatgctgaagcctggttcaccagccggactgaagaattgaaccgggaggtcgctggccacacggagcagctccagatgagcaggtccgaggttactgacctgcggcgcacccttcagggtcttgagattgagctgcagtcacagctgagcatgaaagctgccttggaagacacactggcagaaacggaggcgcgctttggagcccagctggcgcatatccaggcgctgatcagcggtattgaagcccagctgggcgatgtgcgagctgatagtgagcggcagaatcaggagtaccagcggctcatggacatcaagtcgcggctggagcaggagattgccacctaccgcagcctgctcg

SEQ ID NO: 9027 - DNA, 762 bp, Homo sapiens
  SIMILAR (24)..(182): 731254mologous to Homo sapiens 40-kDa keratin protein,accession number J03607,Smith-Waterman Score=180.
atgatggtccctgatcagccaggccctcccatgactacagccactactacgggaccatcgagtacctgtgctacaagattcttggtgacatcattgagaattccaggattgtcctgcagatcaacaatgcctgtctggctgcagatgacttctgaactaagtatgagagggagcagactctgctcgaccgacctggagatgcagaccgaagggctgaaggaagagctggcctacctgaagaagaaccatgagggggaaattaatgccctgaggggccaggtgggaggccagatcagtgtggaagtggattcggctctgggcgctgatgccaccaatatcctgagtgacatgcagagccaatatgagaaccgaaaggatgctgaacgctggttcaccagctgcactgaggaactgaactgggaagttgttggccacatggagcagctccagatgaacaggtcccaggtcaccgacctgcggtgcaacctccagggtcttgagattgagctgcagtggcagcttagcatgaaagccgccttggaagcacgctttggaccacagctggcgcagatccaggcgctgatcagcagtattgaagctcagctgggcgatgtgcgagctgacagtgagaggcagaatcaggagtaccagctgctcatggacatcaagttgtggctggagcaggagctcgccacctacctcagcctgctcgagggccaggaagagcactacaatagcctgtccacctccaagatcctctaa

SEQ ID NO: 9028 - DNA, 2723 bp, Homo sapiens
  SIMILAR (111)..(2009): 761254mologous to Homo sapiens JM11 protein,accession number AF196779,Smith-Waterman Score=2368.
cagctggtccctgggacaggatgggggccatggggtcactggtagggggagacctggggttggtgtgggggtgtgctggggaggggtttgctgggatccctttctcgccatgtgctctcactcaatgcgaagggaaccaaggtaccagggccaagtgggtccagacatccacacggattctgaaagggcaggtcaagcaggcacgtggggcccaggttaccccttattccccgctgtggcatgggaagctgggaagggctgctcctaccttcaatgccccaggtcggtggctgcttcccctcctgctgcctcctcccctgctctgaatcaccacctgcttgctcgggaagaggaccctgcaggaggccctgagcctgaaacttcaggagctccgcaaagtgtgtctccaggaggcggtgagggcctggccctaggggtatcaggcggggaggttgggaggaggtgaggagctggggcccctaggtaggccccccacagcccgcgcctaccctccaccgcaccccaaccaagcacaccactccttgtgccctgctgaggtgagcagatgggtgtggagagcaagagggtgggaagaggggacaggtacagaggagtagccaggaggaatggccttggcccctgatctgagcaccgagcagcgccggcgccggcgccaggtccaggcagatgcactgaggaggctgcatgagctagaggagcagctcagggatgtccgggcccgccttggcctcccagtgctcccgctgccccagccactgccactgtccacggggtcagtgatcaccacccagggagtctgcctgggcatgcgtcttgctcagctcagccaaggtgagcatcccctggtgagggtgggagagtggacactggcaaatggacgtggtagggctgggatgggtgactcctatcccccaaacctgcccccgactcctacgtccctttagcccatcccctttattcatccagtatctggggggagccctgagcggcgaaccccatggaaaccacctccatcagatctttatggggatctgaagagccggcggaactctgtggccagccccaccaggtgagaatgagcccctcctcccctccgcaggagctgggaatgggatagcaagcctgggctggcagagggtcctgcctccgatcgcgcctccctcttcgtagctcgcacccgccgcagcaacagttctgaggccctgctggtggaccgggccgctggtgggggagctggctccccgcctgcccctctggctccctctgcctctggccccccagtctgcaagagcagtgaggtgctgtatgagcgcccccaaccaacccctgccttctcctcccgcacagcaggccccccagaccctccccgggccgcccggcctagctcagctgcccctgcctcccgaggtgccccccggctcccacctgtgtgtggagacttcctcttggactattccttggaccggggcctgccccgcagtggcggtggaacaggctggggggagctgccgcctgcagctgaggtcccaggacccctctcccgccgggatgggctcctcaccatgctccccggcccaccacctgtgtatgcagctgacagcaacagccccctcctccgcaccaaggacccccacacccgtgccacccgcactaagccctgtggcctgcccccagaggctgccgaaggccctgaggtgcatccaaaccctctgctgtggatgcccccacccacccgtatcccctcggctggtgaacgcagtggccacaagaacctggctctggaggggctgcgggactggtacatccggaactcgggactggctgcggggccccagcgccggcctgtgctcccttccgtgggcccgccacacccacccttcctccatgcccgctgctatgaggtgggccaggcgctgtacggggcccccagccaggcgccactcccacactcgaggagtttcacggcgccccctgtctctggcaggtatggggggtgcttttactgatgggtaggggtctcgtaaggcagatggcgaagatatccaggccagggagtggctagtcatgatagctaatgaattggaccatgaggaaactagctgctgtgatggcacagggtcactctactgcacatgacctgcattagtccatggggtcctggtggaggggatcttgggcactggtagcagcaattctttatcaagttataggctgaagatgagccttgaagccagggtgccgggaggaagggacatctcatgccccttgctgttttcttccttttttctccatgccccagagcctgaaagtgctgtcctgtgcctgcctccacctctttaacgagcctcttttcctttctttttctgtgtcttgtctgtcttttcttcttcttgtcttccccgccctgtcctccggattcctgctaccccttctaaagatactacgcggacttcctgtatcccccggagctgagcgctcgtttaagtgacctgacgctagagggggagcagtcctccagttctgacacccagaccccggggacactggtctgaccccagttggtccgcggcggccccccacagcccgcgcctaccctccaccgcaccccaaccaagcacaccactccttgtgccctgctgaggagctggctcttgaggccctggaacgcgaggtgtcagtgcaacagcagatcgcggcggccc

SEQ ID NO: 9029 - DNA, 427 bp, Homo sapiens
  misc_feature (1)...(427): n = a,t,c or g
aaaggagagggaagctggaagcacctttggcccgggacagaaatctggagagcttggctacctccatcctccagcctcactctcagtcttcccgggagttcgtgggatttggaccttagattattagtattattttgagggcctcctgtgtgtaagcactggttgtgcgcagatggctgtgcagagggccatgaggtagaggctggggaaatgagggcttggaggtgcttgaggtatggtctttacctacgtgaaatgttggaggttgagatgaaaactcttgctttgaattcttcatggaggactacatcatttcaatcctgaatctggctcaattctattattcacttattactggattaaaaacgtttaattnnnnnnnnnnnnnnnnnnnnnnnnnnnnnnnnnnnnnnnnnnnnnnnnnnnn

SEQ ID NO: 9030 - DNA, 1443 bp, Homo sapiens
  SIMILAR (9)..(233): 661254mologous to Homo sapiens unnamed protein product,accession number AK025047,Smith-Waterman Score=252.
catggttaattaaacatttttatttatttattttttttttactgagacagagtctcactctgatgccaaggcttgagtgcagtggtgtgatctcggctcactgcaacctccacctcctgggttcaaacaattctgccacctcagcctcctaagtagctgtgattacaggtgcgtgccaccacgcctggctaatttttgtatttttagtagaggcggggttttgccatgttggccacggctggtgtcgaactcctgacctcaagtgatccgcctgccttggcctcccaaagtgctgggattacaggcgtgaaccactgtgcctggccaattaaacgtttttaatacagtaataagtgaataatagaattggagccagattccaggattgaaatgatgtagtcctccatgaagcaattcaaagcaagagttttcaatttcaacctccaacatttcacggtaggtaaagaccatacctcaagcaccttccaagccatcatttgccccagcctctacctcatggcccttctgcacagccatctgcgcacaaccagtgcttacacacaggaggccctcaaaataatactaataatctaaggtccaaatcccacgaactcccgggaagactgagagtgaggctggagccaaggcttgaaccaaacacccaggaaggaatctgcagcccgcttttctaagtcgtaaaacttcctacgacctggactctctcaggaagcctgctccggcctgaggaggatggaggtagccaagctctccagatttctgtcccgggccaaaggtgcttccagcttccctctcctttgcttctccgcccggctcaggtcttacagcctagcgcggctctcgccgaacaaccaatcccacggcggccatcgggtcacgtgggcgcccctgaggcggggctggtgggaggagcagccaatcgaaggccgaggccaacgtcaggggtggagcaaaagggatggcggacgcatcttttccgtcacttctttgcgtcgcggtctctatcctgagagaccagtcgctttccaagttctgagcaattctcccccgccccctccacaattcctcgccgtcggccgtcggggtggtcaagattctagcgatatgctcctccattacggagcagggaagaggttgtctcttaccctcaagttacccgagagacgacgttcgcccatcaatgagcaaacctttgagggaatcccttttccctttggcttgctggacacgtctcagcctctcagtgaacgacgccgagcggggaagaaagacggttccccccacggcctccaggctctatcagccacacccctggcctctggtccccctaaaccctcaattccgaaacacatcttcccctcctgcccccaactacctgctgccacacccgaggattccctcaccgcaccacaggcatcatggtag

SEQ ID NO: 9031 - DNA, 436 bp, Homo sapiens
  SIMILAR (1)..(282): 961254mologous to Homo sapiens unnamed protein product,accession number AK027030,Smith-Waterman Score=457.
gaacagacaacatggctgcgacgaaatcttgaagttatttcttctcccaaaataatggtagatggaaccaatttggaatctgatgttgaagatatgttatcacctgcaatggaaaccgcaaacataactccttctgtatatagtgtccatgcattgacattactctctgaggttttggctcatcttttggatatgggtttctatagtgatgaaaaggagcgggttattcctttacttgtaaatattatgcattatgttgtgccctacctcagaaatcacagttggagagcaattatggacaatctgatgacacatgataaaacaacatttatagatttgatgactcgtgtagcagtggctcaaagcagttcacttaatctctttgcaaaccgtgatgtggagctagaacagagagctatgcttcttataagattag

SEQ ID NO: 9032 - DNA, 410 bp, Homo sapiens
  SIMILAR (3)..(158): 981254mologous to Homo sapiens hypothetical protein,accession number AL050080,Smith-Waterman Score=243.
ctcgtgtagcagtggctcaaagcagttcacttaatctctttgcaaaccgtgatgtggagctagaacagagagctatgcttcttaaaagattagcatttgctatttttagcagtgaaattgaccagtaccagaaatatcttccagatatacaagtaagaccaaatgtccataccgaggtttgcagcggtagaaaggaaggtgtttatttgcagggctccaagcaaagaggttcaggcagctggtgtttaaatcctgaccccactcctctccatggcttgcaggagcttagtgtgggtgcaactatagacagcctttctggaacatatcagggtgaccgcatacctacaggaggagcatcctccaggttcaggcttgcacgagaaatagagtcacaattgctctctacttga

SEQ ID NO: 9033 - DNA, 6692 bp, Homo sapiens
  SIMILAR (5814)..(6689): 981254mologous to Homo sapiens dJ202D23.2 (novel protein),accession number AL121716,Smith-Waterman Score=1494.
atggttaacacctacagagaggttaaggaaggacctgtaattctagaagatgtcctgattgaagtgtttagaacattatattctcaatgcaaagcagagttggatcttcaaactgaaccacccttcagcaaggatcatgctcagttaagcagtaaattaagagaaaataagaaaacagcagagctgattaaaactgctaaccttctctttaattccttcgaaccttattatatgtgggattatgttgcacgctggtttgaagaatgttgtaggaggacactgcatgtgagacttcagattggacctggagatagtaatgactcatctgaattacagctgaccaatttctgcttactggtggattttttgttggacatagtttctttggagacttacattgaaatccagacagaacacttgccccagttgctgctcagaatgatttctgccttgacaagccatctccagacattgcacttatctgaactcacagattctctcagactctgctcaaagatccttagcaaggttcagcctccactgttatctgctagcactggaggtgttttgcagtttccaagtgggcagaacaattcagtcaaagagtgggaagacaaaaaggtatcatcagtttctcatgaaaatcctactgaagtgtttgaagatggagaaaatccaccaagtagtcgatcatcagagagtggattcactgagtttatacaatatcaagcagaccgaactgatgatattgacagagaactgagtgagggccagggggcagctgccatcccaattggtagcacatcctctgagacagaaacagcatccactgtgggatctgaagaaaccatcatccagaccccttccgtagtcactcaggggacagcaacccgaagtaggaagacagcccaaaagactgcaatgcagtgctgcttggagtatgtccaacagtttcttaccagacttatcaacctctacatcattcagaataactctttttctcagtctttggctacagaacatcaaggggatcttggtcgagaacaaggagagacttcaaaatgggacagaaattcacaaggagatgtaaaagagaaaaacataagtaaacaaaaaacttctaaagaatacctgtctgccttccttgctgcctgtcagctcttcctagagtgctcaagtttcccagtttacattgctgaggggaaccatacatcagagttacgttctgaaaaattggagactgactgtgagcatgtgcagcctccacagtggctccagactctgatgaatgcttgcagccaagcaagtgatttcagtgttcagagtgttgctatttcactagttatggacctggtgggactgacacagtctgtggccatggtcactggggaaaacatcaacagtgtagagcctgcacaacccttaagtccaaaccagggaagagtagctgtggttattagacctcccctcactcagggcaatctgaggtacatagctgagaagactgaatttttcaagcatgtagctttaacattgtgggaccagttgggagatgggacacctcagcatcaccagaagagtgtggaactattttatcaattacataacttagttccttcttctagcatctgtgaggatgttataagtcagcagttaacccataaagataagaaaataaggatggaagcacatgccaagtttgcagttctttggcatctaacgagagatctccatataaataaatcttcatcttttgtacgttcttttgacaggtcactgttcatcatgttagatagccttaacagtctcgatggttctactagctctgtgggacaagcctggctgaaccaagtcctacaaagacatgatattgcacgagttttggaaccattgctattgctcctgcttcatccaaaaactcagagggtttcagtacagcgtgtacaagcagaacgttattggaataagtctccctgttatccaggagaggagagtgacaagcatttcatgcaaaattttgcctgcagcaatgtgagccaagtacaactcatcacatcaaaaggaaatggtgaaaagccacttaccatggatgaaatagagaactttagtctcactgtgaatccattaagtgacagactttccctcctaagtaccagcagtgagacaattccaatggttgtgtctgattttgatcttccagaccaacagatagaaatacttcagagttctgactcgggatgttcacagtcctctgctggggacaacttgagttacgaagttgatcctgaaaccgtgaatgcccaagaggattctcaaatgcccaaggaaagctccccagatgatgatgttcaacaggtagtatttgacctgatatgtaaagttgtaagtggcctcgaagtggaatctgcatcagttacatctcaattagaaattgaagctatgcccccaaagtgcagtgatatagatccagatgaagagacgattaaaattgaagatgactccattcaacagagtcagaatgctttgctgagtaatgaaagttctcagtttctgtctgtgtctgcagagggaggccatgagtgtgtggcaaatggaatctccaggaatagctcctcaccttgtatttcaggaaccacacacactcttcatgactcttctgttgcttccatagaaaccaaatctagacaaaggagtcacagtagtattcaattcagcttcaaagaaaaattatcagaaaaagtttcggagaaggaaacaatagttaaggagtcaggtaaacaaccaggagcaaaacctaaagtaaaacttgccagaaaaaaggatgatgacaagaaaaaatcttcaaatgaaaaactcaaacaaaccagtgtattcttcagtgatggtctggatttagagaactggtatagctgtggagagggagacatttctgaaattgagagtgacatgggttctccaggatctcgaaaatctcccaatttcaacattcatcctctctatcaacatgtgctcctgtatctccagttgtatgattcatccaggactttgtatgctttctctgccatcaaagccatcttgaaaactaaccctatagcttttgtaaatgccatttcaactactagtgtaaataatgcatatactcctcagttgtctctccttcagaatctattggccagacaccggatttctgttatgggcaaagatttttatagtcacattccagtggactcaaatcataacttccggagttctatgtacatagaaattcttatttctctctgcttatattacatgcgtagccattacccaactcatgtcaaggttactgcacaagatttaataggcaatcgaaacatgcaaatgatgagcatagaaattctgacactactcttcactgagctggcaaaagtaatagaaagctcagcgaagggtttccctagttttatttctgatatgttatctaagtgcaaagttcagaaagtgattcttcattgtttgctgtcatctatctttagtgctcagaaatggcatagtgaaaaaatggcaggtaagaacctggttgctgtggaagaaggtttctcagaggacagccttattaatttctcagaggatgaatttgacaatggcagcacgttgcagtcacaacttcttaaggtgcttcagaggctgattgttcctagaacacagagtaatgaactattcctgaagagcaatgaaacaggttttgattttgttgtatcctgacttagaacacatcagtccccatcaacccatgacttctcttcagtatttgcatgctcagtcaatcacatgtcaaggcatgttcctctgtgcagtgatacgagcttttgcatcagcactgtgcatgtaagatgcacccacaatggattggtttaatcacatctactctgccttacatgggaaaagttctgcagagagtggttgtttctgtgacactacaactgtgcagaaatttagataatctaattcagcagtacaaatacgaaacaggattatctgatagtaggcctctgtggatggcatcaattattccaccagatatgattcttactcttttggaagggattacagccattatccattactgtttgttggatccaactacacagtatcaccaacttttggtcagtgtagaccagaaacacttgtttgaagcacgcagtggaatcctctcaatccttcatatgatcatgtcctctgtgacactgctttggagcatactgcatcaagctgattcttcagaaaagatgactattgccgcatccgcatctcttaccactattaatcttggagctacaaagaacttgagacaacagattcttgaattgttgggccccatttcaatgaatcatggtgttcactttatggctgccattgcatttgtgtggaatgaaagaagacagaataaaacaaccaccaggaccaagatgcgtaaggagaaaatcccgcatcaggggccattcgccattcaggctgcgcaactgttgggaaggtcgatcggtgcgggcctcttcgctatacgccagctggcgaaagggggatgtgctgcaaggcgattaagttgggtacgccagggttttcccagtcacgacgttgtaaaacgacggccagtgccaagcttgcatgcctgcaggtcgactctagaggatcccctctatttgttttccaaagtgcccataatatgctacccctatgtagcattgcagctgtttggacggtcatctgaacttgacagacatcagcagctacttctcaacaaaggtctcacttcttacatagggacttttgatccaggtgagctctgtgtatgtgcagcaatccagtggctacaggacaacagtgcatcttatttcctgaacagaaagcttgtatatgaaccatctacacaagcaaagccagtcaagaacacattcctccgaatgtggatctacagtcaccatatatatcagcaggacctaaggaaaaagattttggatgttgggaaaaggttagatgtgactggattttgcatgacaggaaagcctggtataatctgtgtggagggtttcaaagagcactgtgaggagttctggcacacaattaggtaccccaattggaagcacatttcctgtaagcatgctgaaagcgtggagacagaaggaaatggtgaggacctgcgccttttccattcttttgaagagttactccttgaggctcatggtgactatggattaaggaatgactatcacatgaatctgggccaattcttagaatttctcaagaagcacaaaaggggcgtggcgacgagccggaagccacgcagggccacgtctgcggttctgaggactgggtttgggtgcagacgttgttgcttgggcgcttctccgctgcgtgtaggtgaagggggcttcctgaccgaggtcattcctgcagccagtgaagaacagcttttattagtggaattggttcgttcaatcagtgtcatgagagcagaaactgttatccagactgtaaaagaagttttaaagcagccaccagccatagccaaggacaagaaacatctttctttggaagtctgcatgcttcagtttttctatgcttatattcaaagggttctgaatgagtttattatgaaaaaccctagtttggaaaataaaaaagaccaaagagaccttcaggatgtaactcacaaaatagtggatgcaattggtgcaattgctggttcttctctggaacagacaacatggctgcgacgaaatcttgaagttaagccttctcccaaaataatggtagatggaaccaatttggaatctgatgttgaagctcgtgtagcagtggctcaaagcagttcacttaatctctttgcaaaccgtgatgtggagctagaacagagagctatgcttcttaaaagattagcatttgctatttttagcagtgaaattgaccagtaccagaaatatcttccagatatacaaggaattcctgtgagtaaatgggtccagctgctgacagcactgtctcctgcttacaggacttcagggccctctgtggctggtctggagacaacgtacacaggaggtaatggcttctctacttcatataacagccagcggtggttaaacctctatctctctgcttgcaaatttttggatttggctctcgcattgccctctgaaaaccttcctcagtttcagatgtaccgatgggcctttattccagaagcctcagatgattcaggtttggaagtcagaaggcagggtatacatcaacgagaatttaaaccttacgtggtacgactagcaaaacttcttcggaaaagagcaaaggacaaggaggaggactttaagacagtgattttggagggattggagatggccaagcatcagaaaaatccagaggaagacaactcagggagaacattgggttgggagccagggcacttgctgctcaccatctgcaccgtgcgcagtatggagcagctcctgccgttcttcaatgtgctcagtcaagtcttcaacagcaaagtcacaagccgatgtggaggacactcagggagtcctatcctctactcaaatgccttccctaataaggacatgaaactggagaaccacaaaccatgttccagcaaagccaggcaaaaaatagaagagatggtagaaaaagattttctggaagggatgataaaaacttga

SEQ ID NO: 9034 - DNA, 2229 bp, Homo sapiens
  SIMILAR (2228)..(1776): 1001254mologous to Homo sapiens N-acetylglucosamine-phosphate mutase,accession number AF102265,Smith-Waterman Score=750.
ctgtagtaattttgtgacctagtccttggttacagtagtgagggttcagaaacctgggagctttttgagtaaatacaaagcacaacataaaacttttatgtttgactctattcctgttcaaagctatttctgttaactaagcttatctgcgcattctagttgggaactattactacaatgttagactgctccatgtaaaactaataaatggcagtaaaaggtctcagaagcaccaagggttttgatcaggtcaggagttagaaacttaatgtcatttgtattcatttcttgaccaactgccaaagtttatatattttcaatttttctaacataccacattgtctgttgtattaataccagttcactttttggttttctgcagaaaaatccagaggaagacaactcagggagaacattggggttgggagccagggcacttgctggctcaccatctgcaccgtgcgcagtatggagcagctcctgccgttcttcaatgtgctcagtcaagtcttcaacagcaaagtcacaagccgatgtggaggacactcagggagtcctatcctctactcaaatgccttccctaataaggacatgaaactggagaaccacaaaccatgttccagcaaagccaggcaaaaaatagaagagatggtagaaaaagattttctggaagggatgataaaaacttgagcaccattgctggttccatttagcttacatgtaaatgtaattatttaaaacacacacactgctctgcgttgtatagtttttccttttttgtatgtaacagaacacatttcagattgtatttaatttaaatatttgtatataagagcaaatgtctgaatgtggcctgaatcaagtttaaatattgttggctcatactgattatggtgcctaagagagctatatatatacacatagtaaagtcccattgtttttattgtccctgaagttgtccttaaacctgcaaaaatatacactacccatttttttttttccattggtttcagacttggttcaattaagattggttggggatttttctcttttccttattaaccatgttctgggtatcagaatgggtgttccttctccatcagagggctggggaaacgtattataattaggtttttctcccacatacccttcaccaagagcagtgaagaataactgaaggctggaccatgcatccttaaaagtattgcatgagcatctccacctcagtatgggaagagggatggacaaccccctattcatacctctggagttcctgatgggcattagtcatataggtaagtcatctaataatctttcttaagactctgcaatggaaaaactggttgtataaagtcttctctgccctctccatttgtatcagcaatggggaatgctgcaaaacatcatcttgctcatgtgatggtgatggcaaagatatcacaaggagttggtaataagatttaattttccagtagcctgcatgaattgttccccacataaaactgtacagttagtgactgaattgtatacttaagtcccagtattttacattagtgagactgaaattagaggtaaatttctttaacaagtgtaaggcttacctatttataaagaattattctgttagtgtttaagaaaaacagatctagagacaatccagtaggctgcattgtaaacattatgattataaatctcttagtactgccattattattgacagttttgtaaagacttgtaaaaagtccagtttctcaggaatatgaaaattatcttcagaaacctggttggggcctttctccaattcctccagccagctgaaatactgccaagctcacttcatgtgcaaggtgatctgcactttcttgtgagtctgcttctgcatatactcggacgacatcttctgtaccagagggccggacaaaagctcgagaaagcttgtacttcttcaccaggtcattgattgcctcctgtaatcctgggggtgtaactgcttgtctttcagcatcggtagtgctaataactctcctgtctgcaacctgaactttaagttgtctgtttggaagatctgtatagagagcatcccactgttgtacagtcaagcccttcagagccaagattgcttcaatcaccagcatgtcagaaatagcatcaccagctgcctggttaaacaagtcaataatgttttcaagcatcttagcagcttttcttttcttatcttccagttgttct

SEQ ID NO: 9035 - DNA, 4503 bp, Homo sapiens
  SIMILAR (3)..(2474): 991254mologous to Homo sapiens dJ202D23.2 (novel protein),accession number AL121716,Smith-Waterman Score=4188.
  misc_feature (1)...(4503): n = a,t,c or g
caattccaatggttgtgtctgattttgatcttccagaccaacagatagaaatacttcagagttctgactcgggatgttcacagtcctctgctggggacaacttgagttacgaagttgatcctgaaaccgtgaatgcccaagaggattctcaaatgcccaaggaaagctccccagatgatgatgttcaacaggtagtatttgacctgatatgtaaagttgtaagtggcctcgaagtggaatctgcatcagttacatctcaattagaaattgaagctatgcccccaaagtgcagtgatatagatccagatgaagagacgattaaaattgaagatgactccattcaacagagtcagaatgctttgctgagtaatgaaagttctcagtttctgtctgtgtctgcagagggaggccatgagtgtgtggcaaatggaatctccaggaatagctcctcaccttgtatttcaggaaccacacacactcttcatgactcttctgttgcttccatagaaaccaaatctagacaaaggagtcacagtagtattcaattcagcttcaaagaaaaattatcagaaaaagtttcggagaaggaaacaatagttaaggagtcaggtaaacaaccaggagcaaaacctaaagtaaaacttgccagaaaaaaggatgatgacaagaaaaaatcttcaaatgaaaaactcaaacaaaccagtgtattcttcagtgatggtctggatttagagaactggtatagctgtggagagggagacatttctgaaattgagagtgacatgggttctccaggatctcgaaaatctcccaatttcaacattcatcctctctatcaacatgtgctcctgtatctccagttgtatgattcatccaggactttgtatgctttctctgccatcaaagccatcttgaaaactaaccctatagcttttgtaaatgccatttcaactactagtgtaaataatgcatatactcctcagttgtctctccttcagaatctattggccagacaccggatttctgttatgggcaaagatttttatagtcacattccagtggactcaaatcataacttccggagttctatgtacatagaaattcttatttctctctgcttatattacatgcgtagccattacccaactcatgtcaaggttactgcacaagatttaataggcaatcgaaacatgcaaatgatgagcatagaaattctgacactactcttcactgagctggcaaaagtaatagaaagctcagcgaagggtttccctagttttatttctgatatgttatctaagtgcaaagttcagaaagtgattcttcattgtttgctgtcatctatctttagtgctcagaaatggcatagtgaaaaaatggcaggtaagaacctggttgctgtggaagaaggtttctcagaggacagccttattaatttctcagaggatgaatttgacaatggcagcacgttgcagtcacaacttcttaaggtgcttcagaggctgattgttctagaacacagagtaatgactattcctgaagagaatgaaacaggttttgattttgttgtatctgacttagaacacatcagtccccatcaacccatgacttctcttcagtatttgcatgctcagccaatcacatgtcaaggcatgttcctctgtgcagtgatacgagctttgcatcagcactgtgcatgtaagatgcacccacaatggattggtttaatcacatctactctgccttacatgggaaaagttctgcagagagtggttgtttctgtgacactacaactgtgcagaaatttagataatctaattcagcagtacaaatacgaaacaggattatctgatagtaggcctctgtggatggcatcaattattccaccagatatgattcttactcttttggaagggattacagccattatccattactgtttgttggatccaactacacagtatcaccaacttttggtcagtgtagaccagaaacacttgtttgaagcacgcagtggaatcctctcaatccttcatatgatcatgtcctctgtgacactgctttggagcatactgcatcaagctgattcttcagaaaagatgactattgccgcatccgcatctcttaccactattaatcttggagctacaaagaacttgagacaacagattcttgaattgttgggccccatttcaatgaatcatggtgttcactttatggctgccattgcatttgtgtggaatgaaagaagacagaataaaacaaccaccaggaccaaggtcattcctgcagccagtgaagaacagcttttattagtggaattggttcgttcaatcagtgtcatgagagcagaaactgttatccagactgtaaaagaagttttaaagcagccaccagccatagccaaggacaagaaacatctttctttggaagtctgcatgcttcagtttttctatgcttatattcaaagaattccagtgcccaatttagtggatagctgggcgtcactgttgatacttctgaaagactctatacaactgagtcttccagctccagggcagtttcttatacttggggttctgaatgagtttattatgaaaaaccctagtttggaaaataaaaaagaccaaagagaccttcaggatgtaactcacaaaatagtggatgcaattggtgcaattgctggttcttctctggaacagacaacatggctgcgacgaaatcttgaagttaagccttctcccaaaataatggtagatggaaccaatttggaatctgatgttgaagatatgttatcacctgcaatggaaaccgcaaacataactccttctgtatatagtgtccatgcattgacattactctctgaggttttggctcatcttttggatatggttttctatagtgatgaaaaggagcgggttattcctttacttgtaaatattatgcattatgttgtgccctacctcagaaatcacagtgcacataatgcccctagttatcgagcttgtgtccagctgctcagcagtcttagtgggtatcagtacacacggagagcttggaaaaaagaagcttttgacctctttatggatcccagtttctttcagatggatgcctcttgtgttaatcattggagagcaattatggacaatctgatgacacatgataaaacaacatttagagatttgatgactcgtgtagcagtggctcaaagcagttcacttaatctctttgcaaaccgtgatgtggagctagaacagagagctatgcttcttaaaagattagcatttgctatttttagcagtgaaattgaccagtaccagaaatatcttccagatatacaagagagattggttgagagtctccgtttgccacaggtgccaactctccattctcaagtgttcctgtttttcagagtgttacttttaagaatgtctccccaacatcttacctcactctggcctaccatgattacagaacttgtacaagtatttttactgatggagcaggaactcactgctgatgaaggatatttcacgggacttcaggggncctctgtgggctgggtctgggagacaacgtacacagggagggtaattggcttcttctactttcatattaacagccagcggtgggtttaaacctctatctctctggcttggcaaatttttgggatttgggctcttcggcatttgccctctggaaaaccttcctcagttttcaggatgtaccgatggggccttttatttccagaagcctcaggtggattcagggtttggaagttcaggaagggcaggggtattacatcaacgagaattttaaaccttacgtggtacgactagcaaaacttcttcggaaaagagcaaagaaaaatccagaggaagacaactcagggagaacattgggttgggagccagggcacttgctgctcaccatctgcaccgtgcgcagtatggagcagctcctgccgttcttcaatgtgctcagtcaagtcttcaacagcaaagtccacaagccgatgtggaggacactcagggagtcctatcctttacttcaaatgccttccctaataaggacatgaaactggagaacccacaaacccatgttcccagcaaagcccggcaaaaaatagaagagatggtagaaaaagattttctggaagggatgataaaaacttgagcacccatgccgggtccccattagcctaccatgtaaatgtaattatttaaaacacaccacactgctctgccgttgtatagtttttccttttttgtatgtaacagaacacatttcagattgtatttaatttaaatatttgtatataagagcaaatgtctgaatgtggcctgaatcaagtttaaatattgttggctcatactgattatggtgcctaagagagctatatatatacacatgtaaagtccattgtttttattgtcctgagttgtcttaaacctgcaaaatatacactacccattttttttttcaaaaaaaaaaaaaaaaaaa

SEQ ID NO: 9036 - DNA, 2094 bp, Homo sapiens
  SIMILAR (729)..(1052): 341254mologous to Homo sapiens similar to human bromodomain protein BR140(JC2069),accession number D87076,Smith-Waterman Score= 100.
  misc_feature (1)...(2094): n = a,t,c or g
gtaattcgacctggagagggttcggaacctcacttacatggtgacccgcagggaaaagattaaacggtctgtgtgcaaagtccaggaacagatattcaatctttacactaagcttttggagcaagaaagagtttcaggtgtgccttcttcctgctcctcctcctcactggaaaacatgcttttgtttaacagtccttctgttggccctgatgctcccaagatagaggacttgaagtggcattctgcatttcttcagaaaacaaatgggtacttccttgggtttcattcggctgaaaaaggcccattaagccnaggatccttttgcagaattagccctggaagtgaaggcaaaaccctgctgaagcagccagacctgtgtggtagaagggaggggatggtggtcccagagagctttttgggtttagaaaagacctttgcagaagcacgtctcatatcagcacaacagaaaaatggtgtggtgatgccagaccatgggaaaagaagagacaatcgttttcattgtgatctcattaaaggagacttaaaggacgaatcttttaaacagagtcacaagcctctcaggtccacagatgtgtcccagaggcatctggacaacacaagagctgccacctcccctggagtggggcagtcagcacctgggcacaaggaaggagatagtgcccaagtgcaatggctccctaatcaaagtaaactataatcagactgcagtcaaagtgcctacaacacctgccagcccagtgaaaaactggggaggattccggattccaaagaagggggaacggcagcagcagggagaggcccacgatggggcctgccaccagcactcagactacccatatttgggcttaggccgagttccagccaaggaaagggcaaaaagcaaattaaaatccgacaatgagaatgacgggtatgtccccgatgtggaaatgagtgactcagagagtgaggcatcagaaaagaaatgtatacacaccagcagcactatcagcagaaggacagacattatcaggagaagcatcttggcttcttgatgcaacagagatgatgcggaagccctttgggcttcgtcattggggtttgctagaggagagctctgatgtgggggagaagcagaaacccattaatcctgagctacacaaacacatttacttgcaattcagattaatttttttccagagtcatttttaaatcatttttgtgagaagtttgtgttatttgcaacttgttgaggaaacagaagagtagattgtaaccataagacactgctaagactagaacccgaactgaacactaaaataaaaatgaaatgttttaaagaaggcaaggcttaaataagcctcatgaatttttatagccctctgcattcttcccaaagcacaaactcatggttacctgaatatagggaaccagatatggttcttgagaaaccctcatggtaccattcacagcccataaagtttattttctaggactgtggtagatcttgaaatcatatttatatttggccctcaaggctatttttgttgcattatagcatataggcagcagctctgaagcttcagtaacactaagaaatttatgtgtaaatatagcagtcagggaagagaattttaaaaaaggtcattattgaagaagctgaggggacagggtagagctgctgcaatatggagatttagggtaaatatggcaaggtccctgctgccttgaaagccctgtgaagtgggttgtggatatgggactggtggagagtgagactgttaggaaagttgtatctatgaataagggcagttgaagtagaattttttaccagtccaccttgaccttcttcttccctaacccacggctcttgagcccagcttgggatttcccctgggccattgccaattacctgggccatctggctttccaattagtacagtggctactcaaagttcaagcgaagaacttccagactctggtgactgttacttcccagagccaaccactagtgcattatgtttaggggatctggggcttccaacatgaatggattccttaagaaaaaggaaaaaaaaaaaaaaagaaaaaaag

SEQ ID NO: 9037 - DNA, 1483 bp, Homo sapiens
  SIMILAR (1058)..(1135): 1001254mologous to Homo sapiens unnamed protein product,accession number AK000042,Smith-Waterman Score=139.
cttttgatattccattccccaaaataggaaaactcataaaatccaatgttcctgagctgagaggacacttccctctcagcataaccctggtcctgcgactcatgctgctggcttccaagggagatgacccagaggatgccaaggcaaaggtgctatcagtgctaaagcattcattgctgtccttcaagcaacccagagtcatggacatgttaaaactttacttcctgttttctttgcagttcctgggtggaaagagggctatttagatccaagaagggtaatcctatggggtttgctgggacttggtattcacatttggcatttatccatggaacctttctaatcttgtttttgtcagttttcttgtaaatggactcttccatgatctctgtcagccaaccaggaaaggctcaaaacatttttctcaagacgttatggaaaagctagtattagtattggcacatctctttggaagaagatattttccaccaaagttccaagatgcacacttcgagttttatcaatcaaaggtgttccttgatgatctccctgaggattttagtgatgctttagatgaatataacatgaaaattatggaggactttaccactttcctacgaattgtttccaaactggctgatatgaatcaggaatatcaactcccattgtcaaaaatcaaattcacaggtaaagaatgtgaagactctcaactcgtatctcatttgatgagctgcaaggaaggaagagtagcaatttcaccatttgtttgtctgtctgggaactttgatgatgatttgcttcgactagaaactccaaaccatgttactctaggcacaatcggtgtcaatcgctctcaggctccagtgctgttgtcacagaaatttgataaccgaggaaggaaaatgtcgcttaatgcctatgcactggatttctacaaacatggttccttgataggattagtccaggataacaggatgaatgaaggagatgcttattatttgttgaaggattttgcactcaccattaaatctatcagtgtttccttgccgtgacgtattgtgaaaatgaagacgacaacgttgtcttagcctttgaacaactgagtacaactttttgggaaaagttaaacaaagtctaaaaacaaagtctatgcaaaccacttaaaaataattccatagtagtttttcaggtcacgtttttgattcttatgcttcttgccagaaatacattatgataaagtggaaatacattacgatgaagtggaaagagcaaacactttggaatcaaacagagttgcaatcaaacctgccatgttctgtcatgtcacgtttttgattcttatgcttcttgccagaaatacattatgataaagtggaaatacattacgatgaagtggaaagagcaaacactttggaatcaaacagagttgcaatcaaacctgccatgttctgtcaggtatactaaataatttgtgagtattcat

SEQ ID NO: 9038 - DNA, 522 bp, Homo sapiens
  SIMILAR (2)..(217): 941254mologous to Homo sapiens Human PRO1113 (UNQ556) amino aacid sequence SEQ ID NO:24,accession number Y99347,Smith-Waterman Score=390.
atggcccagaacattggcaggcattactgcatatctgcagtgtacgcggaacacccatggcagtgggatatatcccggaaacccacaggatgagagaaaagcttggcgcagatgtgatagaggtggcttttgggcagatgatgattattctcgctgtcagtatgcaaatgatgtcactagagttctttatatgtttaatcaggttgggataattcttcactattccacccttgccacagtactatgggtaggagtgacagctcgaaatatctacaaacaagtcactaaaaaagctaaaagatgccaggatcctgatgaaccaccacctccaccaagaccaatgctcagcagtccccagtatcagctgcctgccgcaggagctgcctgggaagacactgccctaacggctgcccttgcgtctcatggtccagtaccaaatatgagggctgttgggcaaacctcccaaccaaatcactacactgaaagctcacctggggacctgcttctggggaaatcagcctg

SEQ ID NO: 9039 - DNA, 2592 bp, Homo sapiens
  SIMILAR (63)..(719): 251254mologous to Homo sapiens ETL protein,accession number AF192403,Smith-Waterman Score=215.
  misc_feature (1)...(2592): n = a,t,c or g
gcttcctccttcccttttctcaccaaagcaaaaaagagaactcagaccaactgatgactctctttacaagcttcaactcattgcattccgcaatggaaagctttttccaagccactggaaattcaacaaatttggctgatgatggaaaacgacgtactgtggttacccctgtgattctcaccaaaatagatggtgtgaatgtagatacccaccacatccctgttaatgtgacactgcgtcgaattgcacatggagcagatgctgttgcagcccggtgggatttcgatttgctgaacggacaaggaggctggaagtcagatgggtgccatatactctattcagatgaaaatatcactacgattcagtgctactcccttagtaactatgcagttttaatggatttgacgggatctgaactatacacccaggcggccagcctcctgcatcctgtggtttatactaccgctatcattctcgtcttatgtctcttagccgtcattgtcagttacatataccatcacagtttgattagaatcagcctcaagagctggcacatgcttgtgaacttgtgctttcatattttcctaacctgtgtggtctttgtgggaggaataacccagactaggaatgccagcatctgccaagcagttgggataattcttcactattccacccttgccacagtactatgggtaggagtgacagctcgaaatatctacaaacaaggtcactaaaaaagctaaaagatgcccaggattcctgatgaaccaccaccttcaaccaagaccaatggctcagattttaccctgatttggtgggtgggtatcccccatcattggttttgcgggcataacttgcagcagcgaacattaaagaattacggcagtcggccaaaccgcacccctattgctgggatggcatgggaaccctccttgggaggccttctatgggccagccagcttcagcacttttgtaaactgcatgtactttctgagcatatttattcagttgaaaagacaccctgagcgcaaatatgagcttaaggagcccactggccagcaacagagattggcatgccaatgaaaatggcgaaataaatcatcaggaattcaatgtctttgtctctgatttctacatcagccttggaaaatgagcacacttttcattctcagctcttgggggccaggccttactttgctcttatatgttgcactgtggatgtttggggctttggctgtttctttgtattaccctttggacttggttttaagcttcgtttttggagccacaagtttaagcttcagtgcgttcttcgtgatgcaccatgtgtgttaacagggaggatgcatagacttgccgtggatcatgacttgcctgcccaggaccggagctcggtattcagtgcaaagtcaacgtcccagcccccccaacttcttaatgggacggaatggaggggccaccccaaatgccccaaatagcagtgcggaagtcttccatgcaccaaacaaaaagtgctttcaagcttcaaaaaattcctcccagggctgtcaaattaaccaaactttgcaggcgggctgcagcttcagtggccatgccaatttctttacctttggaactccaccccttcagcttgataattagttttgacagaacatttcaatgggacaatgatatttaaatggcacgttggcgccttttggaagtttcagttttcgaacaaatgtgcactcaagcccgcaccattaaaaacagaagtaaaggacacccgggcaagccgactcacagtcctgaaaagattatgcctacgatgtcccaacgaagcgtggaaggaagcgtgcagaacggcttacctaaaaagcccggctgggcaataacgaaggacactgagggaagcggaagagcttatttagcctacagagagagacagtacaacccaccccaggcaagacagcagcgatgctttgtagcacaccttcccaaaaagtagcagaaattttgaaaaagccagtttcacccacttagtaaaaaagatgcgttaagggaagcccagctgtgggtggaacttggaaaatccggccaaaaatctttatggcctccaactttgccatttcagaatggacccaattaaaaagccaatggggcagggagggacccttgcctcggtacccgatagcactggccaatgttaaggactgggattatggaaacacgaaacttactgtgtaaacatngcctgggcttccctaggcagaaattcaaatataaactgtgatactcccccatccctgaagctatgagcatttaaaaactggttttacagcccaccataaggattcaaaagaatttggaataaacttttgaagtttttggattttacttatttttatcccccaaattgttgctattttttacggatctgaaacaaaatctttctaaaacattgttttagttgtcaaagcaccaacaggacattttgggatgtgaaatgtaatttcttgggaatctggtaatttggtaccttaatatttccaggcctggtatttaatataataaataggtgtttgttattgtgtcaaaaaaaaaaaaaaaaaa

SEQ ID NO: 9040 - DNA, 307 bp, Homo sapiens
  SIMILAR (1)..(204): 1001254mologous to Homo sapiens B17 long form,accession number AF232673,Smith-Waterman Score=355.
acttcacatgtatcattctccgagcctgatattccgtcctcaaaaagtactgagttacctgtggactggagtattaaaacgcgactccttttcacctcttctcaaccctttacctgggcagatcatttgaaagcacaggaagaagctcaaggtcttgtccagcattgtagggcaacagaagttactttgcctaaaagtatacagtttactgtcctgttccgagcagcaggattagctggaagtgacttaatcacagctctcatatctccaacaactcgaggtttaagagaagctatgagaaatgaag

SEQ ID NO: 9041 - DNA, 286 bp, Homo sapiens
  SIMILAR (2)..(208): 951254mologous to Homo sapiens B17 long form,accession number AF232673,Smith-Waterman Score=328.
gcgtaaagagaaacatgaagtacaaatggatcacagacctgaatctgttgtgttggtaaaaggaatcaacacctttacattgctcaattttttgattaactctaagagtttagttgctacctcaggtccacaggcaggacttcctccaaccctcttgtcccctgttgctttccgaggtgccacaatgcaaatgcttaagagtggatctttctctgcagtactgtatccacacgagccaactgctgtatttaacatctgcctgcaaatggacaaagtacttgatatg

SEQ ID NO: 9042 - DNA, 2165 bp, Homo sapiens
  SIMILAR (516)..(743): 941254mologous to Homo sapiens B17 long form,accession number AF232673,Smith-Waterman Score=370.
gccgcgtaattatccgtttttagattctaattaagaaaaggacttgctatgggaagagaagtttcctgatagaacaactgttactgaattacctcagacttcacatgtatcattctccgagcctgatattccgtcctcaaaaagtactgagttacctgtggactggagtattaaaacgcgactcctttttacctcttctcaaccctttacctgggcagatcatttgaaagcacaggaagaagctcaaggtcttgtccagcattgtagggcaacagaagttactttgcctaaaagtatacaggatcccaaactctcctctgagctccgttgtaccttccagcagagccttatctattggctccaccctgctttgtcttggctaccactgttccctcgtattggagctgatagaaaaatggctggaaagacaagtccttggtcaaatgatgcaaccctgcagcatgttttaatgagtgactgggctgtgagctttacttctctatataatttgctgaagaacaaacttttccccctatttctacgtttgtacctatcagtttactgtcctgttccgagcagcaggattagctggaagtgacttaatcacagctctcatatctccaacaactcgaggtttaagagaagctatgagaaatgaaggtattgaattttctctgcctttaataaaagaaagtggccataagaaggagacagcatctggaacaagcttgggatatggggagtatgtgattaaaataactttatatcatccactgacttatggactcatgaaatagatttgcacaggaacagcttgtgaaatagggactctaactgtagcaatttcctagggagcaagccatcagtgatgaggatgaagaggaaagtttttcctggctggaagagatgggtgtgcaagataaaattaaaaagccagacatactttctatcaagctgcgtaaagagaaacatgaagtacaaatggatcacagacctgaatctgttgtgttggtaaaaggaatcaacacctttacattgctcaattttttgattaactctaagagtttagttgctacctcaggtccacaggcaggacttcctccaaccctcttgtcccctgttgctttccgaggtgccacaatgcaaatgcttaaggcacggagtgtgaatgtgaaaacacaagctctttctgggatacagagaccaatttagtttgggagattacaggtcctattcatggcctcattctctggcattcacttgaccatgctgctcaaatctttcacagagtgggatcttttctctggcagtactgttattccacacgagccaactgctgtatttttaaccatctggcccggcaaatggggcaaagtacttgatatggaggttgttcataaggagcttactaactgtggtttgcaccctaacactctggagcaacttagtccaatacccgttacttgggaaatcatctttacggaatgtggtgctgagagactacatttataattggagatcctgaacaccaaagtaagcctaaaaggaatctttgaggaaaaaagccttctagcaaggaaattcaagattcttgaagttgaaggaatatactgaaatgtttataaacataaacttttacctacagtagcatcctaaggttttaaaatgtgttttacctattttccagattagatttttagatataaagatgaaaaactcagataactcaaatgagatatctatatccctacaacctaattgtatattgagcagaaactgaattaatatgcttccttgcaaatgggaaatcacatagcagttaccccatggcattgtgactaatggcatcagggcaaaaatatgttactttacgatttacctgttagcaggttcttgtttcataaaggtagaaaataaatacagacaacatctactgagctagttgattggtgatgcttctacccttaatatctttcctactgatttataattcctttattttcacatatactaaaactttttatatgcatgttaattcagataaaaaggcgttttggattccacatagaatagtgttaagaattgtgaagtacactgagctgtcacggcaaagtagtatttaatgtgcttataggggtgtgtgtgtgtgtgtgtgtgtgtgtgtg

SEQ ID NO: 9043 - DNA, 466 bp, Homo sapiens
  misc_feature (1)...(466): n = a,t,c or g
nnnnnnnnnnnnnnnnnnnnnnnnnnnnnnnnnnagccacatctcacatggcagcagataagagaaaaaaaggtagtgatcttttagtaaagaaacctgagactggtagtgggcttggannnnnnnnnnnnnnnnnnnnnnnnnnnnnnnnnnnnnnnnnnnnnnnnnnnnnnnnnnnnnnnnnnnnnnnnnnnnnnnnnnnnnnnnnnnnnnnnnnnnnnnnnnnnnnnnnnnnnnnnnnnnnnnnnnnnnnnnnnnnnnnnnnnnnnnnnnnnnnnnnnnnnnnnnnnnnnnnnnnnnnnnnnnnnnnnnnnnnnnnnnnnnnnnnnnnnnnnnnnnnnnnnnnnnnnnnnnnnnnnnnnnnnnnnnnnnnnnnnnnnnnnnnnnnnnnnnnnnnnnnnnnnnnnnnnnnnnnnnnnnnnnnnnnnnnnnnnnnnnnnnnnntcgtgccaagcatggagtaatt

SEQ ID NO: 9044 - DNA, 295 bp, Homo sapiens
  SIMILAR (205)..(294): 961254mologous to Erwinia chrysantum RepE,accession number AF239688,Smith-Waterman Score=155.
atgaacaggttgaaaaaggagtggatgcttgagcacattgtggaaaataactccggcatggaatctcaagacattaaaggccattttcatgctgctgataaagacttacttgaaatgggctatttacaaaagagaggtttaattggacttacagttctacatggctggggaggcctcacaatcatggcggaaggcaaggaggagcaaaaccggtttacgcagtttcggcttagtgaaacaaaagaaatctccaatccgtatgccatgcgtttatacgaatccttgtgtcagtatc

SEQ ID NO: 9045 - DNA, 3205 bp, Homo sapiens
  SIMILAR (3166)..(2732): 951254mologous to Homo sapiens SThM,accession number U14550,Smith-Waterman Score=740.
atgatctctgcaacctctacctcccaggttcaagcaattcttgtgcctcagcctccccaagtaactggggactacaggttgcacgctacccacacctggctgattttttttatgttttagtagagacagggtttcaacccatgttgcccaggttggtctcaaaactcctgagctcaggcaaatccacccgccttggcctcccaaagtgctagggattacagggtgtgagccaccacacccagctattttttctttcggttttttaattttaaagtgggggggggggggtctcaatttgttaccctggctggtctcgaactcccggacttaagcgatcctctggctccaagcccactaccaagtctcaggtttctttactaaaagatcactacctttttttctcttaatctgctgccatgtgagatgtggctttcaacttctgccatgaattgtgaaggccttcccagccacgtgggaacctgtaagtccaataaacctcttttgtaaattaaaaaaaaaaaaatcactatttaacgatactaggatggattgtgactgttgaggagtacttacatatcctacatttgactacattatttccaaaccaagtattccatccaaagggaacatactgctatcatagaggaccaagggaggggactgtttaaggttgccaagggtgaaggcgagctgagagggtttgttcctcgtggccagttaactctgaaatctctctttaattccctgctgccccgggcagcagaatgcccatggtttcccccaagtatgttatctgcttttagcagtttaaaagccccaaatggtctggttctggtgatcagaaggtctctgaatttctgaaagtggtgtttccgtttctgggtgacctgagttaatcctttacaaatccctcttgtaaaggtgtgctaatagaaaggatccaccctttcaaaagctggcagaacccagacccgtgcccctaaattgacccaacgtaggctggatgtgcctcagggaaggtctctttgccagctgtccctgtggaaggaccccccttccttccccccccagctggttgcctttgcacactggaagcatctcagactgtggcaaagccgtgttagttcatccaaggacagttaaatcccaggggcttggttaagtgctgtggtgataaccttgttttggatgagactttaacttaaaaccacttaacaataaacttggtgaaactaccgtcagctgagttcaaatttactgacggcatgatatgaggatgaaggtttattacctggtgacatcatcctgttggtgacatcatcctgttggtgacaaggtggtgatacatctctaatggggacttccctcaagtggcaggcaggctgccaagcaactaacccccatcaagtgccagaccctcccagtgttctgagagtcatctccatgctaaacagcctgcgttttatatgatttctctacccagccaaaaaaaaaaaaaaatggtccatcatgtacgcagttaatctaggtcttaagttatattctgggctttttttctcccactttattatggagcagaaagtaagccctatccatggttctttagaaaagggctctttaagaggttgtccttggagtccttgaatcactttagcatctggggtaggatgttgccaccaggaggatttggggctggagcgtgtgtgtttgcctttgacctggactgctgtctgatcttgctgaacactccaccgacatttcctaaagttgctcagtgccaatccagcaaagcagtccattttcccttggccaagattgagatgtattgttttagatacagaagagttcttggatgagccaaggacaagctggggtgtcctatattgaacagacctcgatgaaaatcttgaattcaccccagtgccctctgttggcaagggaaggtgaagattgaaaaagttaaaaaagcttttggccccctgagaggatcaggggccgcaactcttgaagaagcaaaagggctcagtgcattggggtcagcgctggtacagctgaaggatgccggccttgtgcaggtccctccacaggggcagcttccagggacagatcgtggtttgcataaaatatcaatggcttcatttttcgttcgaaatagtggtcggaaaatttccagtagttgcttgtgatgaatccataggcactgacctggtcacaggtatgcaaagctgtcagcagcatgagagccccggtactaggcatatataggtctccaaaatgtgtgttaatcaactttgatttccaagaacctttctgtccaggtagctgatgaagtccggatgtagcagcttgaatttactggcagaggcttctggtccaaaataggcgtgcggcctgtcccctttatctaggccctcagggacaggcacgcccagaatggccgatctcagcatcacatagtcgcggatgtctgaggggatgaagatatactgcaggtcctgtccttgtggcacggaggtgaagcccagattccagtaggagacgagggagttcttcatcgtgttcacagtgaaaccatagaaggaagtcttggtgcccacatcgcgctcgaagcctttgatcacagctccattgagtctgaatacatagtcatgggcatcgatgttgggaccctggcgggacccattcagaatgcctccgttgcccaccacggcacaccggatacactttggaggggtgttccctgggcggagcacaacagcttggcactctctgagccgttcagaaggctcagggtggaggcgatgacttggtgagagagcccccgccagccatacggggctttgtgttggctcaggcggtcccagagcgctggggtgaagaggtccccccacagcagcactggaatggagagattgaacaggccacggaagtgggggtgccgctgaatggccaggtgaagcaggtgtcggcaggcctggccctttcctgtccaagaattcgatgccttggattgaaagaatgcttcaaatgatgtggtgtccctggctccggccgctggccccgggtaccgctgcaccgccgagaagtacagggcaaagaggagccccgagcaggcagccgtgagcaggagcagcacccagaagaacgacccgcgcgggagccccatacagccccggcccgcgagcgccccgtccgctgacgtccc

SEQ ID NO: 9046 - DNA, 1521 bp, Homo sapiens
  SIMILAR (3)..(479): 1001254mologous to Homo sapiens dJ71N10.1.1 (novel protein (contains translation of cDNA COL01816 (Em:AK000076)) (isoform 1)),accession number AL133544,Smith-Waterman Score=853.
aaataaacaatacaaatactttcagagttttacctcatccttcttttgtttacacggctaaattccatccagctgtaagagagctagtagttacaggatgctatgattccatgatacggatatggaaagttgagatgagagaagattctgccatattggtccgacagtttgatgttcacaaaagttttatcaactcactttgttttgatactgaaggtcatcatatgtattcaggagattgtacaggggtgattgttgtttggaatacctatgtcaagattaatgatttggaacattcagtgcaccactggactataaataaggaaattaaagaaactgagtttaagggaattccaataagttatttggagattcatcccaatggaaaacgtttgttaatccataccaaagacagtactttgagaattatggatctccggatattagtagccaggaagtttgtaggagcagcaaattatccgggagaagattcatagtactttgactccatgtgggacttttctgtttgctggaagtgaggatggtatagtgtatgtttggaacccagaaacaggagaacaagtagccatgtattctgacttgccattcaagtcacccattcgagacatttcttatcatccatttgaaaatatggttgcattttgtgcatttgggcaaaatgagccaattcttctgtatatttacgatttccatgttgcccagcaggaggctgaaatgttcaaacgctacaatggaacatttccattacctggaatacaccaaagtcaagatgccctatgtacctgtccaaaactaccccatcaaggctcttttcagattgatgaatttgtccacactgaaagttcttcaacgaagatgcagctagtaaaccagaggcttgaaactgtcacagaggtgatacgttcctgtgctgcaaaagtcaacaagaatctctcatttacttggccaccagcagtttcctcacaacagtctaagttaaagcagtcaaacatgctgaccgctcaagagattctacatcagtttggtttcactcagaccgggattatcagcatagaaagaaagccttgtaaccatcaggtagatacagcaccaacggtagtggctctttatgactacacagcgaatcgatcagatgaactaaccatccatcgcggagacattatccgagtgtttttcaaagataatgaagactggtggtatgggcagcatagggaaaggggacaggaaggttattttcccagcttaatcatgtgggcttagttgaaacattgtatccaggaactgcctcctgagataaaggagcgatcccctcctttaagccctgaggaaaaaactaaaatagaaaaatctccagctcctcaaaaggtgggggataatactggtgggcagaggtcatggatgttgctcagtatcctagaatgcagaggacagctcccctcaacaaagaattctctggccaaaaatgtcaacaggatggagcttagagcagtgcccctctaa

SEQ ID NO: 9047 - DNA, 2877 bp, Homo sapiens
  SIMILAR (2185)..(2874): 901254mologous to Escherichia coli Respiratory nitrate reductase 2 a chain (EC 1.7.99.4),accession number D90787,Smith- Waterman Score=1093.
atggctgtgctgatttttctgggctgtctgttgggtggtattgctatcggtttgcctattgcctgggcactgttgttgtgcggggcggcgttaatgttctggctggacatgtttgatgtccagatcatggcacaaacgctggtgaacggagccgatagcttctccctgctggcgattccgttctttgtgctggcgggtgaaatcatgaatgcgggcggcttgtcaaaacgcattgttgacctgccgatgaaactggtggggcataaaccaggcgggctgggctacgtcggcgtgctggcagctatgattatggcgagcctttctggttctgccgttgcggataccgccgccgttgccgctctactggtgccgatgatgcgcagcgccaactatccggtcaaccgggcggcggggctgattgcctctggcggcattatcgcgccaattattcccccttccattccgtttattatcttcggcgtttccagcggattatccatcagtaagctgtttatggcgggcattgcccctggcatgatgatgggcgcaacgctgactttagggaagcgggcgcgcttcactgaagatgatacccgggaacgggacgccataagcgttatcaatcaccagcggaatgccgtgttgattcgccagcgcgtcaagcttcagcaactcttcgtcattcgagttttagcaatgcgaatatttgtctacggcagtttacgccacaaacaaggcaacagtcactggatgaccaatgcccagttactgggcgatttcagtatcgataactaccagttgtatagcctgggccactatccaggcgcagttccggggaacggaacggtacacggtgaagtttatcgtattgacaacgccacgctggccgaacttgatgccttgcgcaccaggggcggtgaatacgcgcgccagttgattcagacgccgtacgggagtgcatggatgtacgtttatcaacgacccgtcgatggattaaagctaattgaaagcggcgactggcgggtattgcgctggctgcgggtccactccatcgatgtgccggacccaatttttggtctgacggtaaccggggatcgtaccgaccgagcgggaaaaaccagtccggcacaagccggatgcaaactgttcctgacgaatccgctggggatcggcgttcttaccacggctgagaaaaaatcactgttgaaaccagaacatcagggactggcgacggaagtaatgtgccggatgaacatcgcaggcgcgtcctttgccaacatcgaaggcgtaaaagcgatgaccgacgttacgggctttggtctgctgggccacttgagcgaaatgtgtcagggggctggtgtgcaggcacgcgtcgactatgaagcgatcccgaaactccccggtgttgaagagtacattaagttgggcgcagtacctggcggcactgaacgtaactttgccagctacggtcatctatggcttagagcacattgccaagaagttcggatatgcgggcgcgtcttttccgcggcagtagcaggtatcgtcgaactccagcaaggctcactttcgtcgcatcaactcagctcgcgatgtgaagcgatagcaattgtcgcacagcggtcatgtaaggcaggatcggtagtgctgtaccgtaaatttgaagttggtgaagtgattaccgtgcgtccgcgagctaacgcgtttgatatcgatctgcatattaagccggagtatcgcaaccttctgaccagcaatagcgtgttctgggcagaaggcggggcgaaagttcagctgaatggtagtggtctgaccgtacaggcatccccgctctccagagcattaaagggagccattagcttcgacaacctcagcggtgccagcgccagtcagcgtaaaggcgataagcgtattctgtatgcttccgaaacagcggcccgtgcggttggcgggcagattacgcttcacgctttcgatgccggaaaactggcggtcgggatgccaattcgctatctcggtattgatatcgggcaaatccagacgctggatctgattaccgcacgcaatgaagtacaggcaaaggcggtactttacccggaatatgtccagacctttgctcgcggtgagcacaggagagtcatcgaacgactggtacttgcgacttgccgccggctcgccgatgactggggcgagcaaaccaacgtaccgaaatccgccgactggtataactccaggtacatcatcgctgggggtctaacgtaccgcagacacgtacgccggacgccccttgtttaccgaatacgctacaaaggcactaaaaccatcgccattacccctgactactctgaagtggccaaattgtgcgaccagtggctggcaccgaaacaaggcactgatagcgccctggcgatggcaatgggccatgtgattttaaaagagtttcatctcgataatcccagcgactactttatcaactactgccgccgctacagcgacatgccgatgctggtaatgctggagcctcgcgacgatggtagctacgttcccgggcgcatgatccgcgcatctgacctggtggatggactgggcgaaagcaacaatccgcagtggaaaaccgtagcagttaataccgcaggtgaattggtagtgccgaacggttcgattggtttccgctggggagaaaaaggcaaatggaatctggaatccattgccgccggtacggaaaccgaattgtcgttaaccctgctcggtcaacatgacgctgttgcaggcgtggccttcccctactttggcggcattgaaaatccgcattttcgcagcgtaaaacacaatccggtgctggtgcgccaattgcccgtctttaggcgcttgacgtag

SEQ ID NO: 9048 - DNA, 2109 bp, Homo sapiens
  SIMILAR (1028)..(1138): 1001254mologous to Escherichia coli pot. PBP 1B large component,accession number X02163,Smith-Waterman Score=187.
cccttgtattatcagccacctgactggtaagggtttctgcattctgaaaaaagcaatctacctgatttatttatcagcggggtaactttgcttttttccggcacgatcgatttctcattcgagaaattgaggacctgctattacctaaaataaagagatgaaaaatgtcaaaattaaaaattgcggttagtgattcttgcccggactgttttaccacgcagcgagaatgtatctacattaatgaaagtcgtaatatcgatgtggcggcaatagttttatcgctcaacgatgttacatgcggaaaactcgatgaaatcgatgccacgggttatggcatcccggtatttattgctactgaaaatcaagaacgtgtacccgcagagtatttgccccgtatttcgggtgtctttgagaattgcgaatcgcgacgagaattttatggtcgccagttagaaaccgctgccagccattatgaaactcaactgcgcccacctttcttccgcgcactggtcgattatgtcaatcaaggtaacagcgcgtttgattgccctggtcatcagggcggcgaatttttccgtcgccatccggcggggaatcagtttgtggaatactttggcgctgttccgtgccgacttgtgattccggcactgaagaaacagcgtaagttgagcgatcttgaaactgcgattgtggtcgtcgaccgctttagtggtgaagttcgtgcgatggtcggaggttctgagccgcagtttgcgggctacaaccgtgcgatgcaggcgcgtcgttcgattggttcccttgcaaaaccagcgacttatctgacggccttaagccagccgaaaatctatcgtctgaatacgtggattgcggatgcgccaattgcgctgcgtcagccgaatggccagcgaaagcgtcagagtgatgctggtggatgcgttgacccgttcgatgaacgtgccgacggtaaatctggggatggcgctggggctgcctgcggttacggagacctggattaaactgggcgtacccgaaagatcagttgcatccggttccggcaatgctgctgggggcgttgaacttaacgccaatcgaagtggcgcaggcattccagaccatcgccagcggtggtaaccgtgctaccgctttctgcgctacgatagacaatcgcggaacatggcaaagagctgtatcagagcttcccgcaggcggaacgcgctgttccggcgcaggcggcgtatctgacactatggaccatgcagcatggtggtacaacgcggcacgggtcgtaagcttggggcgaaatacccgaacctgcatctggcagggaaaacagggactaccaacaataacgtagatacctggtttgcgggcattgacggcagcacggtgaccatcacctgggtcggccgtgataacaaccagccgaccaaactgtatggtgccagcggggcaatgtcgatttatcagcggtatttggctaaccagacgccaacgccgctgaatcttgttccgccagaagatattgcagatatgggcgtggactacgacggcaactttgtttgcagcggtggcatgcgtatcttgccggtctggaccagcgatccgcaatcgctgtgccagcagagcgagatgcagcagcagccgtcaggcaatccgtttgatcagtcttctcagccgcagcaacagccgcaacagcaacctgctcagcaagagcagaaagacagcgacggtgtagccggttggatcacggatatgtttggtagcaatgaacatctaagcgggtacgagctcgattcgtaccctctaagctcagcacgccgccgggcgcgcttcactgaagatgatacccgggaacgggacgccataagcgttatcaatcaccagcggaatgccgtgttgattcgccagcgcgtcaagcttcagcaactcttcgtcagtaatcacattgcctgttggattcgtcggccgggagacgcaaatcatcccggtttcttcgccaatatgcagatgctcaaaatcgacgtggtatttaaactggccttccggcagcagttcaatattcggacgcgcagagacaaacagatcttcttccagtccggcgtcacatag

SEQ ID NO: 9049 - DNA, 426 bp, Homo sapiens
  SIMILAR (270)..(103): 481254mologous to Homo sapiens Protein encoded by the endogenetic fragment of HERV-W,accession number B07702,Smith- Waterman Score=114.
atgtggctggggtttgtctcacagtggaggcaaggaattgcaccttttttctattattgtacaccttgaaggcgaggttaattaaatcctgttgtggggtttgagggccggaatttaatttttggagttttatttaatgtcgggagcagattgggtaataaaatgtatactgagaataagccggccttttgagtttttagggtctagggctgtaaagagtctcagggttgctgccaaacgagccatgaactgggctggatttttatatttgatgaaaaagagcctaaacgctatccgatttgggataaagaaaaaggagcattatccttgactatgcttttagccccagccacctttttaagagtaaattgctgggcaggagggggagggctagtcacggaacgtatctgctcgtgccgaattccc

SEQ ID NO: 9050 - DNA, 380 bp, Homo sapiens
  SIMILAR (366)..(319): 431254mologous to Lycopersicon esculentum cell wall hydroxyproline-rich glycoprotein,accession number M11759,Smith- Waterman Score=35.
atatttgatgaaaaacagtgtaaacactaactgatttgggagaagttggataaagaaaaaggagcattacccttgactatgcctttagctccagacacctttttaagaggagattgctgggcaggtgggagagggctagaagcggaatgaaactgtaagccagaccgggtgtgaggaggggaggtgataaaaggattatagggtggaggagccgaggctgaggaagaattgggacctagctccacctggcgaggaggggagaggtcagatgggtctgtagaaaaggaagattagaaagactcagcaacacttggggctgggactgaggggacaggcaggaggagaagaaggagggagaagaagagggaagaagaagaagc

SEQ ID NO: 9051 - DNA, 475 bp, Homo sapiens; identical to SEQ ID NO: 992
  SIMILAR (3)..(395): 1001254mologous to Homo sapiens Hb2E,accession number AF235097,Smith-Waterman Score=706.

SEQ ID NO: 9052 - DNA, 462 bp, Homo sapiens
  SIMILAR (172)..(456): 401254mologous to porcine endogenous type C retrovirus polyprotein,accession number AF033259,Smith-Waterman Score=181.
accatcacagacgccgagcttcgggtaactctcacagtggaaggccgagacagtttaactaaattatctgcttccctgacgattcctggactacagccacatctcattgccgtccttctccccaacccaaagcctccttcgcgtcttcctctcatatccccctaccttaacccacaagtatgggacatctctactccttccctggcaactgatcacatgcccattaccatcccattaaaacctaatcacccttaccccactcaacgccaatatccaatccctcagcacgctttaaaaggattaaagcctgttatcactcgcctgctacagcatgggcttctaaaacctataaactctccttaccattcccccattttacctgtcctaaaaccagacaaggcttacaagttagttcagaatctgcgccttatcaaccaaattgttttgcctatccactccatg

SEQ ID NO: 9053 - DNA, 576 bp, Homo sapiens; identical to SEQ ID NO: 1844
  SIMILAR (259)..(570): 551254mologous to Sus scrofa domestica polyprotein,accession number U77600,Smith-Waterman Score=300.

SEQ ID NO: 9054 - DNA, 651 bp, Homo sapiens
  SIMILAR (340)..(582): 471254mologous to Feline leukemia virus gag-pol precursor polyprotein gPr80,accession number M18247,Smith-Waterman Score=174.
agatgtcaagtaaatattattgtcagacctctgagcccaagcctgcaggtatacacccagatggcctgaagcaagtgaagaatcacaaaagaactgaaaatggccggttcctgccctccaccctataatccttctatcacctcccctcctcacacctggtccagcttacagtttcattctgtgactagccctcccccacctgcccaacaatttcctcttaaagaggtggctggagctaaaggcatagtcaaggttaatgctcctttttctttatccaacctctcccatctcagttagtatttaggctttttttcatcaaatcacccttacctgggtcaacgccagtatcccatcccacaacaggctttaaagggattaaagcctgttatcacttgcctgttacaacatgtccttttaaagcctgtaaactctccttacaattcccccattttacctgtccaaaaactggacatgccttacaggttagttcaggatctgtgccttatcaaccaaattgtcttgcctatccacgccatggtgccaaaccctgaaaccttcataccccttaccgtcctcaatccttaggaaaggtagaactgattaatggtcttttaaaaacacacctcaccaagctcagcctccaacttaaaa

SEQ ID NO: 9055 - DNA, 1404 bp, Homo sapiens; identical to SEQ ID NO: 3044
  SIMILAR (1)..(246): 701254mologous to Homo sapiens putative p150,accession number U93568,Smith-Waterman Score=282.

SEQ ID NO: 9056 - DNA, 482 bp, Homo sapiens
  SIMILAR (7)..(153): 791254mologous to Homo sapiens Human secreted protein, SEQ ID NO: 5210,accession number G01129,Smith-Waterman Score=216.
atgcatgaaatttggtgccatgagtcggatcgggggacctcccttgggagggcaatcccctgtcctcctgttctttgctccatgagaaagatccacctacgacctcaggtcctcagaccgaccagcccaaggaacatctcaccaattttaaatcgggctgctcctcgccaggcccagctaggtcccaattcttcctcagcctccgctcctccaccctataatccttttatcacctcccctcctcacacctggtctgccttacagtttcgtttcgtgactagccctcccccacctgcccagcaattgactcttaaaaaggtggctggagctaaaggcacagtcaaggaacatttctgccatgatttgccagccagctccatgcagtcaaactacccagtgcacgactctggacacctcactactggaccatccctcttcaagcccacacttaatatagaatacagcacaggacatgctccata

SEQ ID NO: 9057 - DNA, 492 bp, Homo sapiens
  SIMILAR (7)..(321): 321254mologous to Santalum album proline rich protein,accession number AF020261,Smith-Waterman Score=113.
atgacctcaagtcctcagaccgaccagcccaaggaacatcacaccaattttaaatcaggctgctcctcgccagctgagccaggtcccaattcttcctcagcctctgctcccccaccctataatccttttatcacctcccctcctcacacctggtctggcttacagtttcattccacgactagccctcccccacctgcccagcaatttcctcttaaaaaggtggctggagctaaaggcacagtcaaggttcctgatcctgttccttcagactggatgagacctcccaacaggggtccccagccatctacagatgcattgaggctggcaataggtcagtgccctactgggatgcagcttcagaggaaggggcaggctgccatctttgctgtttctcagccttcactggtgatacctccaggtatgggaataactgaggaaactagagtctggagggcactcacagaaaactgcagcagtactacagaagagtag

SEQ ID NO: 9058 - DNA, 645 bp, Homo sapiens; identical to SEQ ID NO: 6816
  SIMILAR (431)..(556): 501254mologous to Homo sapiens Human secreted protein HCHPF68, SEQ ID NO:163,accession number Y86248,Smith-Waterman Score =112.

SEQ ID NO: 9059 - DNA, 1312 bp, Homo sapiens
  SIMILAR (187)..(345): 831254mologous to Homo sapiens Human secreted protein, SEQ ID NO: 5210,accession number G01129,Smith-Waterman Score=233.
atgagcgagccaaggctcagagacaataatgagcagcccaaagtcacagagttaacaagtggagattccctcattgaagacaggtcctccttgccagaggcaatgcaatgcagtgcccgcctgcacccaggtgaaataaacagccatgttgctcacacaaagcctgtttggtggtctcttcacacggacgcgcatgaaatttggtgctgtgactcggatcgggggacctcccttaggagaccaatcccctgtcctcctgctctttgctccgtgacaaagatccacctacgacctcaagtcctcagacccaccagcccaagaaacatctcaccaatttcaaatccggctgctcctcaccaggccgagctaggtcccaatccttcctcagcctctgctcctccaccctataatctttttatcacctcccctcctcacacctggtctggcttaccgtttcgttccgtgactagccctccccctcctgcccagcaatttactcttaaaaaggtggctggagctaaaggcacagtcaagaccatcacggacatcgagcttcaggtaactctcacagtggaagcccgcctgcgcccaggtgaaataaacagccatgttgctcacacaaagcctgtttggtggtctcttcacacggacacgtgtgacatttggtgccgaagacccgggacaggaggactccttcaggagaccagtcccctgtcctcaccctcactctgtgaggagatccacctatgacctcgggtcctcagaccaaacagcccaaggaacatctcaccaatttcaaatcggatcttctcggactgacgctgcccgatcgcctcagaagcctcctggaccatcacagatgctttgggtaactcttacagtggaggcatggccttttaaatcctataaactctccttacaattcccccattttacctgtccaaaaaccggacaagccttacaggaagctggagtcattcactgcaagggccatcaaaaggcatcagatcccatcactcagggcaatgcttatgctgataagggaactaaaaagtggaagaaggaggcagaagagggagaaccagagagatggcagcctgagaaggacttgcctgagaaggactcggccgacattgctggctttgaagatggagaaatgagactgagccaaggaatgcaggtggcctctggtgctgcaaaagacaaggaaatggattctcccacagaccctccagaaggaatgcagacctgccaacactatgattttagtccagtgagacccattttggaatgctggcctccagaaccctaa

SEQ ID NO: 9060 - DNA, 730 bp, Homo sapiens
  SIMILAR (721)..(503): 751254mologous to Homo sapiens neutral protease large subunit,accession number M27826,Smith-Waterman Score=286.
tttcgtgggggctgtctgagaagctttgaggcagtacagcctaggtaatttgctgagcttgatgggtgtcagggtcagtccaagtgaaagtggagagaggctgggatgaagggtgcaaaggaatagtaaagaaagcatgtttgacatatacgaacagaataatgcattgtgtagggaggtattgagcataggagagtatatgggtttggcaccatggggtgaataggcaaaacaatttggttgataaggcatagatcgctgaactaacttgtaaggcttgtctggtttcaggacaggtaaaatgggggaattgtaaggagagtttatagggtttaaaaggccatgctgtaacaggcgaatgataacaggctttaatctttttaaagcgtgctgcgggaatgggatactggcattgagtgcggtaagggtgattaggttttaatgagatggtaaggggtgcatgatcggtcgtcaaggagggagtagagatatcttatacttgtgggttaaggtgggggtatacaagaggaggacacaaaggaggctttggattgggaagaagggtggcaatgagatacagctgtagtccaggaatagtcagggaagcagataatttagttaaagtgtctcagcctaataagggaactgggcagatggggataactaaaaaggagtgcttaaaagagtattgtctaagttggcaccagagttggggagttttaaagaggtt

SEQ ID NO: 9061 - DNA, 1406 bp, Homo sapiens
  SIMILAR (994)..(1245): 561254mologous to Homo sapiens Human secreted protein sequence SEQ ID NO:195,accession number Y87156,Smith-Waterman Score =204.
tcaccaaacggaaccccctttaatctgatgtgaaggcaaatctctccaccgggggacccgttgggtgcggcggagacacccttcggtggctgagaaaccctcagacgccgtggaagcaccaggggtctgagcgcccagtgcgggaggtgcggggccggcttccctccccggggctggagccttcaggagcgccgcccccacccggcttcctccgagggcagtgctggactctggcctggcccctggccggccgctgcccttggcctcgtccaacccacacccgcggggcggaggctcctgctgtgcacaagcccggggcgccggggtggggcggctgggtctgggcccaggtgtcccgaatccaaaagcatcccactgcgctgcctgtaaattagcgatttcggatctggcttcagcattcttcctgggcacgggcatccttctgcccctgcagactggcagagcagcagaggcaaagtggacaatggggttctctgcctgggccactcccttctctggaccctggaccctggacagggatttgagtggggaggggcctgccttcctgtaaggcttgtctggttttaggacaggtaaaatgggggaattgtaaggagagtttataggctttaaaaggccatgctgtagcaggcgagtgataacaggctttaatctttttaaagcatgcttgactatgcctttggctccagccacctttttaagagtaaattgctgggcaggtgggggagggctagtcacggaacgaaactgtaagccggaccaggtgtgaggaggagaggtgataaaaggattatagggtggaggagcagaggctgaggaagaattgggacctagatcggcctggagaggagcagccctacaccacccagtccaaggctctatattgctggcaacactcacatccctgtccagatcttccccatcttcagaggccttgttcaccccagacctctcctccaactcctgtgacaaatgtctttggtctttgatgttggtgaccttcagatggagtttttgtggggatgtcctttttgttgatgttgatgctattcctttctgtttggttagttttccttctaacagtcagacccctttgctgccggtctgctggcgtttgttggaggtccattccagaccctgtttgcctggctatcaccagcagaggctgcagaacagcaaagattgttgcctgttccgtcctctggaagcttcgtcccagaggggcacccaccaaatgccagccagagctctcctgtatgaagtgtctgttgacccctgagctcacatgtggcacccttgtggtcccctgttgggctctccttgagctctagagcttgttgtggagttccctgagaatagaactccacttctgctgcccatgccat

SEQ ID NO: 9062 - DNA, 912 bp, Homo sapiens
  SIMILAR (284)..(135): 441254mologous to Homo sapiens gag,accession number AF156961,Smith-Waterman Score=82.
gttcttgtgtgctggagatgtggctggggtttgtctcacagtggaggcaaggaattgcaacttttttctgttatttcacaccttgaaggtgaggttaattaagtcctgttgtggggtatgagggccagattctaatttttggagttttatttaatgtcgggagcagattgggtaataaagtgtatattgagaataagatggccttcctgacccttcagggtcctagggctgtaaagagtcttaagggttgctgctaaatgggccatgaactgggctgggtttttcatatttgatgaaaaagagcctaaacgctaactgattttgggagaggttggataaagaaaaaggagcattaaccttgactatgcctttggctccagccacctttttaagagtaaattgctgagcaagttgggggagggctaagtcacggaacgaaactgtaagctggaccaggtgtgaggagggggaggtgacaaaaagattatagggtggaggagcagaggctgaggaagaattgtgacctagctcggcctggagaggagcagcctggggaggaagggagaggtcagatgggtctgtagaaaaggaagattagaaagactcagcgatgcttggggttggtactgaggggacaggcgggagggaaagaaggaagatttgggacgagttgcactgggcacagagactaggaagggactgatgtgtaaaagaatgcctggacgtcaggcacctcagaccatttgcctattttacaacaagaattatttagatcttgcaagatggaaaaattcaaagtgccattttctggttatttggaactactgtcgagtttgtattggggtcaagcggcatagcagaagaaaataaggcatttaggttttaggtcaggtgtgagttgaagaggtttta

SEQ ID NO: 9063 - DNA, 7071 bp, Homo sapiens
  SIMILAR (178)..(4740): 991254mologous to Rattus norvegicus dynein heavy chain,accession number L08505,Smith-Waterman Score=7821.
gtgagaataatgtttgaggtacaggacttgaaatacgcgaccttggccacagtgtcgcgctgcggcatggtctggttcagtgaggatgtgctgagcaccgacatgatcttcaacaacttcctggccaggctgcgcacatcccgctggatgaaggggaggatgaggcacagcggcggcatccaaagagatgcagctacgatcatgcaaccgtacttcacgtccaacggcctggtcaccaaggcgctagagcacgccttccagctggagcacatcatggacctaacacgcctgcgctgcctgggctcgctcttctccatgctgcaccaggcctgccgcaacgtggcgcagtataacgccaaccatcccgacttccccatgcagatcgagcagctggagcgctacattcagcgatatctggtttatgccatactctggtccctgtctggagacagccggctaaaaatgagagcagagctgggtgaatacatcagaagaatcacgaccgtgcctctgcccactgcgcccaacatacccattatcgattatgaggtgtccatcagcggagaatggtctccgtggcaggccaaggtgcctcagattgaagtggagacgcacaaggtggcagcccctgatgtcgtcgtgccaacgctggacacagtccgccacgaagccctcttgtacacttggctggccgaacacaagcccctggtcttgtgtggccctcctgggtctggcaagaccatgacactcttcagcgccctccgggccttgcctgacatggaggtggtgggtctcaacttctccagtgctactactccagagctgcttctgaagacttttgatcactactgcgagtacaggcgcacacctaatggggtggttttggctcctgttcaacttggaaagtggctggtgttgttctgtgatgaaatcaacttgccagatatggataaatatgggacccagagggtcatatccttcatcagacagatggtggagcacggaggcttttaccgtacctcagatcaaacatgggtgaagctggagagaatccagtttgttggggcttgtaatccccccacagaccctggaagaaagcccctctcacacaggttcctgcgccacgtgcctgtcgtgtatgtggattacccgggccccgcctccctcacacagatctacggcaccttcaaccgcgccatgctgaggctcattccatccctgcggacgtatgcagagccgctcactgctgccatggtggagttctacaccatgtctcaggagagattcacccaggatacacaacctcactatatctattcaccccgtgaaatgactaggtgggtgagaggcatctttgaagcgctgagacctctggagaccctgcctgttgaaggcctcattcggatttgggcacatgaagctctgcgtctcttccaagatagactcgtagaggatgaggagaggcgttggactgatgagaacatcgacacggttgctctgaagcacttccctaacatcgacagagagaaggcaatgagccgacccatcttgtacagcaactggctgtcaaaggattacatcccagtagaccaagaagagttaagagattatgtcaaagctaggctgaaggtcttttatgaagaagaacttgatgttccgctggtgctgtttaatgaagtcctagaccacgtgctgaggattgacagaatattccgtcaacctcaaggccacttgcttctgattggtgttagtggagcaggaaaaactaccctgtctcgtttcgtcgcctggatgaacggtttgagtgtgtaccagattaaggtccataggaagtacacaggggaagactttgatgaagatctacggacagtgttgagacgttctggctgtaaaaatgaaaagatagcatttataatggatgaatctaatgtgttagattctggattcctggagcgaatgaatacccttctggccaatggagaggtgcctggtctctttgaaggagacgagtatgccaccttgatgacgcagtgcaaagagggggcacagaaggaaggcctgatgctggactcgcacgaggagctctacaagtggttcactagccaggttatccgcaacctccacgtcgtgttcaccatgaacccgtcctcggagggactcaaggaccgggcagctacatcaccagcacttttcaacaggtgtgtgttgaattggtttggagactggtccaccgaagcactgtatcaggttggcaaagaattcacaagtaagatggatctggagaagccaaattacatcgtgcctgattacatgccagttgtgtatgataagctgccgcagccaccatcccatcgggaagccattgtgaacagctgtgtgtttgttcatcagactcttcaccaggcgaatgctcggctagcaaagcgaggcggcagaacgatggccatcacccctcgccactacctggacttcatcaatcactatgccaacctgttccacgagaagcggagcgagctggaggagcagcagatgcacttgaacgtggggctcaggaagatcaaagagacagtcgaccaggtagaagaactgcgtcgtgacttgaggataaagagccaagagctggaggtgaagaatgcagcagccaatgacaagctgaaaaagatggtgaaagaccagcaggaggctgaaaagaagaaggttatgagccaagaaatccaggaacagctgcataagcagcaggaggtaattgcagacaaacagatgagtgtcaaagaagatcttgataaggtggaacctgccgtcattgaggcccagaatgctgtgaagtcgatcaagaagcagcacctggtggaggtgaggtccatggccaaccctcctgctgctgtgaagctggcgctggagtccatctgcctgctgctgggggaaagcaccacagactggaagcagatccgctccatcatcatgcgggagaacttcatccccaccatcgtcaacttctctgcagaggagatcagtgacgccataagggagaagatgaagaaaaattacatgtccaatccaagttacaattatgaaattgtgaatcgggcttccctggcttgcggccctatggtgaaatgggcaattgcacagcttaactatgcagacatgttaaagagagtggagcccctacgcaatgagctgcagaagctggaagatgacgccaaggacaaccagcagaaggccaacgaggtggagcagatgatccgagacctggaagccagcatcgcccgctacaaggaggaatacgccgtcctgatctcagaggcccaggccatcaaggcagacctggcagctgtcgaggcaaaagtaaaccggagcactgctcttctgaagagcttgtctgctgaacgtgaacgatgggaaaaaacaagtgaaactttcaaaaaccagatgtccaccattgctggggactgtctcttgtcagctgcgttcattgcctacgcgggttactttgaccagcagatgcgtcagaacttgttcactacctggtcccatcacctacagcaagccaacatccagttccgtacagatattgccaggacggaatacctttccaatgctgatgagcgtcttcgctggcaggccagctccttgcctgctgatgacctttgcacagaaaatgccatcatgctgaaacgattcaataggtatccgctgatcattgacccctctggacaggccacagaattcattatgaatgaatataaggatcgtaagatcacacggaccagcttcctggatgacgccttcagaaagaacttagagagtgcactgagattcggtaacccccttctggtccaggatgtggaaagctacgatccagttttgaacccggtgctgaaccgtgaagtgcggcgaacaggggggagagtgctgatcactctcggggaccaggacatagacctgtcgccatcgtttgtcatcttcctgtccacccgggatccaactgtcgagttcccaccagatctctgttcccgggttacttttgtaaacttcacagttacccgtagcagtttacaaagccagtgtctaaatgaagtacttaaagcagaaagacctgatgtggacgagaaacgatctgatcttcttaaacttcaaggggaatttcagctccgtttgcgtcagctggaaaaatctctactacaagctctgaacgaggtgaaagggcgcattttggatgacgacacgatcataaccactctggagaacctgaagagagaggctgcagaggtcaccaggaaagttgaggagacggacattgtcatgcaggaggtggagaccgtgtcccagcagtacctcccgctctccaccgcctgcagcagcatctacttcaccatggagtccctcaagcagatacacttcttgtaccagtactccctccagtttttcctggacatttatcacaacgtcctatacgagaacccgaacctgaagggtgtcaccgaccacacacagcgcctgtccattataacaaaggacctcttccaggtggcgtttaaccgagtggctcgaggcatgctgcatcaggaccacattacctttgccatgctgctggcaagaatcaaactgaagggcaccgtgggggagcccacctacgatgcagaattccagcacttcttgagaggaaatgagattgtcctgagtgctggctccacccccaggatccagggcctgactgtggagcaggcggaggcggtgcaatttggcatctggctggacagcagctccccggagcagactgtgccctacctctggagtgaagaaacacctgcaacacccattggccaggccatccaccgcctgctcctgatccaggctttccggcccgatcgcctgttggccatggcccacatgtttgtttcaacaaaccttggggagtctttcatgtccatcatggagcagccgctcgacctgacccacattgtgggcacagaggtgaagcccaacactcctgtcttaatgtgctctgtgcctggttatgatgccagtggacatgtcgaggaccttgcagccgagcagaacacgcagatcacttcaattgcaatcggctctgcagaaggctttaaccaagcagataaggcaataaacaccgctgtaaagtcgggcaggtgggtgatgctgaagaatgtgcatctggccccagggtggctgatgcagctggagaagaagttgcattccctgcagccgcatgcctgcttccgactcttcctcaccatggagatcaaccccaaggtgcctgtgaatctgctccgtgcgggccgcatctttgtgttcgagccaccgccaggggtgaaggccaacatgctgaggacgttcagcagcattcccgtctcacggatatgcaagtctcccaacgagcgtgcccgcttgtacttcctgctggcctggtttcatgcgatcatccaagaacgcttacgatacgcaccactggggtggtcaaagaagtatgaatttggagagtctgacctgcggtcagcttgcgatacggtggacacgtggctggatgacacggccaaggcaagtggcaggcagaacatctcaccggataagatcccgtggtctgcactaaagaccttaatggcccagtccatttatggcgggcgcgtggacaacgagtttgaccagcgtctgctcaacaccttcctggagcgcctgttcacaaccaggagtttcgacagtgagtttaagctggcatgcaaggtcgacggacataaagacattcaaatgccagatggcatcaggcgagaggagtttgtgcagtgggtggagttgctccccgacacccagacgccctcctggctgggcctgcccaacaacgccgagagagtcctccttaccacacagggtgtggacatgatcagtaaaatgctgaagatgcagatgttggaggatgaggacgacctggcctacgcagagactgagaagaagacgaggacagactccacgtccgacgggcgccctgcctggatgcggacactgcacaccaccgcgtccaactggctgcacctcatcccccagacgctgagccacctcaagcgcaccgtggagaatatcaaggatcctttgttcaggttctttgagagagaagtgaagatgggcgcaaagctgcttcaggacgttcgccaggaccttgcagatgtcgtccaggtgtgcgaaggaaagaagaagcagaccaactacttgcgcacgctgatcaacgagctagtgaaagggatcttgcctcggagctggtcccactacacggtgcctgccggcatgaccgtcatccagtgggtgtccgacttcagcgagaggatcaaacagctgcagaacatctcactggcagctgcatctggtggcgccaaggagctaaagaacatccacgtgtgcctgggtggcctgttcgtgcctgaggcgtacatcactgccaccaggcagtatgtggcccaggccaacagctggtccctggaggagctctgcctggaagtcaacgtcaccacctcacagggcgccacccttgacgcttgcagcttcggagtcacgggtttgaaacttcaaggggccacgtgcaacaacaacaagctgtcactgtccaatgccatctcaaccgcccttcccctgacgcagctgcgctgggtcaagcagacaaacaccgagaagaaggccagtgtggtaaccttacctgtctacctgaacttcacccgtgcagacctcatcttcaccgtggacttcgaaattgctacaaaggaggatcctcgcagcttctacgagcggggtggtggccatgcccctcgagctctgcttggcacgtgtctgccagtctcagggggctccatgggagtgaggaagggctcggcggccctgggggtctggtcctcctccgccatcctcgagtcctcgggctacgtgccctcatctttggcttccagggacacgggcccagctggccacttctatgacaagaatggcctgaagggcgttctggggagcctccaccttcacaccgaaggccgccaaggtggttggcaagaagctgaaatgggcgtttaa

SEQ ID NO: 9064 - DNA, 505 bp, Homo sapiens
  SIMILAR (476)..(264): 971254mologous to Rattus norvegicus dynein heavy chain,accession number L08505,Smith-Waterman Score=367.
gctattaaaaagggaattaaactttgatttttataaaatttcaacaacaaaagaaagacacttacagcaaagttaacctaaagacagtggttcccagtcttcttgcatcacagacacccaatgcacctttcctagcccctcaacgaaggctctgcctcgcctaggagagagcgcacatccccacaggtgcagcatttcagaggtcctcagacctgtggtctggcgcagtggtgagctctgtgaagcccctgatgccccctgacctgaatgtagcgctccagctgctcgatctgcatggggaagtcgggatggttggcgttatactgcgccacgttgcggcaggcctggtgcagcatggagaagagcgagcccaggcagcgcaggcgtgctaggtccatgatgtgctccagctggaaggcgtgctctagcgccttggtgaccaggccgttggacgtgaagtacggttgcatgatcgtaggaattccgccactctggaatagtggtc

SEQ ID NO: 9065 - DNA, 497 bp, Homo sapiens
  SIMILAR (291)..(238): 501254mologous to Apis mellifera ligustica ATPase subunit 8,accession number L06178,Smith-Waterman Score=42.
  misc_feature (1)...(497): n = a,t,c or g
attcggcacagtgtgaatctgctccgtgcgggccgatctttgtgttcgagccaccgccagggttgaaggccaacacgcagagaacgtttgagtctgggatgaagcatgtacgtattatttatatgatggaatttcacgtttttatgtaagcatgaaacacaggcagtatgagagaaagcaaggcccgtcatgctgtccgtacactacgtatgctgtagagccattttgtatgttgtgtaaaacaaaaaggcattgatgaaaaagcaaaaggtgatgtatgtatatgaggaaaattaattgttacgatatcattccagtacgttttgttgttacatttttagtcttgtttactttctcttcattgtttaaggggggtggcgaactgttacagttttcccagctagtttacccctttttaggaggaggaattaggagagtttttagggagggaaacnggggagaggaaggaccatttgtggnatttgccngtttnttcc

SEQ ID NO: 9066 - DNA, 2343 bp, Homo sapiens
  SIMILAR (531)..(1604): 871254mologous to Rattus norvegicus dynein heavy chain,accession number L08505,Smith-Waterman Score=1572.
caatttggcatctggctggacagcagctccccggagcagactgtgccctacctctggagtgaagaaacacctgcaacacccattggccaggccatccaccgcctgctcctgatccaggctttccggcccgatcgcctgttggccatggcccacatgtttgtttcaacaaaccttggggagtcttgtcatgtccatcatggagcagccgctcgacctgacccacattgtgggcacagaggtgaagcccaacactcctgtcttaatgtgctctgtgcctggttatgatgccagtggacatgtcgaggaccttgcagccgagcagaacacgcagatcacttcaattgcaatcggctctgcagaaggctttaaccaagcagataaggcaataaacaccgctgtaaagtcgggcaggtgggtgatgctgaagaatgtgcatctggccccagggtggctgatgcagctggagaagaagttgcattccctgcagccgcatgcctgcttccgactcttcctcaccatggagatcaaccccaagggtgcctgtgaaatctgctccgtgcgggccgcatctttgtgttcgagcccaccgccaggcggtgaaggccaacatgctgaggacgttcagcagcattcccgtctcacggatatgcaagtctcccaacgagcgtgcccgcttgtacttcctgctggcctggtttcatgcgatcatccaagaacgcttacgatacgcaccactggggtggtcaaagaagtatgaatttggagagtctgacctgcggtcagcttgcgatacggtggacacgtggctggatgacacggccaaggcaagtggcaggcagaacatctcaccggataagatcccgtggtctgcactaaagaccttaatggcccagtccatttatggcgggcgcgtggacaacgagtttgaccagcgtctgctcaacaccttcctggagcgcctgttcacaaccaggagtttcgacagtgagtttaagctggcatgcaaggtcgacggacataaagacattcaaatgccagatggcatcaggcgagaggagtttgtgcagtgggtggagttgctccccgacacccagacgccctcctggctgggcctgcccaacaacgccgagagagtcctccttaccacacagggtgtggacatgatcagtaaaatgctgaagatgcagatgttggaggatgaggacgacctggcctacgcagagaccgagaagaagacgaggacagactccacgtccgacgggcgccctgcctggatgcggacactgcacaccaccgcgtccaactggctgcacctcatcccccagacgctgagccacctcaagcgcaccgtggagaatatcaaggatcctttgttcaggttctttgagagagaagtgaagatgggcgcaaagctgcttcaggacgttcgccaggaccttgcagatgtcgtccaggtgtgcgaaggaaagaagaagcagaccaactacttgcgcacgttgattcaacgagctagtgaaagggatcttgccttcggagctggtcccactacacggtgcctgccggcattgaccgtcatccagtggggtgttccgatttcagcgaggaggattcaaacagctgcagaacatctcactggcagctgcatctggtggcgccaaggagctaaagaacatccacgtgtgcctgggtggcctgttcgtgcctgaggcgtacatcactgccaccaggcagtatgtggcccaggccaacagctggtccctggaggagctctgcctggaagtcaacgtcaccacctcacagggcgccacccttgacgcttgcagcttcggagtcacgggtttgaaacttcaaggggccacgtgcaacaacaacaagctgtcactgtccaatgccatctcaaccgccctttccctgacgcagctgcgctgggtcaagcagacaaacaccgagaagaaggccagtgtggtaaccttacctgtctacctgaacttcacccgtgcagacctcatcttcaccgtggacttcgaaattgctacaaaggaggatcctcgcagcttctacgagcggggtggtggccatgcccctcgagctctgcttggcacgtgtctgccagtctcagggggctccatgggagtgaggaagggctcggcggccctgggggtctggtcctcctccgccatcctcgagtcctcgggctacgtgccctcatctttggcttccagggacacgggcccagctggccacttctatgacaagaatggcctgaagggcgttctggggagcctccaccttcacaccgaaggccgccaaggtggttggcaagaagctgaaatgggcgtttaa

SEQ ID NO: 9067 - DNA, 6601 bp, Homo sapiens
  SIMILAR (3)..(2351): 981254mologous to Rattus norvegicus cytoplasmic dynein heavy chain,accession number D13896,Smith-Waterman Score=4040.
  misc_feature (1)...(6601): n = a,t,c or g
cgcacaaggtggcagcccctgatgtcgtcgtgccaacgctggacacagtccgccacgaagccctcttgtacacttggctggccgaacacaagcccctggtcttgtgtggccctcctgggtctggcaagaccatgacactcttcagcgccctccgggccttgcctgacatggaggtggtgggtctcaacttctccagtgctactactccagagctgcttctgaagacttttgatcactactgcgagtacaggcgcacacctaatggggtggttttggctcctgttcaacttggaaagtggctggtgttgttctgtgatgaaatcaacttgccagatatggataaatatgggacccagagggtcatatccttcatcagacagatggtggagcacggaggcttttaccgtacctcagatcaaacatgggtgaagctggagagaatccagtttgttggggcttgtaatccccccacagaccctggaagaaagcccctctcacacaggttcctgcgccacgtgcctgtcgtgtatgtggattacccgggccccgcctccctcacacagatctacggcaccttcaaccgcgccatgctgaggctcattccatccctgcggacgtatgcagagccgctcactgctgccatggtggagttctacaccatgtctcaggagagattcacccaggatacacaacctcactatatctattcaccccgtgaaatgactaggtgggtgagaggcatctttgaagcgctgagacctctggagaccctgcctgttgaaggcctcattcggatttgggcacatgaagctctgcgtctcttccaagatagactcgtagaggatgaggagaggcgttggactgatgagaacatcgacacggttgctctgaagcacttccctaacatcgacagagagaaggcaatgagccgacccatcttgtacagcaactggctgtcaaaggattacatcccagtagaccaagaagagttaagagattatgtcaaagctaggctgaaggtcttttatgaagaagaacttgatgttccgctggtgctgtttaatgaagtcctagaccacgtgctgaggattgacagaatattccgtcaacctcaaggccacttgcttctgattggtgttagtggagcaggaaaaactaccctgtctcgtttcgtcgcctggatgaacggtttgagtgtgtaccagattaaggtccataggaagtacacaggggaagactttgatgaagatctacggacagtgttgagacgttctggctgtaaaaatgaaaagatagcatttataatggatgaatctaatgtgttagattctggattcctggagcgaatgaatacccttctggccaatggagaggtgcctggtctctttgaaggagacgagtatgccaccttgatgacgcagtgcaaagagggggcacagaaggaaggcctgatgctggactcgcacgaggagctctacaagtggttcactagccaggttatccgcaacctccacgtcgtgttcaccatgaacccgtcctcggagggactcaaggaccgggcagctacatcaccagcacttttcaacaggtgtgtgttgaattggtttggagactggtccaccgaagcactgtatcaggttggcaaagaattcacaagtaagatggatctggagaagccaaattacatcgtgcctgattacatgccagttgtgtatgataagctgccgcagccaccatcccatcgggaagccattgtgaacagctgtgtgtttgttcatcagactcttcaccaggcgaatgctcggctagcaaagcgaggcggcagaacgatggccatcacccctcgccactacctggacttcatcaatcactatgccaacctgttccacgagaagcggagcgagctggaggagcagcagatgcacttgaacgtggggctcaggaagatcaaagagacagtcgaccaggtagaagaactgcgtcgtgacttgaggataaagagccttgagcttttggggaagaacgcagcagccaatgacaagctgaaaaagatggtgaaagaccagcaggaggctgaaaagaagaaggttatgagccaagaaatccaggaacagctgcataagcagcaggaggtaattgcagacaaacagatgagtggcaaagaagatcttgataaggtggaacctgccgtcattgaggcccagaatgctgtgaagtcgatcaagaagcagcacctggtggaggtgaggtccatggccaaccctcctgctgctgtgaagctggcgctggagtccatctgcctgctgctgggggaaagcaccacagactggaagcagatccgcttcatcattcatgcgggagaacttcatccccaccatcgtcaacttctctgcagaggagatcagtgacgccataagggagaagatgaagaaaaattacatgtccaatccaagttacaattatgaaattgtgaatcgggcttccctggcttgcggccctatggtgaaatgggcaattgcacagcttaactatgcagacatgttaaagagagtggagcccctacgcaatgagctgcagaagctggaagatgacgccaaggacaaccagcagaaggccaacgaggtgggagcagatgatctcgagacctgtaagccaggattggcctgctacaaggaggaatacgccgtccttatctcagaggcccaagccatcaaggcagaccttgcagctttcgaggcaaaagtaaaccggagcactgctcttctgaagagcttgtctgctgaacgtgaacgatgggaaaaaacaagtgaaactttcaaaaaccagatgtccaccattgctggggactgtctcttgtcagctgcgttcatttgcctaccccgggttactttgaccagcagatgccgtcagaacttgttcactacctggtcccatcacctacagcaagccaacatccagttccgtacagatattgccaggacggaatacctttccaatgctgatgagcgtcttcgctggcaggccagctccttgcctgctgactgacctttgcacagaaaatgccatcatgctgaaacgattcaataggtatctcgctgatcattgacccctctggacaggccacagaattcattatgaatgaatataaggttcgtaagatcacacggaccagcttcctggatgacgccttcagaaagaacttagagagtgcactgagattcggtaaccccccttcgtggtccaggatgtggaaagctacgatccagttttgaacccggtgctgaaccgtgaagtgcggcgaacaggggggagagtgctgatcactctcggggaccaggacatagacctgtcgccatccgtttgtcatcttcctgtccaccccgggatccaactgtcgagttcccaccagatctctgttcccgggttactttttgtaaactttcacagttacccgtagcagtttacaaaagccagtgtcttaaattaaagtacttaaagcaagaaaggacctgatgtggacgagaaacgatctgatcttcttaaacttcaaggggaatttcagctccgtttgcgtcagctggaaaaatctctactacaagctctgaacgaggtgaaagggcgcattttggatgacgacacgatcataaccactctggagaacctgaagagagaggctgcagaggtcaccaggaaagttgaggagacggacattgtcatgcaggaggtggagaccgtgtcccagcagtacctcccgctctccaccgcctgcagcagcatctacttcaccatggagtccctcaagcagatacacttcttgtacacagtactccctccagtttttcctggacatttatcacaacgtcctatacgagaacccgaacctgaagggtgtcaccgaccacacacagcgcctgtccattataacaaaggacctcttccaggtggcgtttaaccgagtggctcgaggcatgctgcatcaggaccacattacctttgccatgctgctggcaagaatcaaactgaagggcaccgtgggggagcccacctacgatgcagaattccagcacttcttgagaggaaatgagattgtcctgagtgctggctccacccccaggatccagggcctgactgtggagcaggcggaggcggtggtgaggctgagctgccttcccgcgtttaaggacttgattgcaaaggttcaggcagacgagcaatttggcatctggctggacagcagctccccggagcagactgtgccctacctctggagtgaagaaacacctgcaacacccattggccaggccatccaccgcctgctcctgatccaggctttccggcccgatcgcctgttggccatggcccacatgtttgtttcaacaaaccttggggagtctttcatgtccatcatggagcagccgctcgacctgacccaaattgtgggcacagaggtgaagcccaacactcctgtcttaatgtgctctgtgcctggttatgatgccagtggacatgtcgaggaccttgcagccgagcagaacacgcagatcacttcaattgcaatcggctctgcagaaggctttaaccaagcagataaggcaataaacaccgctgtaaagtcgggcaggtgggtgatgctgaagaatgtgcatctggccccagggtggctgatgcagctggagaagaagttgcattccctgcagccgcatgcctgcttccgactcttcctcaccatggagatcaaccccaaggtgcctgtgaatctgctccggtgcgggccggcatcttttgtgttcgagccaccgccaggggtgaaggccaacatgctgaggacgttcagcagcattcccgtctcacggatatgcaagtctcccaacgagcgtgcccgcttgtacttcctgctggcctggtttcatgcgatcatccaagaacgcttacgatacgcaccactggggtggtcaaagaagtatgaatttggagagtctgacctgcggtcaactttgcgattacggtgggacacgtggcttggatgacangggccaagggcagggcagaacatctcaccggattaagatccccgtggtctgcacttaaaagaccttaatggcccagtccatttatggcgggcgcgtggacaacgagtttgaccagcgtctgctcaaaaacctttcctggaagcgcctgttcaaaaccaaggagtttccgacagtgagtttaagcttggcatgcaaggtcgacggacataaagacattcaaatgccagatggcatcaggcgagaggagtttgtgcagtgggtggagttgctccccgacacccagacgccctcctggctgggcctgcccaacaacgccgagagagtcctccttaccacacagggtgtggacatgatcagtaaaatgctgaagatgcagatgttggaggatgaggacgacctggcctacgcagagaccgagaagaagacgaggacagactccacgtccgacgggcgccctgcctggatgcggacactgcacaccaccgcgtccaactggctgcacctcatcccccagacgctgagccacctcaagcgcaccgtggagaatatcaaggatcctttgttcaggttctttgagagagaagtgaagatgggcgcaaagctgcttcaggacgttcgccaggaccttgcagatgtcgtccaggtgtgcgaaggaaagaagaagcagaccaactacttgcgcacgctgatcaacgagctagtgaaagggatcttgcctcggagctggtcccactacacggtccctgccggcatgaccgtcatccagtgggtgtccgacttcagcgagaggatcaaacagctgcagaacatctcactggcagctgcatctggtggcgccaaggagctaaagaacatcacgcgtgtgcctgggtgggcctgttcgtgcctgaggcgtaacatcactgccaccaggcaagtatgtgggcccaggccaaacagactggtccctgggaggagctctgcctgggaagtcaacgtcaccaccttcacaggggcgccacccttgacgtcttgcagctttcgggagtcacgggtttgaaacttcaagggggccacgtgcaaccaacaaacaagctgtcactgtcccaatcccatcttcaaaccgccccttccacctgaacgcagctgcgctggggtcaagccagacaaaacaccgagaaagaaggcccagtgtggttaaccttaacctgtctacctggaacttcaacccgtgccagacctcaatcttcaccgtgggactttcgaaattgcttacaaaaggaggatcctcgcagcttctacgagcggggtgtcgcagtctttgttgacagaggtgaactttttctagccgccccctttctgtaatagtgaaagttcggtatttaacatttatttcatttttaaaatatttggaaggtctgagcttgtgaaaagaaagtgcgtggtctgacgttggaggaagctgaatggaatctgcacggttgggagtggtggaaattggaaggataccaggaggtatttgggaaggccaatggcggtggctccctttgaggaaaataaaaccctaagcatgaaaaaaaaaaaaaaaaagg

SEQ ID NO: 9068 - DNA, 1453 bp, Homo sapiens
  SIMILAR (34)..(183): 361254mologous to Bos taurus N-WASP,accession number D67066,Smith-Waterman Score=71.
tcagctggttccaaccaccttcaggtcccccatggcctggagcagccgccacctcccccgctggcacgcgtcaatcctggcgtccgcatcactcaccacctccctgatggatgttgagccctgagcccaagtggaactgcccagccatccccgggtccccagcccagcaccaggcccggccccatgagtgcttgagccaccaaggagcctccttacttctgtagtgggtccacagggcccctcctgggctggtgggggaatggctgtcaggcaggcacttgaggaagcagcttgcagggacccgtgcattgctatctcctcctgggctggaggggacaggccattatggtggctggatggtctccttctgaggcgggtgtatcctgactcatgccctccgtgcccttctcgtattcctgcaatttttggagcatccctacagggtagtattaaccccattttgcagatgaggaaacttttcccccatgacatggacttattgtagggccaggacccattttcctgtagaaggcccgagtcctggaaccgtgacgtgggctggctggcgctgggtgttttctgtcttgttcctttctcccttgtggggtctttgaactgaactgtgatctggaagctcagcgggaacacccggttcctccacgggaccacagccttagtgccgtggggggggcgtgaggactgggtctctccaatgtgaaggttcatttcctccctctgtaattagtaagtagtctgtaggggtgatcattccacacgctcgaaataaactgcccggcacaactgttcacctaatggttttagcgtccatcaatgatctttgcatgagttggtgatatcgggattgtcaaggtggccgtaaacccgacaatctttctgtaagtattagccagtgttctgttaagagcagcatcttcccactcttatctttagtgtcgcccttgtgtcatggattttgttgttcaaatgttataaccagtgacaaaactagcagacatgtaattacatttctgggtcataaagcaggaggacctcttgcagtgcacatgtgccggatacatgctttgcgtgcccgctatacgaagagctcctgcagattaagaaaacgatttgaaaaacccaagagaaaaacaggccaaaagaaaagaaagacaggcaaagagtaggatcaagacaaatgaaagaagaggaaatgctttgtgttgctgatgaacatgaaaaggcgcaacctcactagtaatcaggggcgtgcccatcagaagcgccagggactggttccccggatggaagagcagactgctggcgcacagggtgcaccgacatccccacccacggctggtggagagcaggagaagggattgctacgaccaacctggaaaagtaacggcgttatccattcacatgaagcattcacatgccttcggaagaacacact

SEQ ID NO: 9069 - DNA, 705 bp, Homo sapiens
  SIMILAR (142)..(603): 961254mologous to Homo sapiens potassium channel homolog; KvEBN2,accession number AF033347,Smith-Waterman Score=762.
atggccatgggattgttcttcattccctttctcaactgcacccagcagcagtggtttttgctaggccttttgaagacagcaggaatctgggagaaggaacatcatcgtctttcacagcatggaaacatcaatcttattccagagaagggaagaagtccccaaagccaaaagctgggtctcttggatcgggttcgcctttctaatcctcgtggtagcaatactaaaggaaagctatttacccctctgaatgtagatgccatagaagaaagtccttctaaagaaccaaagcctgttggcttaaacaataaagagcgtttccgcacggccttccgcatgaaagcctacgctttctggcagagttctgaagatgccgggacaggtgaccccatggcggaagacaggggctatgggaatgacttccccatcgaagacatgatccccaccctgaaggccgccatccgagccgtcagaattctacaattccgtctctataaaaaaaaattcaaggagactttgaggccttacgatgtgaaggatgtgattgagcagtattctgccgggcatctcgacatgctttccaggataaagtaccttcagacgagacatcaagaagctgtgcagtgcggccagcaggaccgcgaagataagaagctacttgcggacctgctgcacttgaggtccaagtggaaatctccatccggctga

SEQ ID NO: 9070 - DNA, 1320 bp, Homo sapiens
  SIMILAR (13)..(864): 991254mologous to Homo sapiens potassium channel,accession number AF071491,Smith-Waterman Score=1479.
atgactcaaaggttcctgattgtcctggggtgcttgattctggctgtcctgaccacattcaaggagtatgagactgtctcgggagactggcttctgttactggagacatttgctattttcatctttggagccgagtttgctttgaggatctgggctgctggatgttgctgccgatacaaaggctggcggggccgactgaagtttgccaggaagcccctgtgcatgttggacatctttgtgctgattgcctctgtgccagtggttgctgtgggaaaccaaggcaatgttctggccacctccctgcgaagcctgcgcttcctgcagatcctgcgcatgctgcggatggaccggagaggtggcacctggaagcttctgggctcagccatctgtgcccacagcaaagaactcatcacggcctggtacatcggtttcctgacactcatcctttcttcatttcttgtctacctggttgagaaagacgtcccagaggtggatgcacaaggagaggagatgaaagaggagtttgagacctatgcagatgccctgtggtggggcctgatcacactggccaccattggctatggagacaagacacccaaaacgtgggaaggccgtctgattgccgccaccttttccttaattggcgtctccttttttgcccttccagcgggcatcctggggtccgggctggccctcaaggtgcaggagcaacaccgtcagaagcactttgagaaaaggaggaagccagctgctgagctcattcaggctgcctggaggtattatgctaccaaccccaacaggattgacctggtggcgacatggagattttatgaatcagtcgtctcttttcctttcttcaggcaagtggggactcacctgaatgctcagggcgtgaccagccatctctcctgcgaggaatctaactttgatcctgaaggcaatgagaagctagatgagccagagaatgacatcagtagatctacttttcaggaagatgatagcaaagagtgtggaggatggatctatggactcaagtcaaagcaagaagatcagctagcaaatattgcagggttcagagtaagaggaaatgagggcctagaccaaggaaagaacagctggaggcagcatccagatttcagtgcctacatctgtgaaatgaaggaattaaagcagatggtccccaaggcctgtcagggctattatcatgggttcagactttcagccaataaccctgaattagctccacgtttaagtttcatgtggtcacaccagttatacgagttcaatatgaatgcagagaaggaaccaaatggcaattag

SEQ ID NO: 9071 - DNA, 2911 bp, Homo sapiens
  SIMILAR (722)..(1927): 871254mologous to Homo sapiens potassium channel,accession number AF071491,Smith-Waterman Score=1752.
atggggctcaaggcgcgcagggcggcgggggcggctggcggcggcggcgacgggggcggcggaggcggcggggcggctaacccagccggaggggacgcggcggcggccggcgacgaggagcggaaagtggggctggcgcccggcgacgtggagcaagtcaccttggcgctcggggccggagccgacaaagacgggaccctgctgctggagggcggcggccgcgacgaggggcagcggaggaccccgcagggcatcgggctcctggccaagaccccgctgagccgcccagtcaagagaaacaacgccaagtaccggcgcatccaaactttgatctacgacgccctggagagaccgcggggctgggcgctgctttaccacagcgttggtgttcctgattgtcctaggggtgcttgattctggctgtcctggaccacattcaaggagtatgagactgtctcgggagactggcttctgttactggagacatttgctattttcatctttggagccgagtttgctttgaggatctgggctgctggatgttgctgccgatacaaaggctggcggggccgactgaagtttgccaggaagcccctgtgcatgttggacatctttgtgctgattgcctctgtgccagtggttgctgtgggaaaccaaggcaatgttctggccacctccctgcgaagcctgcgcttcctgcagatcctgcgcatgctgcgggatggaccgggagaaggtggcacctggaagcttctggggctcagccatctgtgcccacagcaaagaactcatcacggcctggtacatcggtttcctgacactcatcctttcttcatttcttgtctacctggttgagaaagacgtcccagaggtggatgcacaaggagaggagatgaaagaggagtttgagacctatgcagatgccctgtggtggggcctgatcacactggccaccattggctatggagacaagacacccaaaacgtgggaaggccgtctgattgccgccaccttttccttaattggcgtctccttttttgcccttccagcgggcatcctggggtccgggctggccctcaaggtgcaggagcaacaccgtcagaagcactttgagaaaaggaggaagccagctgctgagctcattcaggctgcctggaggtattatgctaccaaccccaacaggattgacctggtggcgacatggagattttatgaatcagtcgtctcttttcctttcttcaggaaagaacagctggaggcagcatccagccaaaagctgggtctcttggatcgggttcgcctttctaatcctcgtggtagcaatactaaaggaaagctatttacccctctgaatgtagatgccatagaagaaagtccttctaaagaaccaaagcctgttggcttaaacaataaagagcgtttccgcacggccttccgcatgaaagcctacgctttctggcagagttctgaagatgccgggacaggtgaccccatggcggaagacaggggctatgggaatgacttccccatcgaagacatgatccccaccctgaaggccgccatccgagccgtcagaattctacaattccgtctctataaaaaaaaattcaaggagactttgaggccttacgatgtgaaggatgtgattgagcagtattctgccgggcatctcgacatgctttccaggataaagtaccttcagacgagaatagatatgattttcacccctgggacctccctccacgccaaaacacaaggaagtcttcagaaagggtcagcatttcaccttcccatcccagcaatcttcccggggattgaaccatatgtaggccagaccatccacattcagaaattcgaagaccaaaggcattgatgggggaagtttgttaaaagtttgaaaggacaggtttcagggactggggaggaagctggacttcctcgtggatatgcacatgcaacacatggaacggttgcaggtgcaggtcacggagtattacccaaccaagggcacctcctcgccagctgaagcagagaagaaggaggacaacaggtattccgatttgaaaaccatcatctgcaactattctgagacaggccccccggaaccaccctacagcttccaccaggtgaccattgacaaagtcagcccctatgggttttttgcacatgaccctgtgaacctgccccgagggggacccagttctggaaaggttcaggcaactcctccttcctcagcaacaacgtatgtggagaggcccacggtcctgcctatcttgactcttctcgactcccgagtgagctgccactcccaggctgacctgcagggcccctactcggaccgaatctccccccggcagagacgtagcatcacgcgagacagtgacacacctctgtccctgatgtcggtcaaccacgaggagctggagaggtctccaagtggcttcagcatctcccaggacagagatgattatgtgttcggccccaatggggggtcgagctggatgagggagaagcggtacctcgccgagggtgagacggacacagacacggaccccttcacgcccagcggctccatgccctctgtcgtccacaggggatgggatttctgattcagtatggaccccttccaataagcccatttaaaagaggtcactggctgacccctccttgtaatgtagacagactttgtatagttcacttactcttacacccgacgcttaccagcggggacaccaatggctgcatcaaatgcatgcgtgtgcgtggtggccccacccaggcaggggcttcccacagcctcttcctccccatgtcaccacaacaaagtgcttccttttcagcatggtttgcatgactttacactatataaatggttcccgctaatctcttctaggataaaaaaaaaaaaaaa

SEQ ID NO: 9072 - DNA, 477 bp, Homo sapiens
cattactcaactgctacacaactgcgcctagtgcacaaaaatacataagagaagagattagaattgtgtttgataaacaatcctttcaaaaaatcaagtcttttcacctgaaaagtctttatacaaatttgggttcagattaccatttagatctgaaggtaaataacatatacaaatttacaccaacttttgtaggtttttaattttaaggaatgaaggcaatgccgagtcaatctcttgacagctttaggctgtgtgtaatggctgcacacgttttccttaaaagtcaggaggccacaaattaggttaccaatctgtttaatttcaaacaaaaaaagtcagcactatataacaaaatgaaattttacctcaaatatccaaatccaataatgaaatctgaagtcgttcacctcactaaattacaagaaatttgaataacagcaacaaaatggcacataaaatgaagtttgccaactg

SEQ ID NO: 9073 - DNA, 1049 bp, Homo sapiens
  SIMILAR (446)..(231): 371254mologous to Homo sapiens Human secreted protein, SEQ ID NO: 7134,accession number G03053,Smith-Waterman Score=89.
  misc_feature (1)...(1049): n = a,t,c or g
ccggnccaggangggccagccaccggccgggaaaccaaacccnccagcccccacaaaaccatttaaagaaaaagcccngccgaaacaaccagatataaaaggagactgacatgaaccacaagtcacctgaaaaaacacaagaagacaaggcccccaaaaaagataaataatggccttaacaaagacatactggtttatgtttaacaactatgtttttattttccaaaagggtaaaggaaaggccttccatgttgcctatttgaaaagtacttcctcaactagccggggcatggtggccataaatccctgaaagtaggaggatcatcccccttgaaggcccaggaggtcccaggctgcagtgagctgtgaattgtgccactgcaccatagcttgggtgacagagtgagaccctgtctttaaaacaaaaagaaagtacttctctgcaagtaaattttatggatataatctttattctgattaaataaatgattaccctaatcagctattatttattattttctatttaacattcatgcctgaagtgccagagacctgcctatgtcgcataaagttaggtcagatatatgcacatgcagtgttggtgaagatcatctgaataatgatcactctcacatgccatattagttatattatagtatcactgctcattgtgcttcctctctttaataaagtataaatcaagcaattaaaagctgtgtaggcccttcccgttggctaaggttttcaaaattttttaacgtataaagagttgctgattttaacatcatattttggtcacgtttaagatgttctacagatatttttgcttcaaagcttcaaactccagctatgcctgggtctcattctatccccagaaattgacaatgcttccctacccttagggctgccccgtccccgtcccactcggtcccatttaataaatatacctcacctcccttcgccacctgctggacgcgaggggctactacgatgccatgggtgtcctgattttttatttctcagacagaactgctctgtgtgtgtctttg

SEQ ID NO: 9074 - DNA, 3228 bp, Homo sapiens
  SIMILAR (442)..(825): 401254mologous to Gallus gallus PR 264,accession number X62446,Smith-Waterman Score=136.
  misc_feature (1)...(3228): n = a,t,c or g
atgagctgcggccgcccccctcccgacgtggacggcatgatcaccctcaaggtggaacaacctgacctaccgcacctctcccgacagcttgaggcgcgtgttcgagaagtacgggcgcgtgggcgacgtgtacatcccgcgggagccccacaccaaggcgccccggggcttcgctttcgtccgctttcacgaccggcgcgacgcccaagacgcagaggccgtccatggacggtgcggagtgagaaggacgcgcgctgcgggtngcaggtggcgcgctatggccgccgggacctgccccgcagccgccagggacgacgccacgcggcaggtccagaggcggcggctacggacggcggagccgcagctacgggcggcggagccgcagccccaggcggcgaacaccgcaaccgtttcttttgtcccagctgctccaggtcccgcaggcgaggtcgctatagggggtctcgctatagccgttctccctacagccgatctccttacagccggtcgcgctacagccgctctccctacagcagatctcgctacagggaatctcgctacggcggatctcactacagctcatctggttacagtaactctcgctacagccgatatcacagcagccggtctcactcgaagcctgggtcctccactagctctcgctctgcatcaacctccaaatcgagctctgcgcgacgatccaagtccttctcggtctcccaggtctcgctcgcgggtccaggtcttcatctatgaccaggagtcctccccggggtatccaagaggaaatccaagtcaaggatcgcgatccaagaggccccccaagtctcctgaagaggaaggacagatgtcctcttaagaaaatgatgcatcactgaagcaacgtgatggaggacttgacggaaaaggatcacatactcagtctatggaagcaacgtccctggaagaagaggctgcctattgagacggttgtgtcacactgttgtaccttattgccagtttgaagctttgcatcacgtgggcaaaattcattctatgtgccgagtttgttggtattcacattttattgtaacttaggaggtgaaccgacctaagattacgttattgggtttggatatttgaggcaaaaatttatttttatttctatagtgatgactgttttggtttgaaatgaacagattggtaacctaatttgtggcctcctgacttttaaggaaacgtgtgcagccattacacacagcctaacgctgtcaagacattgcttcaacattgccttcattccttaaaaacctacaaaagggggggtaaattaatatggataattttatttacctccaggtctaaaaggtagggggacccaaatttgtataaagatttttcatgtgaaaggactggggttttagcaaaccacaggtctaatctcttttgtgttttttgtgcaccaggcccggctgtgtgagcacttgagggatgctggttagctattaaggaggccctgttgccagtgccaaagtgcctgaagctgcttcccgtttccctcctgattgcccccccggggaaaacacgcccttgtccctgaaggaacaaatggctgtcccagtttattaaaatgccctgtcaacctgcacttcccagtcacccccggccttgccagataaataatggagcatgcagtgagcacatcctagctgacggataatcacaccttttccccccgtcttttcctgaaaaaattgaaaatctgattcatattcaacatgtatggaacttaaaatatgggggaatgtttatggggaaggaaatagtttataagtttgtgaaggtacttataacatcggtttatctttttgattattaatgttttacgctaacccattgtgtctgtagttaaaaattgttttcttggtgttatcttttctcagaataaaaattagaaacttttggatgggaaagtagggttggttttattttcccgtatgacttttggatatttgtacttttgaggaaaattattagcaccaagtgtttctcaaaatataatttttaaaaaaatccttaataggcttttagctatgtgctttattgttttatcacaatgcagtttatttgtagtttctctctttttttcctcacacctatggtttttttacttccaaaattattttcaaataatccgatttttggctttcgatcgattatcgctactagatgttatgtgttcttttgcaattgtttctgcttatacctttactagcaaagggaaaaataacaatttggtgtcaatgatctggtgacaataggattacattggagccaattgaataaatttattctttcaatcatatggatcttcattaaaatttttgactggaattatcaattaaaaatatttcattccctttgtgcagaaactgctaaatccagggttcgattcttgaatgaactggcaagctggctgtggtctgtagatatacatcccacatttttgttgttataacagtttagtagttagtattgcttttcatattattaggactccagaatctaaattttacgataatgacatttcttctggtcatgacaaatgtaatattttacaaatataaatctacgtagaatccaaagacacacacggagcagtcctgtctgagaaataaaaaatcaggacacccatggcatcgtagtagcccctcgcgtccagcaggtgggcgaagggaggtgaggtttatttattaaatgggaccgagtgggacggggacggggcagccctaagggtagggaagcattgtcaatttctggggatagaatgagacccaggcatagctggagtttgaagctttgaagcaaaaatatctgtagaacatcttaaacgtgaccaaaatatgatgttaaaatcagcaactctttatacgttaaaaactttgaaacctgtggccgggcatggtggctcgcgcctgtaatcccagcactttgggaggccaaggcaggtggatcacctgaggtcaggagctcaagaccagcctggtcaacggtggggaaaccccgtctctaccaaaaatacaaaaattagctgggcatggtggcgcatgctactaatcccagctacttggcaggctgaggcaggagaatcgcttgaacctgggaggcagtggttgcagtgagccgagatatcgcaccattgcacttccagccggggcaacaagagcaaaacttcatctcaaaaaaaaa

SEQ ID NO: 9075 - DNA, 500 bp, Homo sapiens
  SIMILAR (500)..(261): 811254mologous to Homo sapiens Human FADD-interacting protein (FIP),accession number W96153,Smith-Waterman Score=323.
  misc_feature (1)...(500): n = a,t,c or g
tttttttttttcttgtgaaatagatttaatgaagtcgagatacattccgggctaactactctcggttacacttaatcagaactgaataaacaaatgcagtattagtcacacttgtgcaagttattccatttcactgaagccagaagagattttcatgtgatcctgtttaaaccagctaaacatctggaaatgtggaaactattccgtaaagcgcaagaggaccacacgctcggaagagacatcagttatgtggctgaggtcaggcccggggaggctggagggagagcgcatactggagatagcttacttacaatgaacccaagcttcttataatctcgcgtgtacatggacttgcgtttctccatgctgccactgctgttgttaggttcagactcagcatcaaaagcaattcttcgaagttcaaatatgatgtccctctgagcctggtcctgggggtccattttggtcatcatcctgtcttccaggaggttanaggtgag

SEQ ID NO: 9076 - DNA, 1717 bp, Homo sapiens
  SIMILAR (1672)..(1713): 921254mologous to Homo sapiens putative p150,accession number U93563,Smith-Waterman Score=75.
atgcccgagcctcccccaacccttgctgtgggctcctgtgcagcccgagcctccctgacgatcaccgtcccctgctctggggcacccagtcccatcgaccgcccaagggctgaggagtgccggcgcactgcgtgggactggaagaatgaacaagcccagacaggaggatctagtaactccagacatgtggccttaagagctgtaacactcactgcgaaggtctgcaatttcactcttgaagccagtgagaccacgaacccaccagaaggaagaaactctgaacacgtccgaacatcagaaggaacaaactccggacacaccacctttaagacactgtaacactcaccccaggcattctcaggccacagtcattgctgagtcatgtggagacacaggcgctctgcactctggtcgggaaggcctctggggacagtgggtcttcccacgtccctgtgctgcactaccccatccagcagcacatatggttcctgcagccagaggcctgcaaccagtgttggaagttctggccagggcaattaggcaggagaaggaaataaagggtattcaattaggaaaagaggaagtcaaattgttcctgtttgcagatgacatgattgtatatctagaaaaccccattgtctcagcccaaaatatccttaagctgataagcaacttcagtgaagtctcaggatacaaaatcaatgtacaaaaatcacaaacattcttgtacaccaataacagacaaacagagagccaaatcatgagtgaactcccattcacaattgcttcaaagagaataaaatacctagaaatccaacttacaagggacgtgaaggacctcttcaaggagaactataaaccactgctcaatgaaataaaagaggatacaaagaaatggaagaacattccatgctcatggataggaagaatcaatatcgtgaaaatggccatactgctcaaggtaatttatagattcaacgccatccccatcaagctaccaatgactttcttcacagaagtggaaaaaactattttaaagttcatatggaaccaaaaaagagcccacatcaccaagtcaatcctaagccaaaagaacaaagctggaggcatcacactacctgacttcaaactatactacaaggccacagtaaccaaaacagcatggtactggtaccaaaacagagatatagatcaatggaacagaacagagcccttagaaataacgtcacatatctacaactatctgatctttgacaagcctgagaaaaacaagcaatggggaaaggattccctatttcataaatggtgctgggaaaactggctagtcatatgtagaaagctgaaagtggatcccttccttacaccttatacaaaaattaattcaagatggattaaagacttaaacattagacctaaaaccataaaaatcctagaagaaaacctaggcattaccattcaggacataggcatgggcaaggacttcatgtctaaaacaccaaaagcaatggcaacaaaagccaaaattgacaaatgggatctaattaaactaaagagcttctgcacagcaaaagaaactaccatcagagtgaacaggcaacatacaaaatgggagaaaattttcgcaacctgctcatctgacagagggccaatatccagaatctacaatgaactcaaatttacaagaaaaaaacaaacaaccccatcaaaaagtgggtga

SEQ ID NO: 9077 - DNA, 748 bp, Homo sapiens
  SIMILAR (149)..(223): 761254mologous to Homo sapiens Human secreted protein, SEQ ID NO: 7678,accession number G03597,Smith-Waterman Score=93.
tcaggcacaggagtctggatctataatctgagccagccctggcaacccgctggggtccccttccacgctgtggaagctttgttctttcactctttgcaataaatcatgctgctgttcactctttgggtctgcactacctttatgagctgtaacattcactgcgaaggtctgcagcttcactcttgaagccagcgagaccacaaacccaccggaaggaagaaactctggacacatctgaacatctgaaggaacaaactccggacacaccatctttaagaactgttaacactcaccgtgagggtccgcggcttcattcttgaagtcagtgagaccaagaacccaccaattccggacacattagggtggtaggccaggcatgggggagatcctacattccaggtacccctagcccttcccctaagcaggctaaccttggggattccctggagatcaaccaacttccagtgagagggagtggacaaaagcctctggaccagccattccttctctctctccaagtcctttttcctctctagcatcaaaaccaagcctaagtattttgaggttacatgaacatctctccccttcttttctgtgggcagagtcccttaggcaaataggaggcactgggggcctgagtgggatagctctccaaggtacactcattgacacagggtattcaggtaggggcttgccccaggccaagggagtaaggcaaactgtcaaaacctgggccatatgggccctg

SEQ ID NO: 9078 - DNA, 2253 bp, Homo sapiens
  SIMILAR (148)..(822): 991254mologous to Homo sapiens Human FADD-interacting protein (FIP),accession number W96153,Smith-Waterman Score=1119.
atggttacattttatgtggttgagaatgtgaaaatttctgaagagcaaaatcgtttgtcaaccgtgtattcagtccctactctggatgtgcctcacattacgctattgtcacagtgcagagtcctagccctcaagcagctagaaggacagcgataccagaaattgcagaagatcatgaagccttgctttggagacatgctgtccttcaccctgacggccttcgttgagctgatggaccatggcatagtgtcctgggatacattttcggtggcgttcattaagaagatagcaagttttgtgaacaagtcagccatagacatctcgatcctgcagcggtccttggccattttggagtcgatggtgctcaatagccatgacctctaccagaaagtggcgcaggagatcaccatcggccagctcattccacacctgcaagggtcagatcaagaaatccaaacctatactattgcagtgattaatgcgcttttcctgaaggctcctgatgagaggaggcaggagatggcgaatattttggctcagaagcaactgcgttccatcattttaacacatgtcatccgagcccagcgggccatcaacaatgagatggcgcaccagctgtatgttctacaagtgctcacctttaacctcctggaagacaggatgatgaccaaaatggacccccaggaccaggctcagagggacatcatatttgaacttcgaagaattgcttttgatgctgagtctgaacctaacaacagcagtggcagcatggagaaacgcaagtccatgtacacgcgagattataagaagcttgggttcattaaggaagaaactctggacatgtccgaacatcagaaggaacaaactctggacacaccatctttaagaactgtaacactcactgtgagggtccatggcttcattcttgaagtcagcaagaccaagaacccaccaattccagacacattttggccacccagatgggaccatcgcccatcgccaggcggaggacaggcaagggtccaggttttcgagaatgtgtcaataaaggccactaaatctgaccttcttggtcctccttgtggtctgggaggaaaactagtgtttctgctgctgcatcagtgcttggattacaggtgtgagccatggcgcctggccataaaggggaattttaaaagggaagagaagcgaaagtgggtggcctatgaagctgctgatgggtcaagcaaaaactgtcagggagtttggttgcacacttcactgattggcagctcaaaatctccaataactctgtcccctggctgtggcggaaggagaggcaacatattaaacagtgtcaatccttcgtccctgagtgtattgtgcaaacttccttggcatcctttctttgcacatggcgctttggagcaaaagggcaccatccagcaggaagcatttttcaattggatgactccatccacgataccctttggagagtgccttggacctaggctggacagtgctaggacagaggaccaccagagtctggcagggctgagtggtgatggggtcctggtacctgggaaagggaacatgcacagagcatcgtccttcctgaatctcaagctaaacccagcaggagcaaggccacgtttctatctgggggtagaaagcaaaattgtgcttccagttttccagggatgctataaatccttcgcaaatgctcacagcaagcaagtggcagggccagtgtttggcccctttcaccctgacgccagtcctcccccacctcagcctcgaggctgtgctgtcttgctatttaaggaaaagggaacatgctgtctacaaggtctcagtcgctctttacattcaattcagcctttttccaccttatatgtgctgagagctgttctgctgccattttctctccctgcctcaagagcacatttaagtgcaagtgaatggggtgggattgtgattgttacactgagtgattgcttagaatctgccctaccgtatctgccggtgtataaaactctaccgatgttaccaaactctgagaggatgtgaagctctagttttcactgtgctgagctgattacctcatgtcgtcaccaggggggcagcaccttcccatggcctttgggacttagggagcctccgggcggttggggaagcccacaccaaaccccatggccttaggtgggtcacctttttacctttccaaggcctgattcccaggttttggggcaaaaacggatgttaaaatgtggt

SEQ ID NO: 9079 - DNA, 1169 bp, Homo sapiens
  SIMILAR (3)..(137): 1001254mologous to Homo sapiens Human SOCS19 protein,accession number W93275,Smith-Waterman Score=238.
gactgccaccaactcctgtccagctgctctatccagtgtcccgattcagcaatgtcaaatccctccagcacctttgcagattccggatacgacagctcgtcaggatagatcacatcccagatctcccactgcctaagtacaatggggttgtcaggtttgggacaggaatgagtaagggggttgtggggagacctctgatctcttatatccgaaagttctactactatgatcctcaggaagaggtatacctgtctctaaaggaagcgcagctcatttccaaacagaagcaagaggtggaaccctccacgcccctgtctgttgagggacaccctggcaggggtgtagcagcagaagtagcagacgagaagctggggtacatgggcgatggggcctgggagaaggctgagtccgaggagctggaggtgcagaagccccaggtgaagctgcgccgggctgtgtctgaggtggcccgcccagcctccacaccacccatcatggcctcggccatcaaggacgaggatgacgaggatcgcatcatcgcagagctagaggtgtttgagagaagctcagtgtcttccctcccccccacgccccgccgccagctgatccccaccttgctgtccccccaggacctggggccccccgggggctcagccccaggccctacacggaagaggacccaacatcctcaagggcgccggtttaacaaactggaagggaagaagaagaggagcaaagaggaaagttgtaagcttacacatgtgaaggggacaacgggcaaaacccattctgtccttttgccatattatctgggcctggagtgcctacgacagctggcccaagcctcctgtctgcggggcaggactgctggaaccattgtgaagacccaggctccggggggcgcccctccgcccagctccttccactcgttgaagttgaggtcaggcagcgggctctgcaccaccacggtgtggcggcgccagctgctccggcgccgccgggtctcgggcgacagcggccgccgcaggcgcacggcgagcatggcggacgccgcgacaccgagcaggagacgcagcgcctccaaacgcgagggccgggaggccagcgccgccgccgggggccgcagcgactcctggctgctggacgacgccgagccgggcgcccattag

SEQ ID NO: 9080 - DNA, 1676 bp, Homo sapiens
  SIMILAR (1)..(1458): 871254mologous to Homo sapiens Nck, Ash and phospholipase C gamma-binding protein NAP4,accession number AB005216,Smith-Waterman Score=2184.
gagcgcggcctggagactaacagctgctcggaagaggagctcagcagcccgggtcgcggaggaggagggggcggccggcttctgctgcagcccccaggccctgaattacctccggtgcccttcccgctgcaggacttggtccctctggggcgcctgagtagaggggagcagcagcagcagcagcagcagcaacctcccccgcccccgcctcctcccgggcccctccggccactcgcgggtccttctcggaagggctccttcaaaatccgcctcagtcgcctctttcgcaccaagagctgcaacggtggctccggcggtggggatgggaccggcaagaggccttctggagagctggctgcttcagctgcgagcctgacagacatgggaggctctgcgggccgggagctggacgcggggaggaaacccaagttgacaagaactcaaagtgccttttctccggtctccttcagccccctgttcacaggtgaaactgtgtcgcttgtggatgtggacatttctcagcggggcctgacctctccacaccctccaactccccctcctcctccgagaagaagcctcagcctcctagatgatatcagtgggacgctgcctacatctgtccttgtggctccgatggggtcttccttgcagtctttccccctacctccgcctcctccaccccatgccccagatgcatttccccggattgctcccatccgagcagctgaatccctgcacagccaacccccacagcacctccagtgtcccctctaccggcctgactcgagcagctttgcagccagccttcgagagttggagaagtgtggttggtattgggggccaatgaattgggaagatgcagagatgaagctgaaagggaaaccagatggttctttcctggtacgagacagttctgatcctcgttacatcctgagcctcagtttccgatcacagggtatcacccaccacactagaatggagcactacagaggaaccttcagcctgtggtgtcatcccaagtttgaggaccgctgtcaatctgttgtagagtttattaagagagccattatgcactccaagaatggaaagtttctctatttcttaagatccagggttccagaactgccaccaaattcgtgtcaacatgatctatccaatgtcccgattcagcatttacgaatccttccagcaccttgcaaaattccggatacgacagctcgtcaggatagatcacatcccagatctcccactagcctaaacctctgatctcttatatccgaaagttctactactatgatcctcaggaagaggtatacctgtctctaaaggaagcgcacgtcagtttccaaacagaagcaagaggtggaaccctccacgtagcgaggggctccctgctggtcaccaccaagggcatttggttgccaagctccagctttgaagaaccaaattaagctaccatgaaaagaagaggaaaagtgagggaacaggaaggttgggattctctgtgcagagactttggttccccacgcaagccctggggcttggaaaaagcacatgaccgtactttgcgtggggctccacctcacacccacccctgggcatcttaggactggaggggctccttggaaaactggaagaagtctcaaccctgtttctttttcagaaaaaaaaaaaaa

SEQ ID NO: 9081 - DNA, 656 bp, Homo sapiens
  SIMILAR (153)..(416): 981254mologous to Escherichia coli K12 putative resistance protein (transport),accession number AE000463,Smith-Waterman Score= 439.
gaaatcgccaagtaaatatctatgctacacctttatcattagtaccgctgcgctcgtactgttgattatgctgccgcacgaaagtatgccggtctatttagggatggcatgtacgctgggctttggcgcgatagtctttacacagcgagccgttattttttgcacctatcggcgaagcaaaaattgctgaaaataaaacaggtgcggcgatggcgttgggtagctttattggttacgctccggcgatgttctgcttcagtctgtatggctacattctggatttaaatccggggattattggctacaaaatcgtgtttggcattatggcctgcttcgcattcagtggtgcggtggtttccgtaatgctggttaagcgtattagccaacgtaagaaagagatgctggcggctgaagcttaattaatgcccgaatgtgcttaatccgtccaacaaaacccgtatcaaccgtaggccggataaggcgtttacgccgcatccggcagtttcacatcagaagaaatacttcgtcccgatacggatctgggtttgctcgcggggggacggttcgaccgtgcggtctaaccagcgcaattcgaaataaaaggaggccagggtcattaatacggtaacggaaggaaaaagtgatttcccaatgat

SEQ ID NO: 9082 - DNA, 1490 bp, Homo sapiens
  SIMILAR (224)..(628): 761254mologous to Escherichia coli close match to PS00043: HTH_GNTR_FAMILY; similar to E. coli hypoth. 30 kDa protein adjacent to suc operon,accession number L19201,Smith-Waterman Score=489.
ggataattcgctttttaatccataaaaacctgcccaccaatgccaggtttttttttgccctgtcgtgagcgcacaccaaggcgaggttctcccttataagtctggggttacgtcaatagagagttttgtcacaattatctgcaaagtcatacgccgttaattgctttcttttttggcgtaagcgtaagatgcttcatctggtttaaaccaaaaggattaaacaatggcggagaatcaatcccccgtagaaaatgcaaaagagaaactggatcggtggttgaaagatggcatcaccacgccgggtggaaaactcccttcagaaagagagctgggagaactgctgggcattaaacgtatgacgctgcgccaggcgttgttgaacctcgaggcagaatccaaaatcttccgtaaggatcgtaaggggtggttcgtgacccagccgcgatttaattacagtccggagctgtcggcgagctttcagcgggccgcaattgagcaagggcgagagccttttctgggggtttaccgaggaaaacccgtacaggggattttccggggaccctcggcccttgatggcagtgacgccatcaactgaactctatcgcatcaccggctggggggcgctggaaggacataaagttttctatcacgaaacatatattaatcctgaagttgctccgggctttattgaacaacttgaaaaccactcattttctgcagtctgggaaaagtgctaccaaaaagagacggtagtaaaaaaattgattttcaaacccgtcagaatgccgggcgatatcagcaagtatcttggcggttctgcgggtatgccagcgatcttaattgaaaagcatcgcgccgaccagcaaggcaatattgtccaaatagatattgaatattggcgatttgaggccgtagacctcatcattaatctgtgttttatggtgacaataaataacgcaagaaagattctacaacgtgtcgacactcttcctctttatttacatgcttatgcctttcatttaaatatgcggctggaaagagtgttgcctgctgatttacttgatatcgcaagtgaaaataatctacgtggcgtcaaaatccatgttctcgatggcgagcgtttttctcttggtaatatggacgataaagaactctctgcctttggggataaagcccgccgtctgaaccttgatattcatattgaaaccagcgcctcagataaggcatctattgacgaagccgtcgccatcgcgttgaaaactggggcatcgtccgtacgtttttatccacgttatgaaagtaatttgcgcgacgtattatcgattatcgctaacgacattgcctatgtacgggaaacgtatcaggacagccgcctgacttttaacatcgagtggggcaaatcatcatgctgcagtccctatgtccacccctgggctaaactggctgctatctattatcggctgcaaccgcatatcaacgatgccttttag

SEQ ID NO: 9083 - DNA, 924 bp, Homo sapiens
  SIMILAR (305)..(457): 581254mologous to Escherichia coli K12 putative resistance protein (transport),accession number AE000463,Smith-Waterman Score= 128.
atgactgatgtagcctacgatatctgcgacggaaggctctcgcccttgctcaattgcggcccgctgaaagctcgccgacagctccggactgtaattaaatcgcggctgggtcacgaaccaccctttacgatctttacggaagattctttagagcacagtgctgataaacagactcatactactagcgtctcggcaacagagggtttgggaagtggaggactaataagtggagttacaactggctcagtaggaataagaaataacatgcagactatttcatctctattgcaacccataatttggtacggctgcgctcgtactgtagatagtgctgccgccagaaatatcgccgtctcattaagggatggcatgtacgctgggcttaggcgcgatagtcttaacacagcgagcagtatttttgcacctatcggcgaagcaaaaattgctgaaaataaaacaggtgcggcgatggcgttgggtagctttattggttacgctccggcgatgttctgcttcagtctgtatggctacattctggatttaaatccggggattattggctacaaaatcgtgtttggcattatggcctgcttcgcattcagtggtgcggtggtttccgtaatgctggttaagcgtattagccaacgccggataaggcgtttacgccgcatccggcagtttcacatcagaagaaatacttcgtcccgatacggatctggttttgctcgcggtggtaggaaggctacccggggcatttcatcacaggagctagggcaggggctttcaggtgaggagcaggatggggcctctgggggtgtgactgctggggacatagccacaggggattactttcttctcactcctcacctccagatttgcactggggcaaaaggaggattagggtgtgtggtcgaggggagataa

SEQ ID NO: 9084 - DNA, 752 bp, Homo sapiens
  SIMILAR (67)..(750): 971254mologous to Escherichia coli K12 putative transcriptional regulator LYSR-type,accession number AE000392,Smith -Waterman Score=1116.
atgagtgaactgccattcgcaattgcttcaaagagaaaagaatacgtaggaatccaacttccaaggtacaccatccaaaaattggaagaaaacctgaatgtggtcctgtttgaccgctcgggccatcgtaccaaattcaccaatgtcgggaggatgttgttggagcgagggcgcgttttgctgcaagccgcagataaactgactactgatgcggaagctctcgcgcgcggttgggaaacgcatctcaccattgtgaccgaagcgctggtaccgacacctgcctttttcccgttaatcgacaaactggcggcaaaagccaatacccaactggcaatcatcacataagtgctggcgggggcgtgggaacggctggagcaggggcgggcggatattgttatcgcgccggatatgcattttcgttcctcgtcggagatcaactcgcgcaagctctatacgttaatgaacgtctacgttgccgcgcctgatcacccgattcatcaggagccggaaccgttatctgaagtgacgcgtgtgaaatatcgtggaattgcggtggcggataccgctcgtgagcgcccggtgttgaccgtacagctgctggacaaacagccgcgcttaacggtgagcacgattgaagataaacgtcaggcattactggcggggcttggcgtggcgacgatgccgtatcctatggtcgaaaaagatattgcggaagggcggttgcgtgtcgtcagcccggaatcgaccagcga

SEQ ID NO: 9085 - DNA, 1116 bp, Homo sapiens
  SIMILAR (491)..(673): 491254mologous to Escherichia coli K12 putative transcriptional regulator LYSR-type,accession number AE000392,Smith -Waterman Score=112.
atgcagatggcggccagcagcacagttgccgtttcatcagcactgggcaacacacacaagctcaacgcaaggccagcaacaccaacccacaacatgttagcatcccatttccacacagtcactatatccatttgttacacagttgggcaccagcagcagcatcagtctcaatcagcaacacaacatcacacttggattcaaccatccaaggcttcattatttggggggcacatcctccgactagcccggacaaccatcgccgtgtgcacgcagctcctgaagggacttcgtcttgctcccaggtcagtccggcctacagtacatacgcttgacctggctctcgggagtcttgtcgatgatgtcggggtaacgatcgagaagtatctaatcatggagaatagatgttcaccccgtttgatatacgacccgtctatttccattcgtactcccatacatgcaaaagggtacttcgatacggacatcttcgcggcagctgctggacaaacagccgcgcttaacggtgagacgattgaagataaacgtcaggcattactggcggggcttggcgtggcgagatgccgtatcctatggtcgaaaaagatattgcggaagggcggttgcgttcgtcagcccggaatcgaccagcgagatcgatattattatggcctggcgcgtgacaaaaagaacgccgaaaaactgatggacaatgatgccggagaacataggggaatatacaaaaacaacacatatacttggctaaaccagatgccacgactaccttatgaggggacgcaagcccgccgaatttataaaaatagacgaaccggagcaaatgcggccggtccagttgctattattaaaagttatacagcggaaacctacacggattcataccattacagtaaaaaaaccaaccagctagaaggaagaacttatggaaatgcgcttacaagaaccatagaatgccgaatgacacaacgccgaaagattgaaataatagcgaaaataccaaagaaactgagcgccacaaaggcagaatatacgaccagcaaacagaaatacacccgaaccaccacgagatttaaagatgaaaaaagaactgatagaaacgaataa

SEQ ID NO: 9086 - DNA, 1674 bp, Homo sapiens
  SIMILAR (1)..(783): 871254mologous to Escherichia coli betaine-aldehyde dehydrogenase,accession number U73857,Smith-Waterman Score=1111.
atgaccgccatggagcgctcgcgtattctgcgtcgggccgttgatattctgcgtgaacgcaatgacgaactcgcaaaactggaaaccctcgacaccggaaaagcatattcggaaacctcaaccgtcgatatcgttaccggtgcggacgtgctggagtactacgccgggctgatcccggcgctggaaggcagccagatcccgttgcgtgaaacgtcctttgtgtatacccgccgcgaaccgctgggcgtagtggcagggattggcgcatggaactacccgatccagattgccctgtggaaatccgccccggcgctggcggcaggcaacgcaatgattttcaaaccgagcgaagttaccccgcttaccgcgttaaagctggctgaaatttacagcgaagcgggcctgccggacggcgtatttaacgtgttgccgggcgtgggcgcggagaccgggcaatatctgaccgagcatccgggcattgccaaagtgtcatttaccggcggtgtcgccagcggcaaaaaagtgatggctaactcggcggcctcttccctgaaagaagtgaccatggaactgggcggtaaatcaccgctgatcgttttcgatgatgcggatctcgatctcgccgccgatatcgccatgatggcaaacttcttcagctccggtcaggcaaagaggaaggcgcgcgcgtactgtgcggcggcgatggggtacgagctagagatcgtccaaatctccggcgtgaaaaccttcgcggcaaataccattcgtgacaacggcaccgacgaccagacgcgtgctgatatcgcccgcgcctttgaagatgcggtggtcgatacgctgatgattaagtgcaagcgggcgctggatcagacgggctttaagcgactggtcatggcgggcggcgtgagtgctaaccgtacgttacgggcgaagctggctgaaatgatgaaaaaacgccgcggcgaagtgttctacgcgcgtccggaattttgtactgataacggcgcgatgatcgcctatgccggaatggtgcggtttaaagcaggcgcgacggcggatctcggcgttagccaatacgaggaatatcagcccaaaaatcgcccccagtcgccaggaagtgacaatattttgcgcgagctgcgtgtgcgggccagcggcagggccgacgggagtggcacaggtttcaccgaagacgctaacagttttaccttttacagaaaaagatactatgaccattcagaattcgaccatgacggtgatgacaagagtccgggccacgctcgtttgtggaccatgcgttcggaacttggttaccaccggggccttcgatctgccttcctcacgtggcctccgctggaaaaccgccacacgctgccgaaagtgcatcgacttatgaccattcatgccaccaaaggcaaacagccggattacgtcatcatcgttggcttgcaggagggaagtgatggttttccggctgcggcgcgggagtcgattatggaagaggcgctactgccaccggttgaggatttcccggacgctgaagaacggcggttaatgtacgtggcgctgacccgggcacgccatcgggtatgggcactgtttaacaaagagaatccctctccctttgtggaaatactgaaaaatctggatgtgccggtggcgagaaaaccgtaa

SEQ ID NO: 9087 - DNA, 507 bp, Homo sapiens
  SIMILAR (3)..(44): 711254mologous to Escherichia coli similar to,accession number D90863,Smith-Waterman Score=49.
atgatcagcagcaaaatcgccagcggattgattgattgtttcccgcatgcacagtgggcaaaagaggttgatgtcagtgataaagaggcgcgctgcggtgtgcgttgtgccacccgcgatcatctgccaatggtatgcaatgtgcccgattatgaggcaacactcgtggaatatgcgtcgtcggcggagcacaaagatgacgcggtaagcgcgccggtttttgatgatctctttatcttaaggttctcgcggtttgtgttctggcccgctgtgtgccgagattctggcgacgtaaataagcggacgaaccgatgccgatggatgccagtatgctggacggcgttgatccctaatcggttatgggtgcggaaattgttgaagggtaaagcggtcaaggctggagcagttcactttaggcgttccattatctacttccacccccagcaagccaatgcacttgatttcccatccactcacatcatcaagtactgcaccatgcttctttga

SEQ ID NO: 9088 - DNA, 655 bp, Homo sapiens
  SIMILAR (654)..(241): 1001254mologous to Escherichia coli K12 putative resistance protein (transport),accession number AE000463,Smith-Waterman Score= 698.
atcattgggaaatcactttttccttccgttaccgtattaatgaccctggcctccttttatttcgaattgcgctggttagaccgcacggtcgaaccgtccccccgcgagcaaacccagatccgtatcgggacgaagtatttcttctgatgtgaaactgccggatgcggcgtaaacgccttatccggcctacggttgatacggttttcgttggccggattaagcacatccggccattaattaagcttcagccgccagcatctctttcttacgttggctaatacgcttaaccagcattacggaaaccaccgcaccactgaatgcgaagcaggccataatgccaaacacgattttgtagccaataatccccggatttaaatccagaatgtagccatacagactgaagcagaacatcgccggagcgtaaccaataaagctacccaacgccatcgccgcacctgttttattttcagcaatttttgcttcgccgataggtgcaaaaaatacggctcgctgtgtaaagactatcgcgccaaagcccagcgtacatgccatccctaaatagaccggcatactttcgtgcggcagcataatcaacagtacgagcgcagcggtactaatgataaaggtgtagcatagatatttacttggcgatttc

SEQ ID NO: 9089 - DNA, 1263 bp, Homo sapiens
  SIMILAR (1)..(708): 991254mologous to Escherichia coli K12 putative galactokinase (EC 2.7.1.6),accession number AE000295,Smith-Waterman Score=1191.
atgaaacgcagcaatatcaccaccgcaaaagtggaacatggcgtcgataccgcgtggctggtcgatcaccacacagaagacttcaccgccagctatgccgttcaacactggctggacgttgccgcacaacagaaaacggtggccattaccctgcgcgaactggcaccgtttgacaaacgtctcggcaccactcaacaagcgtatgaaaaagcctttgccggggtggtcaatcgcattctcgatgaagggtatcaggtgattgcgctctccacctgtacgggcattgacagctataacaaagacgaccgcatggtggcgctcaacctgcgccagcacatcagcgatcctgcccgttaccacgtagtgatggatgaactcaacgatctggaaatgggcaaaattctgggggcctgtgaactcaccgtcggtacgcgcctgcactctgccattatctcgatgaattttgccactccggcaattgccatcaactacgaacataaatccgccgggattatgcagcagctgggactaccggagatgggaattgatatccgtcatttattagacggcagcctgcaagcgatggttgcggataccttaggccagcttccggcgctgaatgcgcgacttagtgaagccgtcagtcgtgagcgtcagacaggaatgcagatggtgcagtctgtgcttgagcgcatcggggaggtgaaaggaaggaaagcggcgagcaggtcgagcatgaagaatcggccgtatccgctggtcgatgatctggagcgtttttatggtcttctggaacaaacgctgctggcaaccggttttatccgtgaaaaccatccggggcaggtgatgaataaattgcgccgtctgtttacccgtgcgcgcccggaaagccaggagttgaatatcctgcgcgggattctggcttctattgagcagcagaataaaggcctacgggagcacgaatgtaggccggataaagcgtttacgccgcatccggcagtcatgcgctacataaatttttcaggagcaaataatggatcatctacccatgccgaaattcgggccgttggccggattgttctttgtcttctccggtatcgaaatcgccggaccgtttgccgggcaaatgttcgcagaatggggcgcggaagttatctggatcgagaacgtcgcctgggccgacaccattcgcgttcaaccgaactacccgcaactctcccgccgcaatttgcacgcgctgtcgttaaatattttcaaagatga

SEQ ID NO: 9090 - DNA, 729 bp, Homo sapiens
  SIMILAR (220)..(726): 971254mologous to Escherichia coli K12 putative transport system permease protein,accession number AE000305,Smith-Waterman Score=821.
atggcgcaaaaaacgccagagaagcgatttatcacattgaaggtgacccggatcatccgtgaaaaccgtctgcgctacccggaatatcgtgcgccaggttctgacaaatggcagcgcattagctgggaagaagcattctcccgtattgcgaagctgatgaaagctgaccgtgacgctaactttattgaaaagaacgagcagggcgtaacggtaaaccgttggctttctaccgtaaacaagaagaagatcagcctgcgtaccgttggcgcggcgttagtgttacaggtcgtgattggcggcattatgctttggttaccgccagggcgttgggtcgctgaaaaagtcgcttttggcgtgcataaagtgatggcgtacagcgacgcgggtagcgcatttatcttcggttctctggtcggaccgaaaatggataccttatttgatggtgcaggatttatctttggtttcagggtgttaccggcaattatcttcgtcaccgcgctggtgagtattctctactacatcggtgtgatggggattttaattcgaattctcggcggtatcttccagaaagcattaaatatcagcaagatcgagtcattcgtcgcggtcaccaccattttcctcgggcaaaacgaaattccggcaatcgtcaaaccctttatcgatcgtctgaatcgcaatgaattatttacagcgatttgtagtggcatggcctcgattgatggttag

SEQ ID NO: 9091 - DNA, 1662 bp, Homo sapiens
  SIMILAR (880)..(1620): 1001254mologous to Escherichia coli Formate dehydrogenase, nitrate-inducible, major subunit (EC 1.2.1.2) (Formate dehydrogenase-N a subunit),accession number D90788,Smith-Waterman Score=1363.
  misc_feature (1)...(1662): n = a,t,c or g
atggcggaaacagcggttatcaatcacaagaaacgtaaaaatagcccgcgaatcgtccagtcaaacgacctcactgaggcggcatatagtctctcccgggatcaaaaacgtatgctgtatctgttcgttgaccagatcagaaaatctgatggcaccctacaggaacatgacggtatctgcgagatccatgttgctaaatatgctgaaatattcggattgacctctgcggaagccagtaaggatatacggcaggcattgaagagtttcgcggggaaggaagtggttttttatcgccctgaagaggatgccggcgatgaaaaaggctatgaatcttttccttggtttatcaaacttcaagagctgtttagtctcatggccatttgggcagcagttaagatgatagcaggtagtgagaccaaagtttctggactagaacctacgtttcaggtgcatgggattgaattcaaaagattgggatttgggctaagaaatggcccttcccctaaaaccggtttttcgccctttgccgttgaagtccaccgtcctttaatagtggaattcttggtcccaactggaacaacactcaacctatcctcgggctatcttttgatttataagggattttgccgatttcggacccaccatcaaacaggattttcgcctgctggggcaaaccagcgtggaccgcttgctgcaactctctcagggccaggcggtgaagggcaatcagctgttgcccgtctcactggtgaaaagaaaaaccaccctggcgcccaatacgcaaaccgcctctccccgcgcgttggccgattcattaatgcagctggcacgacaggtttcccgactggaaagcgggcagtgagcgcaacgcaattaatcctgccaggttatctgacgctgccgtcagaaaaacaggttgatttgcagtcgtatctggaagcgaacacgccgaaagcgacgctggctgatcaggtgaactactggagcaactatccgaagttcttcgttagcctgatgaaatctttctatggcgatgccgcgcagaaagagaacaactggggctatgactggctgccgaagtgggaccagacctacgacgtcatcaagtatttcaacatgatggatgaaggcaaagtcaccggttatttctgccagggctttaacccggttgcgtccttcccggacaaaaacaaagtggtgagctgcctgagcaagctgaagtacatggtggttatcgatccgctggtgactgaaacctctaccttctggcagaaccacggtgagtcgaacgatgtcgatccggcgtctattcagactgaagtattccgtctgccttcgacctgctttgctgaagaagatggttctatcgctaactccggtcgctggttgcagtggcactggaaaggtcaggacgcgccgggcgaagcgcgtaacgacggtgaaattctggcgggtatctaccatcatctgcgcgagctgtaccagtccgaaggtggtaaaggcgtagaaccgctgatgaagatgagctggaactacaagcagccgcacgaaccgcaatctgacgaagtggctaaagagaacaacggctacgcgctggaagatctctatgacgctaatgggggatnctttagagtccaacaaagcaggcattgcaagtcctga

SEQ ID NO: 9092 - DNA, 2658 bp, Homo sapiens
  SIMILAR (919)..(1719): 1001254mologous to Escherichia coli K12 putative oxidoreductase,accession number AE000355,Smith-Waterman Score=1343.
atggtggattgcccttcccccaccaagcctggagcattccagggtggaccttcagtactgctggtgcctggcaacgaagaattttcaaagcccttactgcgggcgtacgtggagatccagcggcgttttgctgggttcgccgccaatttctcgcgccagtttcggcaccagatatcccgacaccagtgtcagcaactcacgcataatctgccgtgcttcgtcatcactcaccataaaatgcgccgcgccctgtactttatcgagcacatgcaagtaatacgagcatacacgggcatcgaacaacgcattactcaagtttaccaacgaagtcggcttttggcgtacgcagatgttttcaacgacgtccggcgtgtagcgggaaacgtgctctttcagcaggttccacacacagcgcggatgagtcagtgtttcatcgcgtttcgcatagccgttttcatcgagctgatagttccaggacgatttatcgtattgacgtttttcagcgtcgtagccgctgaacagaccgtcttcgaaagcaaaatcatcacgcaccagcaggctggcgttggtgtaatgcttaacgtattcggcgttgattttgttgttttcgatcaggtagcgcaaaacgccagacaggaacgtaatgtccgtaccggaacgaataggcgcgtaaatatccgccacagaagcggtacgcgtaaaacggggatcgacaacgatcaaggttgcgtcgttgttgtttttcgcttccatcgcccagcggaaaccgacgggatgcgcttcagcagcgttaccgcccatcaccatcacgactggttggtcatcgcaccgcgaccaaatgttggagcaagacttgctaccgttggtccgtgtcagacgcgcgcctggttgtctaccgccagcatcccgagggagcgcagccatgttatcagtcaggggcaacgtgccgatgaccttacccgccagacggcgggtgaatttgccgagcagtttaatctgcacctgtttccacaaacctgggtgacggatatcgatgccgaagcccgtgtggtgaaaagccagaataatcagtggcaatacgacaagctagtactggcaaccggtgccagtgcctttgtcccgcctgtgcctgggcgtgagttaatgctgacgttaaatagtcagcaagagtatcgcgcctgtgaaacgcaactgcgggatgcccgacgcgtgttgattgttggcggtggtttgattggtagcgaactggcgatggatttttgtcgtgcaggcaaagcggtcacgctaatcgacaacgctgccagtattctggcgtcgttaatgccaccggaagtaagcagccgcttgcagcatcggttgacggagatgggcgttcatctgctgttgaaatctcagttacaggggctggaaaaaacggattctggcattcaggcaacgctggaccgccagcgcaatatcgaagtggatgcggtaattgccgccaccggactgcgcccggaaaccgccctggcacgacgcgccgggctgacgattaatcgcggcgtttgcgtcgatagttatctgcaaaccagtaataccgatatttacgcgctgggcgattgcgcggaaattaacggtcaggtattgccgttcctccagccgattcaacttagcgcgatggtgctggcaaaaaatcttctcggcaataacacgccgctgaaactcccggcgatgctggtgatctgcattccgcacggcggtggtggtccgggcgcggtttctgcggcaccgttcggtagcgcctctatcctgccaatcagctggatgtacatccgcatgatgggcgcagaagggctgaaaaaagcaagccaggtggcaatcctcaacgccaactatattgccagccgcctgcaggatgccttcccggtgctgtataccggtcgcgacggtcgcgtggcgcacgaatgtattctcgatattcgcccgctgaaagaagaaaccggcatcagcgagctggatattgccaagcgcctgatcgactacggtttccacgcgccgacgatgtcgttcccggtggcgggtacgctgatggttgaaccgactgaatctgaaagcaaagtggaactggatcgctttatcgacgcgatgctggctatccgcgcagaaattgaccaggtgaaagccggtgtctggccgctggaagataacccgctggtgaacgcgccgcacattcagagcgaactggtcgccgagtgggcgcatccgtacagccgcgctggtaaaaggcgaacactcgcacatctgattgaagatatccctaccggtatttacaccatcccggaaatcaactctatgggcaaaaccgaacagcagctgaccgcaatgaaagtgccatatgaagtgggccacgcccaatttaaacatctgacacgcgcacaaatcgtcggcatgaacgtgggcacgctgaaaattttattccatcgggaaacaaaagagattctagatattcactactttagcgaacgcgctaccgaaattattcatatccggcaagcgattattgaaccagaaaggtgccgccacacttttgaatacttcgtcaacaccaactttaacgaccccacgattgccgaaacctatccgggaactacctttaaccggtgtaaacccctattttaa

SEQ ID NO: 9093 - DNA, 2526 bp, Homo sapiens
  SIMILAR (1553)..(1491): 661254mologous to Homo sapiens Human secreted protein, SEQ ID NO: 4473,accession number G00392,Smith-Waterman Score=69.
atgaatatttacgtgcccacggtagagagcggacgttctaactatgttggaggcacacagtggggggggcccaccaacggaggggctaccaacgctgagccacagaagaaggtggccgcacatcaaagcagtctgcagtcagtgcgtgaagccaccaccgcttccggcgtggataatgcagcctcccccgactggcagacaccgctgaacgggattatttcaccctccgggaagactggccggataaggcgtttacgccgcatccggcagtttcacatcagagaaatacttcgtcccgatacggatctggttttgctcgcggtggatggaggatacagggctggtgctagtagatgcttcaactcgaagaagttaagcttgtttttttgggctttttgggaacgactttgcgacaaacttgggaagaagttaagacgctgccatgattgcagtgggggaagggagaaagaaaagaaggaaggaaaaggaaagaaaaggagggaagagaagagggagggaagagagagaggaggggaagaaaagagaaagggaacaacggggaacacggcgaaacaacggcgaaaccgcggggcacggcattggctcacgattcccacaaaggtatttggagaaccctcatggaaaaggacttctgcaaccctagttacacgtaggaccgccaagcggcaaggcggctgccgagcggagcacgacggcaaaggtcaagcctcccaaggagggacaaggagatcgagggtggcgtcagtcgtcaccagtgagaagaaatccccgccacaaccccgcgaaatcgccaaccatggccctagcctagtaggtggcgtcctcgctttcacgcacaatttttcagaaaaggtgtttgaaaaaccggagaggactcgggggaatagtatacatcctaattgcgaaaacacttatgggccaattaaacaaactgggaggtttcctgaggagtactctcaattgaactcaaaactcaatgatgtaccgccccaacaacaggggtattttccgttgtccgtaccagcgctgtttttctgtttccgccgtattgacccccactgtgtcgcgggggaccttgacacaaagggacttacgggtcgtataaaatacacatggacccgtatgtctggagttacaaactttcaaattgtaagagactcatcaacttgtcccatcatctcaggtaccgagcctgatataacgtttgtaaagcgcagtattagtgtgggagtgacccgattttcagctgttggagtacagcagaggaacgagccagatggccatgtctgtgacccggccaattgtgtagtgtctgtcctgggcagactgacacctcacacggctgggtactcctctgagacaaaaattcagaggaacgatcagacagcagcattcgcggttcacgaaaatctgctgtctgcagccactgctgctgatacccaggcaagcagggtccagagtggacccttgcaaactccaacagacctgcagctgagggtcctgtctgttagaaggaagctaacaaacagaaaggacatccacaccggaaacccatctgtacatgccatcatcaaagaccaaaatccctgggcccttattgccttacacgcaacacgttgccatcgtggggcaatacgttgtatgtaccaaccatgcacccatcgggccattggcattgccagtcaccggacttccacaataccaatcgcaggcgagaacatgcgaccatcggtttcgttttgcctgggcggatctggaacgggaagaaaccattgcagccaatcttttgctgatagcggtcagcgcattaagcgaaatacgataatcatcgttgtgcttttcgatagtacgcgatgttttcctgccagcgatgtttgccagatcgtgcaatttcctaacctaacaccttcgcacgtacatagtgcgcagctactgtcgcgtgaccgaaatcggcacttcaaccgttggcgtaaacggatgcgcacatcgcttcgtcgctgtgcagcagaaaagcagtttccgaatggcctaactcgcggggataagctgcatttgcgcttcgctaagattatcggcggggaaaacacacggcagaattgccgcgaaacggttttaccccagggccactggggtaagcaatacagtacaacacatcgcgtagctgtagttggcggaggcggcaaaccgttagttccgcaggcgaaggcgggtactagcaaatcctgtaagatgcaggtggtgtgggaagcttcccccaccctcctactatatcaaaacccgtggtcaccaagcaagagtgagcgcgcacgacagtctgcagacctttatcgtcatgtctacaaacgtgggggaacccccacgagccacgcgcatacaccagggaaatcaacacgggtcctaacacgcacagacgccaaacgggtaacgtcagccaaaagggcacaagggaacaccaggacgctcgccaacgctccgcaacgggtggcaggcacacccagtctctag

SEQ ID NO: 9094 - DNA, 585 bp, Homo sapiens
  SIMILAR (585)..(298): 861254mologous to Escherichia coli K12 putative resistance protein (transport),accession number AE000463,Smith-Waterman Score= 412.
tcagttcactattgatttgccgacagcaatcagcaagcgttgcaaaatggcgtctaaagaccactggtgccaggtgttgttttccatcgcgatatcgctggcattaggcgttgaggcgcgggcaacaattttgccctgccgattaaccgcgatgggcctgacattggtcgcgccacagtcgagtaccaggataacttcttgtgtcataatcgctccaccgcgagcaaaaccagatccgtatcgggacgaagtatttcttctgatgtgaaactgccggatgcggcgtaaacgccttatccggcgttggctaatacgcttaaccagcattacggaaaccaccgcaccactgaatgcgaagcaggccataatgccaaacacgattttgtagccaataatccccggatttaaatccagaatgtagccatacagactgaagcagaacatcgccggagcgtaaccaataaagctacccaacgccatcgccgcacctgttttattttcagcaatttttgcttcgacgataggtgcaaaaatactgctcgctgtgttaagactatcgcgcccacaccccagcgtacatgccat

SEQ ID NO: 9095 - DNA, 1485 bp, Homo sapiens
  SIMILAR (1227)..(487): 981254mologous to Escherichia coli caiA,accession number X73904,Smith-Waterman Score=1271.
tcagttagcagtgcaggcaccaatcaggtaaccactaaaggcctgggcgatagtgttataggccggaagattggtgtactcctcggtgccgtactgaccaaaaccggacaggtgagcgataaccagtttcgggttgtgctgccacagtacttcatcggtaatgccacgacgggcaaaggccggacctttactggcttcgatgaagatatcggtggtttccattaatttcagaaacgcttcgcggccttcatctttgaaaatatttaacgacagcgcgtgcaaattgcggcgggagagttgcgggtagttcggttgaacgcgaatggtgtcggcccaggcgacgttctcgatccagataacttccgcgccccattctgcgaacatttgcccggcaaacggtccggcgatttcgataccggagaagacaacgcgcaatccggccaacggcccgaatttcggcatgggtagatgatccattatttgctccgcacgacccagcgtcaggatctgcatttcgtcagatcccccggagacgcggtctacacgcagatcacgccagaagcggctgatgcggtggttgcccgcaatcccgacaccgcccagcacctgcattgcgctatccacaacttcaaatgccgcattggcgcagaagtatttgcacatcgctgcatcgccagaggtgatggtgccgttgtctgctttccacgctgcttcatacagcatgtttttcatggagtttaatttgatcgccatgtgggcgaatttttcctgaatcaactggaaacgaccaatagcctcgccaaactgcacgcgctgattggcgtagcgcgccgcatcttcaaaggcgcacatcgccgtaccgtagttggtgagggctaccaggaaacgttcatggtcgaactcttctttgacgcggttaaagccgttaccttcccgaccgaacatgtctttctcgtccagttccacgtcgtcaaaggtgatttcacagcagctatccatacgcagaccgagcttttcaagtttggtcactttgatgcccggtttgctcatatcaacaaaccattcggtgtagacaggttcgtccggagaagccccgtcgcgcgccatcaccacgatgtacggggtgtaggcgctgctggtaataaaacacttactaccattaagataaatcttaccatttctacgggtatcagtcggtttcaggctacccacgtcggagccccgcccggttcggaatcctgagtcccctcgcatatcaaggggcccaggggtaaggtagcggctgtccaggggtcgtgtcgcggtatggcgtattgttggggcaaaacgcatcatgccagccatgtcgggggttgggcctccccccgtgcccgtactggctcggccgggggccccccgcggggggtggcacccgcggggcccggcccgggggtccgcgcgcgcccgccagcgcgcgcgggcgcgggcggtcggtcggtcaggcat

SEQ ID NO: 9096 - DNA, 1198 bp, Homo sapiens
  SIMILAR (873)..(331): 991254mologous to Escherichia coli 2-oxoglutarate/malate translocator (SODiT1) homolog,accession number D90715,Smith- Waterman Score=918.
ttacccgaagatcaaacgcagcgcgataaaatattgatggcaattatgggttccggcaacgatctggaaattgacggtattggcggcggtaatccactgaccagtaaagtcgccattattagccgttccagcgatccgcgtgctgatgtcgattatctgtttgcgcaggtaatcgttcatgagcaacgtgtcgataccacgcctaactgcggcaatatgctgtctggtgttggggcattcgccattgaaaatggtttgattgcagcgacttcgccagttactcgcgtacgtatccgcaacgtcaatacgggtacgttcatcgaagcacaaggatttaatatcgttataacccacgccaaagatgaccggacctgccgcgccgccatagtgagtaaccatgccgccataggagttggagaacaacagtgccagcgcggttaacattaacggtgcgccggagacgttcgccagcatggcaaataccggtaacatagcaacgatataggcactaccggaagcgaagaaataacgcacgataatgctgaggaaaataataacgaagaaagcaacgttaccgtgaccatcaaatgccaggttatttttaaagacttcagctaaccattcgaagaatttaactttcgataataaggagcttaagccgataataccgccgtaccagattaaggtattccagccgcctttatttttaaccacgtcttcccaggtaacgatacccagcagcagcatggttgccataacaacgattgccacggtggattcatcaacccccagagacttactgaaaatccagcccagcagcgccagcacaaagacaccgagcagcattttttcgcggattttcatcggtcctaccattgggtacgcgaaagtattctggctggcgaacaggtgttacccgctgcgggtgatggttcattgacagtgcatcaggatatggaactgtaccggtggggcgttgctgaaagatgagcagtcgctgcatcagcttgccgctgaacgccgcgtctggatccaggtggtgaaagtcaatgtcaccattaacggcgtgaaagcctcgaccagcgatggtctggcaatcttccgctacgccaaccgccagatcacgatacaagccaatcggcatttcatagccctggcttatctcccagcaggcggcaaactggccatcatgaaccat

SEQ ID NO: 9097 - DNA, 2909 bp, Homo sapiens
  SIMILAR (88)..(1263): 991254mologous to Escherichia coli K12 putative cellulose synthase,accession number AE000430,Smith-Waterman Score=2104.
atggataaaggcatcgacgccctctttcatcgagatagagttaacaatgcctttgccctggatacacttcagacctttttcaatgatgcgttggctttcagcgcgacgctcggctgtttctggatgatcctggcctggatttttattccgctggagcacccgcgctggcagcgtattcgcgcagaacataaaaacctgtatccgcatatcaacgcctcgcgtccgcgtccgctggacccggtccgttatctcattcaaacatgctggttattgatcggtgcatcgcgcaaagaaacgccgaaaccgcgcaggcgggcattttcaggtctgcaaaatattcgtggacgttaccatcaatggatgaacgagctgcctgagcgcgttagccataaaacacagcatctggatgagaaaaaagagctcggtcatttgagtgccggggcgcggcggttgatcctcggtatcatcgtcaccttctcgctgattctggcgttaatctgcgttactcagccgtttaacccgctggcgcagtttatcttcctgatgctgctgtggggggtagcgctgatcgtacggcggatgccggggcgcttctcggcgctaatgttgattgtgctgtcgctgaccgtttcttgccgttatatctggtggcgttacacctctacgctgaactgggacgatccggtcagcctggtgtgcgggcttattctgctcttcgctgaaacgtacgcgtggattgtgctggtgctcggctacttccaggtagtatggccgctgaatcgtcagccggtgccattgccgaaagatatgtcgctgtggccgtcggtggatatctttgtcccgacttacaacgaagatctcaacgtggtgaaaaataccatttacgcctcgctgggtatcgactggccgaaagataagctgaatatctggatccttgatgacggcggcagggaagagtttcgccagtttgcgcaaaacgtgggggtgaaatatatcgcccgcaccactcatgaacatgcgaaagcaggcaacatcaacaatgcgctgaaatatgccaaaggcgagttcgtgtcgattttcgactgcgaccacgtacctacgcgatcgttcttgcaaatgaccatgggctggttcctgaaagaaaaacagctggcgatgatgcagacgccgcaccacttcttctcaccggacccgtttgaacgcaacctggggcgtttccgtaaaacgccgaacgaaggcacgctgttctatggtctgcgccagtcgtgggagttcaatgcgcgtggcctggagctggtgaaagaaggtcgagcgcaagcctgtgtcagtgccggtaataccggggcgctgatggggctggcaaaattattactcaagcccctggaggggcaaaatcaccgcatgttgctgcgttgggaagcgaagctggcggcacttgtacggttgcaggaaaacaccgcgcagccagtgcctttcgcaccaaataatgcgcgtccgctgacgctggaagacgatcgtttgagctgcaccgttcgcggctacaacttcgcgatcaccttctcaaaaatgagtggcaaaccgacatcctggcagctggttgccagtgcgctagccaccaaaatcgcccatgaggttaacccgcaaaatcaggtgggctgtatgctggcgggcggtaacttctacccttacagttgcaagccggaagatgtctgggcggcgctggagaaagaccgggaaaacctgttttttatcgatgtgcaggcgcggggcacgtatccggcttactctgcccgcgtattccgcgaaaaaggggtaaccatcaacaaagcaccgggcgatgatgaaatcctgaaaaacaccgtcgattttgtctctttcagctattacgcctcgcgctgcgcctcggcggagatgaacgccaacaacagcagtgcggcgaacgtggtgaaatcgctgcgtaatccgtatctacaggtgagcgactggggctggggaattgatccactcggtctgcgtatcaccatgaatatgatgtacgatcgttatcagaagccgctgtttctggtggaaaacggcctgggcgcaaaagatgaatttgctgccaatggcgagattaacgacgactatcgcatcagctacttacgcgaacatatccgctgcaatgggcgaagcgattgcagacaggcattccgctgatgggctacaccacatggggctgtattgatttagtttccgcctctacgggtgaaatgagcaaacgctacggctttgtctttgttgaccgtgacgacgcaggcaacggtacgctgacgcgcacgcgtaagaaatcattctggtggtataaaaaagtgattgccagtaatggggaagatttagagaactgcaaggagagccagtacagcccgccggaaagcagtaccgcagccggaagggtaaacacccaggccatcagaatgctggtcacggttttacgctgtaagccgccaccatctaccaccatcgtccccgcgacagaagaggagagtttctcgggctgggtcccctgtggagggtttggacccttccggaggtttagtgaggagtcgctgtcgccatggccgtcgaggctccagttgcccggtagattctcggggagacggtttcaaagcggtcagtggcgggagaagtttcaactctgtgagatgaatgcacacatcacaaagagattcctcagaatgcttctgtgtagtttttatgtgaagatatttcctgtaaaactattggcctcaaagcgctccaaatatccacttgtagattctagaaaaagattgtttcataactgctcaattgaaagaaaggttcaactctatgagacgaatgcacacatcaaaaagaagtttcacagaattcttctgtggagttttatgtga

SEQ ID NO: 9098 - DNA, 1538 bp, Homo sapiens
  SIMILAR (510)..(433): 921254mologous to Escherichia coli caiA,accession number X73904,Smith-Waterman Score=123.
tggtaattcttcgtacccttgattgctcccctggcgtagctgtatactgcgatctgatccgcttgcggcacatcccgttatacggtaccgtaagcttgcatatttatagcccgaaattgttatcctcgtccgtcgtgcgacagcgcgtgcaaattgcggcgggagagttgcgggtagttcggttgaacgcgaatggtgtcggcccaggcgacgttctcgatccagataacttccgcgccccattctgcgaacatttgcccggcaaacggtccggcgatttcgataccggagaagacaacgcgcaatccggccaacggcacgaatttcggcatgggtagatgatccattatttgctcctgaataatttatgtagcgcatgactgccggatgcggcgtaaacgctttatccggcctacattcgtgctcccgtaggcgacccagcgtcaggatctgcatttcgtcagattccccggagacgcggtctacacgcagatcacgccagaagcgggctgatgccggtggtgcccgcaaatcccgacaccgcccagcacctgcattgcgctatccacaacttcaaatgccgcattggcgcagaagtatttgcacatcgctgcatcgccagaggtgatggtgccgttgtctgctttccacgctgcttcatacagcatgtttttcatggagtttaatttgatcgccatgtgggcgaatttttcctgaatcaactggaaacgaccaatagcctcgccaaactgcacgcgctgattggcgtacgcgccgcatatcgccgtaccgtagttggtgagggctaccaggaaacgttcatggtcgaactcttctttgacgcggttaaagccgttaccttcccgaccgaacatgtctttctcgtccagttccacgtcgtcaaaggtgatttcacagcagctatccatacgcagaccgagcttttcaagtttggtcactttgatgcccggtttgctcatatcaacaaaccattcggtgtagacaggtttgtccggagaagccccgtcgcgcgccatcaccacgatgtacggggtgtaggcgctgctggtaataaaacacttactaccattaagataaatcttaccatttctacgggtataagtcgttttcaggctacccacgtcggagcccgcgcccggttcggtaatcgctgagttccacatctgcttaccggtgccgcggaaagccataattttgtcgatctgctcttgtgtgccttcgcgcaggaaggtgttgaacccgcccggcaactggtacagcacataggttggtgcccccagacgtcccagctccatccacacggcggcgagagtaacaaaccccgcgtccagaccaccgtgctcttcagggatcagcagactgtcgatacccatatccgccagtgctttgacaaaacgttccgggtagacgctgtcacggtcgcactcggcaaaataggcctcccagttttcgctggccatcagttcgcggataccggcgacaaacagttcctgctcatcatttaaattaaaatccat

SEQ ID NO: 9099 - DNA, 2858 bp, Homo sapiens
  SIMILAR (2507)..(1341): 921254mologous to Escherichia coli K12 formate dehydrogenase- N, nitrate-inducible, alpha subunit,accession number AE000244,Smith -Waterman Score=1940.
ttatttcgaattgcgctggttagaccgcaagtcgaaccgtaccaccgcgagcaaaaccagatccgtatcgggacgaagttttcttctgatgtgaaactgccggatgcggcgtaaacgccttatccggatgcaataactacacatgatatagttgatacatatccggtccagggtggtgctgttcgcgtgcttgttttctctgcttggtcgcttcgtgttgtgtctagtgtcttgttttcgcttgtgtggggtttcgtgtcgttctgtcgtcgttttgttccgtgtcgtgtctgcgtgcttctgtgttgtttgttctggtgttttgtttttggcgtgtggctgccgcgccgccatatgagtaaccatgccgccataggagttggagaacaacagtgccagcgcggtaacattaacggtgcgccggagacgttcgccagcatggcaaataccggtacatagcaacgatataggcatttgaaaaatatttaacgacaggcgcgtgcaaattgcggcgggagagttgcgggtagttcggttgaacgccgaatggtgtcggcccaggcgacgttctcgatccagataacttccgcgccccattctgcgaacatttgcccggcaaacggtccggcgatttcgataccggagaagacaacgcgcaatccggccaacggcccgaatttcggcatgggtagatgatccattatttgctcctgaaaaatttatgtagcgcatgactgccggatgcggcgtaaacgctttatccggcctacattcgtgctcccgtaggcctgcgtacaactgccggatgcggcgtaaacgccttatccgtcctacaaaatcgtctcttccgtcaaaatcccctgtgagtttcatattggacattggtggaggggtgaggaaaagaggagggcagggagatcgtcccacatctgaggctctagtgtttccttttgagtcaagcctcccaggatgtttctgaactggtccctggccaccacgtggggacctggaagatagctccctgctcctcagtcctgggggcccaagttccacagccccttggtagaccgcgtgcgcgtcagcgtacctgttttctgcgtcgtcacggtcaacaaagacaaagccgtagcgtttgctcatttcacccgtagaggcggaaactaaatcaatacagccccatgtggtgtagcccatcagcggaatgccgtctgcaatcgcttcgcccattgcgcggatatgttcgcgtaagtagctgatgcgatagtcgtcgttaatctcgccattggcagcaaattcaatcttttgcgcccaggccgttttccaccagaaacagcggcttcgtggttctgccagaaggtagaggtttcagtcaccagcggatcgataaccaccatgtacttcagcttgctcaggcagctcaccactttgtttttgtccgggaaggacgcaaccgggttaaagccctggcagaaataaccggtgactttgccttcatccatcatgttgaaatacttgatgacgtcgtaggtctggtcccacttcggcagccagtcatagccccagttgttctctttctgcgcggcatcgccatagaaagatttcatcaggctaacgaagaacttcggatagttgctccagtagttcacctgatcagccagcgtcgctttcggcgtgttcgcttccagatacgactgcaaatcaacctgtttttctgacggcagcgtcagataacctggcaggctggtagagagcaggcctaagtcagtcaagccctgaatgttggagtgaccacgcaatgcgttcacgccgccaccggccatacccatgttaccgagcagcaactggatcatcgccatagtacggatgttctgcgcacccacagtgtgctgcgtccagcccagcgcgtacaggaaggtggtttgtgcgatccggtgcgtttcaggaagtcggcttttggcgtaccgcagatgttttccaacgacgtccggcgtgtagcgggaaacgtgctctttcagcaggttccacacacagcgcggatgagtcagtgtttcatcgcgtttcgcatagccgttttcatcgagctgatagttccaggacgatttatcgtattgacgtttttcagcgtcgtagccgctgaacagaccgtcttcgaaagcaaaatcatcacgcaccagcaggctggcgttggtgtaatgcttaacgtattcggcgttgattttgttgttttcgatcaggtagcgcaaaacgccagacaggaacgtaatgtccgtaccggaacgaataggcgcgtaaatatccgccacagaagcggtacgcgtaaaacggggatcgacaacgatcaaggttgcgtcgttgttgtttttcgcttccatcgcccagcggaaaccgacgggatgcgcttcagcagcgttaccgcccatcaccatcacgacgttagcgtttttgatatccacccagtggttggtcatcgcaccgcgaccaaatgttggagcaagacttgcggtagaaagccaacggtttaccgttacgccctgctcgttcttttcaataaagttagcgtcacggtcagctttcatcagcttcgcaatacgggagaatgcttcttcccagctaatgcgctccattgtcaggtacctttgagataattgtaattgaccaaagatgtcagctgatactttgaagttttttagggtccatttggaggagtcaagaacggcacgtagggatgaggatgccgaagggattggttcattggagattcgctgtgtaagtttcatggtcgcagtaaaattcgaccaggaggttgccaatgtgcgtgttgtaaacccatacagggggtactcaaggccgggtggcat

SEQ ID NO: 9100 - DNA, 2238 bp, Homo sapiens; identical to SEQ ID NO: 3843
  SIMILAR (829)..(2232): 941254mologous to Homo sapiens putative p150,accession number U93572,Smith-Waterman Score=2306.

SEQ ID NO: 9101 - DNA, 1824 bp, Homo sapiens
  SIMILAR (400)..(1821): 951254mologous to Homo sapiens putative p150,accession number U93572,Smith-Waterman Score=2319.
atgggagactttaacaccccactgtcaacattagacagatcaacgagacagaaagtcaacaaggatacccaggaattgaactcagctctacaccaagcggacctaatagacatctacagaactctccaccccaaatcaacagaatatacatttttttcagcaccacaccacacctattccaaaattgaccacacagttggaagtaaagctctcctcagcaaatgtgaaagaacagaaattataacaaactatctctcagaccacagtgcaatcaaactagaactcaggattaagaaactcactcaaaactgctcaactacatggaaactgaacaacttgctcctgaatgactactgggtacataacgaaatgaaggcagaaataaagatgttctttgaaaccaaaatacaaactaccatcagagaatactacaaacacctctatgcaaataaactagaaaatctagaagaaatggataaattcctcgacacatacactctcccaagactaaaccaggaagaagttgaatctctgaatagactgataacaggatctgaaattgtggcaataatcaatagcttaccaaccaaaaagagtccaggaccagatggattcacagccgaattctaccagaggtacaaggaggaactggtaccattccttctgaaactattccaatcaatagaaaaagagggaatcctccctaactcatcttatgaggccagcatcatcttgataccaaagccgggcagagacacaaccaaaaaagagaattttcgaccaatgtccttgatgaacattgatgcaaaaatcctcaataaaatactggcaaaccaaatccagcagcacatcgaaaagcttgtccaccatgatcaagtgggcttcatccctgggatgcaaggctggttcaatatacgcaaatcaataaatataatccagcatataaacagaaccaaggacaataaccacatgattatctcaatagatgcagaaaaggcctttgacaaaattcaacaacgctgcatgctaaaaactctcaataaattaggtattgatgggacgtatctcaaaataataagagctatctatgacaaacccacagccaatatcatactgaatgggcaaaaactggaagcattgcctttgaaaactggcacaagacagggatgccctctctcaccactcctattcaacatagtgttggaagttctggccagggcaattaggcaggagaaggaaataaagggtattcaattaggaaaagaggaagtcaaattgtccctgtttgcagatgacatgattgtatatctagaaaaccccattgtctcagcccaaaatctccttaagctgataagcaacttcagcaaagtctcaggatacaaaatcaatgtacaaaaatcacaagcattcttatacaccaacaacagacaaacagagagccacatcatgagtgaactcccattcacgattgcttcaaagagaataaaatacctaggaatccaacttacaagggatgtgaaggacctcttcaaggagaactacaaaccactgctcaaggaaataaaagaggatacaaacaaatggaagaacattccatgctcatgggtaggaagaatcaatattgtgacaatggccatactgcccaaggtaatttacagattcaatgccatccccatcaagctaccaatgactttcttcacagaattggaaaaaactactttaaagttcatatggaaccaaaaaagagcccgcatcaccaagtcaatcctaagccaaaagaataatgctggaggcatcacactacctgacttcaaactatactag

SEQ ID NO: 9102 - DNA, 1785 bp, Homo sapiens; identical to SEQ ID NO: 8625
  SIMILAR (326)..(1783): 911254mologous to Homo sapiens putative p150,accession number U93572,Smith-Waterman Score=2221.

SEQ ID NO: 9103 - DNA, 2025 bp, Homo sapiens; identical to SEQ ID NO: 5416
  SIMILAR (550)..(2007): 941254mologous to Homo sapiens putative p150,accession number U93572,Smith-Waterman Score=2397.

SEQ ID NO: 9104 - DNA, 3465 bp, Homo sapiens; identical to SEQ ID NO: 7834
  SIMILAR (67)..(1476): 961254mologous to Homo sapiens putative p150,accession number U93569,Smith-Waterman Score=2359.

SEQ ID NO: 9105 - DNA, 2022 bp, Homo sapiens
  SIMILAR (225)..(281): 781254mologous to Homo sapiens putative p150,accession number U93572,Smith-Waterman Score=80.
atggacacaataaaaaatgataaaggggatatcaccaccgatcccacagaaatacaaactaccatcagagaatactataaacacctctatgcaaataaactagaaaatctagaagaaatggataaattcctcgacacatatacccttccaagactaaaccaggaagaagttgaatctctgaatagaccagtaagaggctctgaaattgaggcaataattaatagcttaccaaccaaaaaagtccaggaccagatgaattcacagccgaattctaccaaagaaaaggcctttgacaaaattcaacaagccttcaccctaaaaactctcaataaattagttattgatgggacgtatcgcaaaataataagagctatctgtgacaaacccacagccaatatcatactgaatgggcaaaaactggaagcattccctttgaaaactggcacaagacagggatgccctctctcaccactcctattcaacatagtgttggaagttctggacagggcaatcaggcaagagaaggaaataacgtgtattcaattaggaaaagaggaagtcaaattgtccctgtttgcagatgacatgattgtatatctagaaaacccaatcatctcagcccaaaatctccttaagctgataagcaacttcagcaaagtctcaggatacaaaatcaatgtacaaaaatcacaagcattcttatacaccaataatagacaaacagagagccaaatcatgagtgaactcccattcacaattgcttcaaagaaaataaaatacctaggaatccaacttacaagggatgtgaaggacctcttcaaggagaactacaaaccactgcttaatgaaataaaagaggatacaaacaaatgggagaacattccatgctcatgggtaggaagaatcaatatcatgaaaatggccatactgcccaaggtaatttatagattcaatgccatccccatcaagctaccagtggctttcttcacagaattggaaaaaactactttaaagttcatatgggaccaaaaacgggcctacattgcgaagtcaatcctaagccaaaagaacaaagctggagtcatcatgctacctgacttcaaactatactacaaggctacagtaaccaaaacagcatggtactggtaccaaaacagagatatagatcaatggaacagaacagagccctcagaaataatgctgcatatctacaactatctgatctttgacaaacctgacaaagatgagcaatggggtaaggattccctgtttaataaatggtgttgggaaaactggctagacatatggagaaagctgaaactggatccctttcttacaccttatacaaaaattaattcaagatggattaaagacttaaatgttagacctaaaaccataaaaaccctagaagaaaacctaggcaataccattctggacataggcatgggcaaggacttcatgtctaaaacaccaaaagcaatggcaacaaaagccaaaattgacaactgggatctaattaaactaaagagcttctgcacagcaaaagaaactaccatcagagtgaacaggcaacccacaaaatgggagaaaattttcacaacctactcatctgacaaagggctaatatccagaatctacaaagaactcaaacaaatttacaagaaaaaaacgaacaaccccatgaacaaatgggcgaaggatatgaacagacacttctcaaaagaagacatttatgcagccaaaagacacatgaaaaaatgctcatcatcactggccatcagagaaatgcaaatcaaaaccacaatgagataccatctcacaccagttagaatggtgatcattaaaaagtcaggaaacaacaggccacccctaagcaaagaacaacctcctatttttcgtttaagtattattttggcaaccacaagagatggcaaccctgctgcagttgaaaatgtgctccacatcaaagccacactttcttttcagcagactcacaaagctttttatttccagccctcctga

SEQ ID NO: 9106 - DNA, 3480 bp, Homo sapiens; identical to SEQ ID NO: 4232
  SIMILAR (1075)..(2646): 741254mologous to Homo sapiens putative p150,accession number U93563,Smith-Waterman Score=1984.

SEQ ID NO: 9107 - DNA, 2463 bp, Homo sapiens; identical to SEQ ID NO: 2311
  SIMILAR (977)..(1039): 611254mologous to Mus musculus endonuclease/reverse transcriptase,accession number AF016099,Smith-Waterman Score=69.

SEQ ID NO: 9108 - DNA, 1392 bp, Homo sapiens
  SIMILAR (355)..(1389): 951254mologous to Homo sapiens putative p150,accession number U93563,Smith-Waterman Score=1702.
gtactgctgtcctttggcacacctctagtgctgaccactgaccttctccaggctctctcctctttgcctttcatggaatcagggctttttcaaggtgaaggagatgaaatacaaattaccagcatagaatactataaacacctctacgcaaataaactagaaaatctagaagaaatggataaactcctcgacacatacaccctcccaagactaaaccaggaaggagttgaatctctgaatagaccaataacaggatctgaaattgaggcaataattaatagcttaccaaccaaaaaaggtccaggaccagatggattcacagccaaattctgccagaggtacaaggaggagctgcacatcaaaaagcttatccaccatgatcaagtgggcttcatccctgggatgcaaggctggttcaacatacgcaaatcaataaacgtaatcgagcatataaacagaaccaaggacaaaaaccacatgattatcttaatagatgcagaaaaggcctttgacaaaattcaacaacccttcatgctaaaaactctcaataaattaggtattgatgggacgtatctcaaaataataagagctatctatggcaaacccacagtcaatatcatactgaataggcaaaaactggaagcattccctttgaaaactggcacaagacagggatgccctctctcaccactcctattcaacatagtgttggaagttctggccaaggcaattaggcaggagaaggaaataaagggtattcaattaggaaaagaggaagtcaaattgtccctgtttgcggacgacatgattgtatatctagaaaaccccatcatctcagcccaaaatctccttaagctgacaggcaacttcagcaaagtctcaggatacaaaatcaatgtgcaaaaatcacaagcattcttatacaccaataacagacaaacagagagccaaatcatgagtgaactcccattcacaattgcttcaaagagaataaaatacctaggaatccaacttacaagggatgtgaaggacctcgtaaaggagaactacaaaccactgctcaaggaaataaaagaggatacaaacaaatggaagaacattccatgctcatgggtaggaagaatcaatatcctgaaaatggccatactgcccaaggtaatttatagattcaatgccatccccatcaagctaccaatgactttcttcacagaattggaaaaaactactttaaagttcatatggaaccaaaaaagagcctgcattgccaagtcaatcctaagccaaaagaacaaagctggaggcatcacgctacctgacttcaagcgatgctacaaggctacagtaaccaaaacagcatggtactggtaccaaaacagagatatagaccaatag

SEQ ID NO: 9109 - DNA, 1659 bp, Homo sapiens; identical to SEQ ID NO: 5397
  SIMILAR (1589)..(1657): 911254mologous to Homo sapiens putative p150,accession number U93574,Smith-Waterman Score=102.

SEQ ID NO: 9110 - DNA, 1716 bp, Homo sapiens
  SIMILAR (628)..(1713): 941254mologous to Homo sapiens putative p150,accession number U93569,Smith-Waterman Score=1738.
atggtaaagggatcaattcaacaagaagagctaactatgctaaatgtatatgcacccaatacaggagcacccaggttcataaagcaagtcctgagtgacctacaaagagacttagactcccacacattaataacgggagactttaacaccccactgtcaacattagacagatcaatgagacagaaagtcaacaaggatacccaggaattgaactcagctctgcaccaagcggacctaatagacatctacagaattctccatcccaaatcaagagattatacatttttttcagcaccactccacacctattccaaaattgaccacatacttggaagtaaagctctcctcagcaaatgtaaaagaacagaaattataacaaactatctctcagaccacagtgcaatcaaactagaactcaggtttaagaatctcactcaaaacggctcaactacatggaaactgaacaacttgctcctgaatgactactggatacatatcgaaatgaaggcagaaataaagatgttctttgaaaccaacgagaacaaagacacaacataccaggatctctgggacatattcaaagcagtgtgtagagggaaatttataacactaaatgcccacaagagaaagatcaacaaaatagatagaccactagcaagactaataaagaaaaaaagagagaagaatcaaatagacacaataaaaaatgataaaggggatatcacccccgatcccacagaaatacaaactaccatcagagaatactacaaacacctctacacaaataaactagaaaatctagaagaaatggataaattcctcgacacatacactctcccaagactaaaccaggaagaagttgaatctctgaatagaccaataacaagaggtgaaattgtggaaataatcaatagtttaccaaccaaaaagagtccaggaccagatggattcacagccgaattctatcagaggtacaaggaggaactggtaccattccttctgaaagtattccaatcaacagaaaaagagggaatacaccctaactcattttatgaggccagcatcattctgataccaaagccgggcagagacacaacaaaaaaagagaattttagaccaatatccttgatgaacattgttgcaaaaatcctcaataaaatactggcaaaccgaatccagcagcacatcaaaaagcttatccaccatgatcaagtgggcttcatccctgggatgcaaggctggttcaatataagcaaatcaataaatgtaatccagcatataaacagagccaaagacaaaaaccacatgattatctcaatagatgcagaaaaagcctttgacaaaattcaacaacgcttcatgctaaaaactctcaataaattaggtattgatgggatgtatctcaaaataataagagctatctatgacaaacccacagccaatatcatactgaatgggcaaaaactggaaacattccctttgaaaactggcacaagacagggatgccctctctcaccactcctattcaacatagtgttggaaattctcgccagggaaattaggcaggagaaggaaataaagtgtattcaattaggaaaagaggaagtcaaattgtccctctttgcagacaacatgattgtatatctagaaaaccccattgtctcagcccaaaatctccttaagctgataagcaacttcagcaaagtctcaggataa

SEQ ID NO: 9111 - DNA, 3171 bp, Homo sapiens; identical to SEQ ID NO: 7867
  SIMILAR (442)..(1884): 911254mologous to Homo sapiens putative p150,accession number U93569,Smith-Waterman Score=2277.

SEQ ID NO: 9112 - DNA, 2952 bp, Homo sapiens
  SIMILAR (904)..(2883): 831254mologous to Homo sapiens putative p150,accession number U93572,Smith-Waterman Score=2834.
atgcttctaaaccaaggcagaaagctacccagagtttttgcagaggaaactctcaagttcaaggggacctctaacaagccccagaccctggaacagatcagcaccagcatcatagcccagaaagaggctacagtcatggttcctgggagtaaccaggagattccctctggtgcctacgccatcagagccctgggtttcaagcataaaactgggcggctgtttgagcagacactgaactacctgcaggagtttcttttcacaccccagtggcacctggaatgccagcaagagagaactgtccactcccctggaaaagcagctgaagccagagagccaagtgtgatcgacagacacctcatacaggagagctccaactggcatctggtgggtgccgctctgggacaaagcttccagaggaaggaacaggcagcaatctttgctgttctgcagcctctgctggtgatacccaggcaaacaggatctggagtggacctccagaaaactccaacagacctgcagcagaggggcctgattgttagaaggaaaactaataaacagaaaggaatagttcacaactcaacaacaagggaacaaaactggacagagaatgagtttgacaaattgacagaaggaggcttcaaaaggtgggtaataacaaactcctctgagctaaaggagcatgttctaacccaatgcaaggaagataagaaccttgaaaaaagtgcaatcaaactagaactcaggattaagaatctcattcaaaaccactcaactacatggaaactgaacaacctgctcctgaatgactactgggtacataacgaaatgaaggcagaaataaagatgttctttgaaaccaacgagaacaaagacacaacataccagaatctctgggacgcattcaaagcagtgtgtagagggaaatttatagcactaaatgcccacaagagaaagcaggaaagatccaaaattgacaccctaacatcacaattaaaacaactagaaaagatcaacaaaattgatagaccgctagcaagactaataaagaaaaaaagagagaagaatcaaatagatgcaataaaaaatgataaaggggatatcaccaccgatcccacagaaatacaaactaccatcagagaatactacaaacacctctacgcaaataaactagaaaatctagaagaaatggataaattcctcgacacatacactctcccaaggctaaaccaggaagaagttgaacctctgaatagaccaataacaggatctgaaattgtggcaataatcaatagcctaccaactaaaaagagtccaggaccagatggattcacagccgaattctaccaggggtacaaggaggaactggtaccattccttctgaaactattccaatcaatagagaaagagagaatccaccctaactcactttatgaggccagcatcatcctggtactaaagccagccagagacacaaccaaaaaagagaattttagaccaatatccttgatgaacattgatgcaaaatcctcaataaaatactggcaaaccgaatccagcagcacatcaaaaagcttatccaccatgatcaagtggcttcatccctgggatgcgaggctgcatataaacagaaccaaagacaaaaaccacatgattatctcaatagatgcagaaaaggcctttgacaaaattcaacaacccttcatgctaaaaactctcaataaattaggtattgatgggacgtatctcaaaataataagagctatctatgacaaacccacagccaatatcatactgaatgggcaaaaactggaagcattccctttgaaaactggcacaagacagggatgccttctctcaccactcctattcaacatagtgttggaagttctggccagggcaattaggcaagagaaggaaataaagggtattcaattaggaaaagaggaagtcaaattgtccctgtttgcagatgaaatgattgtatatctagaaaacccaattgtctcagcccaaaatctccttaagctgataagcaaattcagcaaagtctcaggatacaaaatcaatgtacaaaaatcacaagcactcttatacaccaaaaacagacaaacagagagccaaatcatgagtgaactcccattcacaattgcttcaaagagaataaaatacctaggaatccaacttacaagggacgtgaaggacctcttcaaggcgaactacaaaccactgctcagtgaaataaaagaggatacaaacaaatggaagaacattacatgctcatgggtaggaataatcaatatcgtgaaaatggccatactacccaagataatttacgcattcaatgccatccccatcaagctaccaatgactttcttcacagaattggaaaaaactactttaaagttcatatggaaccaaaaaagagcccgcatcgccaagtcaatcctaagccaaaagaacaaagctggaggcatcacactacctgacttcaaactatactacaaggctacagtaaccaaaacagcatggtactggtaccaaaacagagatatagaccaatggagcagaacagagccctcagaaataacgccgcatatctacaaccatctgatctttgacaacaaacctgagaaaaacaagcaatggggaaaggattccatgtttaataaatggtgctgggaaaactggctagccatatgtagaaagctaaaactggatcccttccttacaccttatacaaaaatcaattcaagatggattaaagacttaaacttcagacctaaaaccataaaaaccctagaagaaaacctaggcattaccattcaggacataggcatgggcaagggcttcatgtctaaaactaaagagcttctgcacagcaaaagaaactaccatcagagtgaacaggcaacctacaacatgggagaaaatttttgcaatctactcatctga

SEQ ID NO: 9113 - DNA, 2406 bp, Homo sapiens; identical to SEQ ID NO: 6554
  SIMILAR (841)..(1782): 971254mologous to Homo sapiens putative p150,accession number U93563,Smith-Waterman Score=1639.

SEQ ID NO: 9114 - DNA, 2310 bp, Homo sapiens; identical to SEQ ID NO: 6271
  SIMILAR (1138)..(2307): 911254mologous to Homo sapiens putative p150,accession number U93568,Smith-Waterman Score=1900.

SEQ ID NO: 9115 - DNA, 2776 bp, Homo sapiens
  SIMILAR (3)..(1400): 971254mologous to Homo sapiens putative p150,accession number U93569,Smith-Waterman Score=2357.
tacaaagagacttagactcccacacattaataatgggagactttaacaccccactgtcaatattagacagatcaacgagacagaaagtcaacaaggatacccaggaattgaactcagctctgcaccaagcggacctaatcgacatctacagaactctccaccccaaatcgacagaatatacatttttttcagcaccacaccatacctattccaaaattgaccacatacttggaagtaaagctctcctcagcaaatgtaaaagaacagaaattataacaaactgtctctcagaccacagtgcaatcaaactagaactcaggattaagactctcactcaaagccactcaactacatggaaactgaacaacctgctcctgaatgactactgggtacataacgaaatgaaggcagaaataaagatgttctttgaaaccaacgagaacaaagacacaacataccagaatctctgggacgcattcaaagcagtgtgtagagggaaatttatagcactaaatgcccacaagagaaagcaggaaagatccaaaattgacaccctaacatcacaattaaaagaactagaaaagcaagagcaaacacattcaaaagctagcagaaggcaagaaataactaaaatcagagcagaactgaaggaaatagagacacaaaaaacccttcaaaaaatcaatgaatccaggagctggttttttgaaaggatcaacaaaattgatagaccgctagcaagactaataaagaaaaaaagagagaagaatcaaatagacacaataaaaaatgataaaggggatatcaccactgatcccacagaaatacaaactaccatcagagaatactacaaacacctctacgcaaataaactagaaaatctagaagaaatggatacattcctcgacacatacactctcccaagactaaaccaggaagaagtcgaatctctgaatagaccaataacaggagctgaaattgaggcaataatcaatagtttaccaaccaaaaagagtccaggaccagatggattcacagccgaattctaccagaggtacaatgaggagctggtaccattccttctgaaactattccaatcaatagaaaaagagggaatcctccctaactcattttatgaggccagcatcattctgataccaaagccaggcagagacacaaccaaaaaagagaattttagaccaatatccttgatgaacattgatgcaaaaatcctcaataaaatactggcaaaccgaatccagcagcacatcaaaaagcttatccaccatgatcaagtgggcttcatccctgggatgcaaggctggttcaatatacgcaaatcaataaatgtaatccagcatataaacaaagccaaagacaaaaaccacattattatctcaaggaagcattccctttgaaaactggcacaagacagggatgccctctctcaccgctcctattccatagtgttggaagttctggccagggcaatcaggcagaagaaggaaataaagggtattcaattaggaaaagaggaagtcaaattgtccctgtttgcagacgacatgattgtttatctagaaaaccccattgtctcagcccaaaatctccttaagctgataagcaacttcagcaaagtctcaggatacaaaatcaatgtacaaaaatcacaagcattcttatacaccaagaacagacaaacagagagccaaatcatgagtgaactcccattcacaattgcttcaaagagaataaaatacctaggaatccaacttacaagggatgtgaaggacctcttcaaggagaactacaaaccactgctcaaggaaataaaagaggacacaaacaaatggaagaacattccatgctcatgggtaggaagaatcaatatcgtgaaaatggccatactgcccaaggtaatttacagattcaatgccatccccatcaagctaccaatgactttcttcacagaattggaaaaaactactttaaagttcatatggaaccaaaaaagagcccgcatcgccaagtcaatcctaagccaaaagaacaaagttggaggcatcacactacctgacttcaaactatactacaaggctacagtaaccaaaacagcatggtactggtaccaaaacagagttatagatcaatggaacagaaaagagccctcagaaataacaccgcatacctacaactatctgatctttgacaaacctgagaaaaacaagcaatggggaaaggattccctatttaataaatggtgctgggaaaactggctagccatatgtagaaagctgaaactggatcccttccttacaccttatacaaaaatcaattcaagatggattaaagatttaaatgttagacctaaaaccataaaaaccctagaagaaaacctaggcattaccattcaggacataggcatgggcaaggacttcatgtccaaaacaccaaaagcaatggcaacaaaagccaaaattgacaaatgggatctaattaaactaaagagcttctgcacagcaaaagaaactaccatcagagtgaacaggcaacctacaacatgggagaaaattttcacaacctactcatctgacaaagggctaatatccagaatctacaatgaactcaaacaaatttacaagaaaaaaacaaacaaccccatcaaaaagtgggtgaaggacatgaacagacacttctcaaaagaagatatttatgcagccaaaaaacacatgaaaaaatgctcatcatcactggccatcagagaaatgcaaatcaa

SEQ ID NO: 9116 - DNA, 3213 bp, Homo sapiens; identical to SEQ ID NO: 2322
  SIMILAR (1)..(1821): 851254mologous to Homo sapiens putative p150,accession number U93563,Smith-Waterman Score=2589.

SEQ ID NO: 9117 - DNA, 1692 bp, Homo sapiens
  SIMILAR (343)..(1677): 721254mologous to Homo sapiens putative p150,accession number U93572,Smith-Waterman Score=1565.
atggcgggcgtggggccggggggctacgcggcggagttcgtgccaccgccagagtgccccgtctttgagccgagttgggaggagttcacagatccgctcagctttatcggccgcatccggcctttggcggagaaaaccggcatctgcaaaattcggccgcccaaggactggcagcctccatttgcctgtgaagtaaaaagctttcgtttcactccaagagtccagcgcctgaatgaacttgaggcaatgaccagagtgagattggatttcttggatcaactagcaaaattttgggaacttcaaggatctactctgaagatccctgtggtagagagaaaaatcctggatctgtatgctttgagcaaggaacacagcttctcgccagcaacggaacaaagctggacagagaatgactttgatgagttgagagaagaaggcttcagacgatcagacttctccgagctaaaggaggaagttcgaacccatcgcaaagaagctaaaaaccttgtaaaaagattagacaaatggctaaatagaataaccagtgtagagaagtctttaaatgacctgatggagctgaaaaccatggcacgagaacaactacgtgatgaatgcacaagcttcagtagccaatttgatcatttggaagaaaggaaatacaaactaccatcagagaataaacacctctatgcaaataaactagaaaatctagaagaaatggataaattcctggagacatacaccctcccaagactaaaccaggaagaagttgaatccctgaatagaccaataacaggctctgaaattgaggcaataattaatagcctaccaaccaaaaacagtccaggaccagatagattcacagccaaattctaccagatgtacaaggaggagctggtaccattctttctgaaactattccagtcaatagaacaagagggaattctccctaactcattttatgaggccagcatcatcctgataccaaagcctggcagagacccaacaaaaaaagagaattttagaccaatatccctgatgaacatcgatgcgaaaatcttcaataaaatactggcaaaccaaatccagcagcacatcaaaaagcttatccaccatgatcaaatgggcttcatccctgggatgcaagactggttcaatatacgcaaatcaataaacgtaatccagcatataaacagaaccaaagacaaaaaccacacaattatctcaatagatgcagaaaaggcctttgacaaaattcaacaatgcttcatgctaaaaactctcaataaattaggtattgatgggacgtatgtcaaaataataagagctatttatgacaaacccacagccaatatcatactggatgggcaaaaactggaagcattccctttgaaaactagtacaatacagggatgccctctctcaccactcctattcaacatagtgttggaagttctggccagggcagtcaggcaggaaaaagaaataaagggtattcaatcaggaaaagaggaagtcaagttgtccctgtttgcagatgacatgactgtatatttagaaaaccccatcatctcagcccaaaatctcctaaagctgaaaagcaacttcagcaaagtctcaggatacaaaatcaatgtgcaaaaatcacaagcattcttatacaccaataacagagagccaaatcatgagtga

SEQ ID NO: 9118 - DNA, 1518 bp, Homo sapiens; identical to SEQ ID NO: 6840
  SIMILAR (181)..(1503): 811254mologous to Homo sapiens putative p150,accession number U93569,Smith-Waterman Score=1787.

SEQ ID NO: 9119 - DNA, 1863 bp, Homo sapiens
  SIMILAR (3)..(86): 501254mologous to Homo sapiens putative p150,accession number U93563,Smith-Waterman Score=61.
atgaatccaggagctgattttttgaaaagatcaacaaaattgagactgctagcaagactaataaagaagaaaagagagaagaatcaaatagatgcaataaaaaatgataaaggggatatcaccaccgatcccacagaaatacaaactaccatcagagaatactataaacacctctacacaaataaactagaaaatctagaagaaatggataaattcctcaacacatacaccctcccaagactaaaccaggaagaagttgaatccctgaatagactaataacaggctctgaaattgaggcaataatcaatagcctaccaaccaaaaaaagtcctggactagacacattcacagctgaattctaccagaggtacaaagaggagctggtaccattccttctgaaactattccaatcaatagaaaaagagggaatccttcctaactcattttatgaggccatcatcattctgatacaaaagcctggcagagacacaacaaaaaaagagaattttagaccaatatccctgatgagcatcaatgcaaaaatcctcaataaaatactggcaaacagaatccagcagcacatcaaaaagcttatccaccatgatcaagtgggctccatccctgggatgaaaggctggttcaacatatgcaaatcaataaatgtaatgcagcatataaacagaaccaaatacaaaaaccacatgattatctcaatagatgaagaaaaggcctttcagaaaattcaaaagcgcttcatgctaaaaactctcaataaattaagtattgatgggacatatctcaaaataataagagcgatctatgacaaacccacagccaatatcatactgaatgggcaaaaactggaagcattccctttgaaaaaatggcacaagacagggatgtcctctctcaccagtcctattcaacatagtgttggaagttctggccagggcaatcagctgataagctgcttcagcaaagtctcaggatacaaaatcaatgtacaaaaatcacaagcattcttatacaccaacaacaggcaaacagagagccaaatcatgagtgaactcccattcacaattgcttcaaagagaataaaatacctaggaatccaacttacaagggatgtgaaggacctcttcaaggagaactacaaaccactgttcaatgaaataaaagaggacacaaacaaatggaagagcattccatgctcacgggtaggaagaatcaatattgtgaaaacggccatactgcccaaggtaatttatagattcaatgccatccccatcaagctaccaatgactttcttcacagaattggaaaaaactactttaaagttcatatggaaccaaaaaagagcctgcattgtcaagacaatcctaagcaaaaagaacaaagctggaggcatcacactacctgacttcaaacgatactacaaggctacagtaaccaaaacagcatgtcattccatgagcttggaaagacccagctggctaccagaacaactgtttccaccttccaacaaatccctggcatctaagttcagttgcgctttgacttctccagagatatcacacttctcagtctcctttgcagataggtgggaccatgtgagtgggttctacacagtggaatgtgggcagatgccatatataccccttccaggcttgtcccgtaggcttctggcagaatgcttcatgacttctctcttcccttgcctgcaggctgaaagcaaagggcccagtggaggatggcaaagcctcataagacagaaaagccacaccacagaaaagcctgggaccctgaatgactgtgtgaaccagagagtcttgaaagccattcccataactgtacttaactga

SEQ ID NO: 9120 - DNA, 2034 bp, Homo sapiens
  SIMILAR (16)..(2031): 701254mologous to Homo sapiens putative p150,accession number U93563,Smith-Waterman Score=2254.
atggaagatgaaatgaatgaaatgaagcgagaagggaagtttagagaaaaaagaataaaaagaaatgagcaaagcctccaagaaatatgggactatgtgaaaagaccaaatctacatctgattggtgtacctgaaagtgatgtggagaatggaaccaagttggaaaacactctgcaggatattatccaggagaacttccccaatctagcaaggcaggccaacgttcagattcaggaaatacagagaacgccacaaagatactcctcgagaagagcaactccaagacacataattgtcagattcaccaaagttgaaatgaaggaaaaaatgttaagggcagccagagagaaagggcactgtaactctggcaaaagtcacagatccctttgggaacaaaacaagggaatatttaccacatgtatttgtgatgatgccgaggacttacagtctccttcaactgctggaccctggtttggggttctttataccaaaggtggaccctaccctcaggaagacatattcagtgaagaagttcatacaggccctaagttgaggaagaaaattcaagagtaccagttaacaagcaaatggtcaaaaagtgatgttcaggtttctgtggagaggagaatggctggaggaaatccaaaccagtgccatattggggaagttctcctggatggattcacagctgaattctaccggaggtacaaggaggaactggtaccattccttctgaaactattccaatcaatagaaaaagagggaatcctccctaactcattttatgaggccagcatcattctgatacaaaagccaggcagagacacaacaaaaaaagagaattttagaccaatatccttgatgaacattgatgcaaaaatcctcaataaaatactggcaaaacgaatccagcagcacatcgaaaagcttatccaccatgatcaagtgggcttcatccctgtgatgcaaggctggttcaatatatgcaaatcaataaatgtaatccagcatataaacagagccaaagacaaaaaccacatgattatctcaatagatgcagaaaaagcctttgataaaattcaacaacccttcatgctaaaaactctcaataaattaggtattgatgggatgtatttcaaaataataagagctatctatgacaaacctacagccaatatcatactgaatgggcaaaaactggcagcattccctttgaaaactggcacaagacagggatgccctctctcaccactcctattcaacatagtgttggaagtcctggccagggcaatcaggcaggagaaggaaataaagggtattcaattaggaaaagaggaagtcaaattgtccctgtttgcagatgacatgatcgtatatctagaaaaccccattgtctcagcccaaaatctccttaagctgataagcaacttcagcaaagtctcaggatacaaaatcaatgtacaaaaatcacaagcattcttatacaccaataacagacaaacagagagccaaatcatgagtgaactcccattcacaagtgcttcaaagagaataaaatacctaggaatccaacttacaagggatgtgaaggacctcttcaaggagaactacaaaccactgctcaaggaaataaaagaggatacaaacaaatggaagaacattccatgctcatgggtaggaagaatcaatatcgtgaaaatggccatactgcccaaggtaatttatagattcaatgccatccccatcaagctaccaatgcctttcttcacagaattggaaaaaactactttaaagttcatatggaaccaaaaaagagccctcatcaccaagttaatcctaagccaaaagaacaaagctggaggcatcacactacctgactttaaactatactacaaggctacagtaaccaaaacagcatggtactggtaccaaaacagagataaagatcaatggaacagaacagagccctcagaaataacgccgcatatctacaattatctgatctttgacaaacctgagaaaaacaagcaatag

SEQ ID NO: 9121 - DNA, 2088 bp, Homo sapiens; identical to SEQ ID NO: 8970
  SIMILAR (1)..(858): 791254mologous to Homo sapiens putative p150,accession number U93569,Smith-Waterman Score=1119.

SEQ ID NO: 9122 - DNA, 1870 bp, Homo sapiens
  SIMILAR (1)..(1665): 961254mologous to Homo sapiens putative p150,accession number U93563,Smith-Waterman Score=2751.
atgaaggcagaaataaagatgttctttgaaaccaacgagaacaaagacacaacataccagaatctctgggacacattcaaagcagtgtgtagagggaaatttatagcactaaatgctcacaaaagaaagcaggaaagatccaaaattgacacgctaacatcaccattaaaagaactagaaaagcaagagcaaacacattcaaaagctagcagaaggcaagaaataactaaaatcagagcagaactgaaggaaatagagacacaaaaaacccttcaaaaaattaatgaatccaggagctggatttttgaaagcatcaacaaaattgatagaccgctagcaagactaataaagaaaaaaagagagaagaatcaaatagacgcaataaaaaatgataaaggggatatcatcaccgatcccacagaaatacaaactaccatcagagaatactacaaacatctctacgcaaataaactagaaaatctagaagaaatggataaattcctggacacatacactctcccaagactaaacaaggaagaagttgaatctctgaatagaccaataacaggagctgaaattgtggcaataatcaatagcttaccaacaaaaaagagtccaggaccagatggattcacagccgaattctaccagaggtacaaggaggaactggtaccattccttctgaaactattccaatcaatagaaaaagacggaatcctccctaactcattttatgaggccagcatcattctgataccaaagccaggcagagacacaacaaaaaaagagaattttagaccaatatccttgatgaacattgatgcaaaaatcctcaataaaatactggcaaaccgaatccagcagcacatcaaaaagcttatccaccatgatcaagtgggcttcatccctgggatgcaaggctggttcaatatacgcaaatcgataaatgtaatccagcatataaacagagccaaagacaaaaaccacatgattatctcaatagatgcagaaaaggcctttgacaaaattcaacaacccttcatgctaaaaactctcaataaattaggtattgatgggacgtatttcaaaataataagagctatctatgacaaacccacagccagtgtcatactgaatggacaaaaactggaagcattccctttgaaaactggcacaagacagggatgccctctctcaccactcctattcaacagagtgttggaagttctggccagggcaattaggcaggagaaggaaataaagggtattcaattaggaaaagaggaagtcaaattgtccctgtttgcagatgacatgattgtatatctagaaaaccccatcatctcagcccaaaatctccttaagctgataagcaacttcagcaaagtctcaggatacaaaataaatgtgcaaaaatcacaagcattcttatacaccaacaacagacaaacagagagccaaatcatgagtgaactcccattcacaattgcttcaaagagaataaaatacctaggaatccaacttacaagggatgtgaaggacctcttcaaggagaactacaaaccactgctcaaggaaataaaagaggatgcaaacaaatggaagaacattccatgctcatgggtaggaagaatcaatatcgtgaaaatgaccatactgcccaagtctgagaaggtttcagtatgcccctcccttggtgcccacgtgattttcaagccatacaaggactggcctgtatgtgccagaactctcaccccagctcgatcacctaatctcattaaaaacagggcctgtcacccttctctgctctccaagctatttttggatcagcttataatcctgtcctattctccccagaaagcctcattat

SEQ ID NO: 9123 - DNA, 1413 bp, Homo sapiens
  SIMILAR (640)..(894): 801254mologous to Homo sapiens NAG13,accession number AF194537,Smith-Waterman Score=356.
atgtccctccgcctcttaatcggagcctggggaaacaaacacactcgtgcaaaatctccaaagaggtgtcctccttcagcaaaagtccttgaaagaaccatacgagtgccatttaacaatgccctcgccggtccccccccgccctcaggggtagggtggaatgcacaagatcggtctgcaaccagccagcagccagcaggcacttggggccacagagctgatgcgggttctgaccctcatagagcttacaggcctgagaaggcagcatcacagcaccaggagacagtattccacaggcccctgtttggcaggaagaacgttctcttcgcaaccatggctgtacagactggcttcagcttcctgcagattttctccatcagctgggagatgttcactgtgttatttgtcatcgtgggcatgggccagatctccaactatgtggtagccttcatactagattattacttcttatccattggtctggtcatgctgggaaaatttgggatcacctctgctttctccatgctgtatgtcttcactgctgagctctacccaaccctggtcaggaacatggcggtgggggtcacatccacggcctccagagtgggcagcatcattgccccctactttgtttacctcgaaatacaaactaccatcagagaatactataaacacctctacacaaataaactagaaaatctagaagaaatggataaattcctggacacatacagcctcccaagactaaaccaggaagaagttgaatctctgattagaccaataacaggctctgaaattgaggcagtagttaatagcccaccaaccaaaaacagtccaggaccagacagattcacagccaaattctaccagaggtacagaggagctgggctccctagctcccctcctacatccctacaccctccttcccatccagtctttccagaagtgtggtccctcccattccctaggacggggctccaaaactggctctgcgtatcccagcagctcagctctcagaagggttacagtatccgaagtagtctgcttattcgcagaagcacagttgttctgaatactgagatccgaaagaagtgtctcctatgtacttcttccacaaaggagccactctgtgatgctgaggataatgtcctcgagaatagtcctgtcctagagacaatagcaagattcatgaggccgcctgtcacagtgctcaaatgctggccacaggcaacgcccaacacagctctgcagaagaaaaacaactcgggccaggaagttagcgctctgctgctcaggcacaatccaaggataaatctcagactgtacccagagcaggattgcctcgcctggggctcttgcatgggcttcaggagaaagggaaatgaatcctctaaaactgtatggccagattaa

SEQ ID NO: 9124 - DNA, 3999 bp, Homo sapiens
  SIMILAR (925)..(3435): 941254mologous to Homo sapiens putative p150,accession number U93569,Smith-Waterman Score=4075.
atggcatttgtccctcccattatgggaggatgcaccaagaggtgccatcttggaagcagagagcacccctcaccagatgccaaatctgccagcaccttgatcttggacttcacagtctccagaactccattttacaagaaaaaaatactgaagcacaaaaaggctaagcaacctgactcaaatcagacatctagtaaattggtagaactgggtatcaaaggaccaccagctccagaactgaagttctttaccacagccgtaaagtgcataaaccgggacagcattgggtctcttccaatgcctgctgttaccactacctggctaccactacgtttgctcaagcccttgggctccataatcggcaggtggcaaagccagccaggcttgtatccttcccttcaggatgacaagttcccccagactgtagatagctccagaggtgccatccaggggccagggtctggagtcaaacactttaactgcttggtgttctattgtactgcagctgagctggaactgaaaccacatgcccatgagaagtacttccagtctactggtgatgtttacttaaggcccaagggctcttcagttggcttgtggtcaaaggaaggctccttgcagacacctgagctttgtagaaaatctggccaggcagctgggccttcccatggattgtgtctcctgcagtactatggtgatggccagcctcttcagtgtgagccagaccttgatttcatgcgagaaggtggagtaggaggaagagaaggaggagagttagaaggagtaggaggaggaggaaaacctcctgatgctgtagagcttctgagagggctatgtaccaaaaaggtccgtgctcagaataaagaagatgcgatgtgtgtgacacttgtggctggaggtcaaaccaggaagacagacaccacagtgtctagagggaaatttatagcactaaatgtccacaagagaaagcaggaaagatccaaaattgacaccctaacatcacaattaaaagaactagaaaagcaagaacaaacacaatcaaaagctagcagaaggcaagagataactaaaatcagagcagaactgaaggaaatagagacacaaaaaacccttcaaaaaattaatgaatccaggagctggttttttgaaaggatcaacaaaattgatagaccgctagcaagactaataaagaagaaaagaaagaagaatcaaaaagatgcaataaaaaatgataaaggggatatcaccaccgctcccacagaaatacaaactgccatcagagaatactacaaagacctctacgcaaataaactagaaaatctagaagaaatggataaattcctcgacacatacgctctcccaagactaaaccaggaagaggttgaatctctgaatagaccaataacaggagctggaattgtggcaataatcaatagcttacaaaccaaaaagagtccagaaccagatggattcacagccgaattctaccagaggtacaaggaggaactggtgccattccttctgaaactattccaatcaatagaaaaagagggaatcctccctaactcatttgatgaggccagcatcatcctgataccaaagccaggcagagacacaaccaaaaaagagaattttagaccaatatccttgattaacattgatgcaaaaatcctcaataaaatactggcaaaccaaattcagcagcacatcaaaaagcttatccaccatgatcaagtgggcttcatccctccgatgcaaggctggttcaatatacgcaaatcaataaatgtaatccagcatataaacagaaccaaagacaaaaaccacatgattatctcaatagatgcagaaaaggcctttgacataattcaacaacccttcatgctaaaaactctcaataaattaggtattgatgggaagtatctcaaaataataagagctatctatgacaaacccacagccaatatcatattgaatgggcaaaaactggaagcattccctttgaaaactggcacaagacagggatgccctctctcaccactcctattcaacatagtgttggaagttctgggcagggcaattaggcaggagaaggaaataaagggtattcagttaggaaaagaggaagtcaaattgtccctgtttgcagacgacatgattgtatatctagaaaaccccattgtctcagcccaaaatctccttaagctgataagcaacttcagcaaagtctcagaatacaaaatcaacgtacaaaaatcacaaggattcttatacaccaacaacagacaaacagagagccaaatcgtgagtgaactcccattcacaattgcttcaaagagaataaaatacctaggaatccaacttacaagggacgtgaaggacctcttcaaggagaactacaaaccactgctcaaggaaataaaagaggatacaaacaaatggaagaacattcaatgctcatgggtaggaagaatcagtatcatgaaaatggccatactgcccaaggtaatttacagattcaatgccatccccatcaaactaccagtaactttcttcacagaattggaaaaaacgactttaaagttcatacggaaccaaaaaagagcccgcatcgccaagtcaatcctaagccaaaagaacaaagctggaggcatcacactacctgacttcaaactatactacaaggctacagtaaccaaaacagcatggtactggtaccaaaacagagatatagatcaatggaacagaacagagccctcagaaataatgccgcatatctacaactatctgatctttgacaaacctgagaaaaacaagcaatggggaaaggattccctatttaataaatggtgctgggaaaactggctagccatatgtagaaagctgaaactggatcccttccttacaccttatacaaaaatcaattcaagatggattaaagacttaaacgttagatctaaaaccataaaaaccctagaagaaaacctaggcattaccattcaggacataggcatgggcaaggacttcatgtctaaaacaccaaaagcaatggcaacaaaagccaaaactgacaaatgggatctcattaaactaaagagcttctgcacagcaaaagaaactaccatcagagtgaacaggcaacctacaaaatgggagaaaattttcacaacctactcatctgacaaagggctaatatccagaatctacaatgaactcaaacaaatttacaagaaaaaaacaaacaaccccatcaaaaagtgggcgaaggacatgaacagacacttctcaaaagaagacatttatgcagccaaaaaacacatgaaaaaatgctcaccatcactggccatcagagaaatgcaaatcaaaaccacaatgagataccatctcacaccagttagaatggcaatcattcaaaagtcaggaaacaacagttgggagcatccaatcacactcatctctgaggttagaacaatttaccttgtggaaatccccttcgtcattgaagatgaatcttgctcagctaactacttcccagctgctgggcagcaggaatattcagggccaccattaagcctacccctcagcaaaatctccccatggctgaaggccaggcagttcaacaggaatcctacggagcaaccactgcaaagctcactgagtggacttccaggcattttcacacccacaggaaaaattgcaagaacccataaagccatgctgaggagtataggacgtcaggcacagattgtgaaggtcaaacaaataagtctgatgggttggacacaggcctcaagccgccaagtttgtaacctcggcactgtagcattgcctgcaaatgaggtgttagcacaggaccccgttcatgctaagggcaccgcaaagttctccaaccaagcacgcaccaagagcgggaccacgttaactctacccagcctccatctccctcctcaggtcatcatttccacagtggaacttaaccttgctatctttagaaagtaa

SEQ ID NO: 9125 - DNA, 3033 bp, Homo sapiens; identical to SEQ ID NO: 3983
  SIMILAR (712)..(2907): 941254mologous to Homo sapiens putative p150,accession number U93563,Smith-Waterman Score=3584.

SEQ ID NO: 9126 - DNA, 2253 bp, Homo sapiens
  SIMILAR (172)..(1989): 941254mologous to Homo sapiens putative p150,accession number U93563,Smith-Waterman Score=3005.
atgggtaaattcctcgacacacacaccctcgcaagactaaaccaggaagaaattgaatctctgaatagaccaataacaggctctgaaattgtggcaataatcaataccttaccaaccaaaaagagtccaggaccagatggattcacagccaaattctaccagagccgggcagagacacaaccaaaaaagaactttagaccaatatccttgatgaacattgatgcaaaaatcctcaataaaatactggcaaaccaaatccagcagcacatcaaaaagcttatccaccatgatcaagtgggcttcatccctgggatgcaaggctggttcaatatatgcaaatcaataaatgtaatccagcatataaacagaaccaaagacaaaaaccacatgattatctcaatagatgcagaaaaggcctttgacaaaattcaacaacccttcatgctaaaaactctcaataaattaggtactgatgggacatatctcaaaataataagagctatctatgacaaacccacagccaatatcatactgaatgggcaaaaactggaagcattccctttgaaaactggcacaagacagggatgccctctctcaccactcctattcaacataatgttggaagttctggccagggcaattagtcaggagaaggaaataaagggtattcaattaggaaaagaggaagtcaaattgtccctgtttgcagatgacatgattgtatatctagacaaccctgttgtctcagcccaaaatctccttaagctaataagcaacttcagcaaagtctcaggatacaaaatcaatgtacaaaaatcacaagcattcttatataccaataacagacaaacagagagccaaatcatgagggaactcccattcacaattgcttcaaagagaataaaatacctaggaatccaacttacaagggacgtgaaggacctcttcaaggagaactacgaaccactgctcaatgaaataaaagaggatacaaacaaatggaagaatgttccgtgctcatgggtaggaagaatcaatatcgtgaaaatggccatagtgcccaaggtaatttatagattcaatgtcatccccatcctgctaccaatgactttcttcacagaattggaaaaaactactttaaagttcatatggaaccaaaaaagagcccgcatcgccaagtcaatcctaagccaaaagaacaaagctggaggcatcacgctacctgacttcaaactatactacaaggctacagtaacaaaaacagcatggtactggtaccaaaacagagatatatatcaatggaacagaacacagccctcagaaataacgccacatatctacacctatctgatctttgacaaacctgagaaaaacaagcaatggggaaaggattctctatttaataaatggtgctgggaaaactggctagccatatgtagaaagctgaaactggatcccttccttacaccttatacaaaaattaattcaagatggattaaagacttaaacgttattcctaaaaccataaaaaccctagaagaaaacctaggcatcaccattcaggacataggcatgggccaggacttcatgtctaaaacaccaaaagcaatggcaacaaaagccaaaattgacaaatgggatctcattaaactaaagagcttctgcacagcaaaagaaactaccatcagagtgaacaggcaacctacaaaatgggagaaaatttttgcaacctactcatctgacaaagggctaatatccagaatgtacaatgaacttaaacaaatttacaagaaaaaaacaaacaactccatcaaaaagtgggcgaaggatatgaacagacacttctcaaaagaagacatttatgcagccaaaaaacacatgaaaaaatgctcaccatcactggccatcagagaaatgcaaatcaaaaccacaatgagataccatctcacaccagttagaatggtgatcattaaaaagtcaggaaacaacagcctgggtgacaaggcgagaccctgtctgaaaaaaagaaaagaaaagaaaatgtttctaacagtgggcacaaaaagcctagaagaaaaggcagaggggattcggggaacttcaagcagcttagtgaaggaatatcttaaagtgtcaaagatacttcctgccctcgaatattggactccaagttcttcagttttggaacttggactggctctccttgctcctcagcctgcagatggtcgattgtgggaccttgtgatcctgtaa

SEQ ID NO: 9127 - DNA, 2385 bp, Homo sapiens
  SIMILAR (532)..(2244): 941254mologous to Homo sapiens putative p150,accession number U93574,Smith-Waterman Score=2805.
atggtggcctccagatcctctagagtcggtgtcttctatggaggtcaaaacagcgtggatggcgtctccaggcgatctgacggttcactaaacgagctctgcttatatagacctcccaccggggcgtacttggcatatgatacacttgatgtactgccaagtgggcagtttaccgtaaatactccacccattgacgtcaatggaaagtccctattggcgttactatgggaacatacgtcattattgacgtcaatgggcgggggtcgttgggcgatgcagccacttggccagctgggtcagctcgaacacctcggagaccggcgcgatcaggtcctcgaccgaagtggacgctcccgacgactcgatgctgctcagcacctgcgacatcgacctgaccgccgcccgcagggcatggttggggtgcttaccaaccaaaaagagcccaggaccagatggattcacagcagaattctaccagaggtgcaaggaggaactggtaccgttccttctgaaactattccaatcgatagaaaagagggaatccttcctaacttatttgatgaggccagcatcatcctgataccaaagcggggcagagacaccaccaaaaaagagaattttagaccaatatccttgatgaacattgatgcaaaaatcctcaataaaatactggcaaaccgaaaccagcagcacatcaaaaagcttatccaccatgatcaagtgggtttcatccctgggatgcaaggctggttcaatatatgcaaatcaataaatgtaatccagcatataaacagaaccaaagacaaaaaccacatgattatctcaatagatgcagaaaaggcctttgacaaaattcaacaacccttcatgctaaaaactcttaataaattaggtattgatgggacgtatctcaaaataataagagctatctatgacaaacccacagccaatatcatactgaatgggcaaaaactggaagcattccctttgaaaactggcacaagacagggatgccctctctcaccactcctattcaacatagtgttggaagttctggccagggcaatcaggcaggagaaggaaataaagggtattcaattaggaaaagaagaagtcaaattgtccctgtttgcagatgacatgattgtatatctagaaaaccccatcgtctcagcccaaaatctccttaagctaataagcaacttcagcaaagtctcagcatacaaaatcaatgtacaaaaatcacaagcattcttatacaccaataacagacaaacagagagccaaatcatgagtgtattcccattcacaattgcttcaaagagaataaaatacttaggaatccaacttgcaaggaatgcgaaggacctcttcaaggagaactacaaaccactgctcaatgaaataaaagaggatacaaagaaatggaagaacattccatgctcatgggtaggaagaatcaatatcgtgaaaatggccatactgcccaaggtaatttacagattcaatgccatccccatcaagctaccaatgactttcttcacagaattggaaaaaactactttaaagttcatatggaaccaaaaaagagcccgcatcgccaagtcaatcctaagccaaaagaacaaagctggaggcatcacgctacctgacttcaaactacactacaagattacagtaaccaaaacagcatggtactggtaccaaaacagagatatagatcaatggaacagaacagagccctcagaaataacgccgcatatctacaactatctgatctttgacaaacctgagaaaaacaagcaatggggaaaggattccctatttaataaatggtgctgggaaaactggctagccatatgtagaaagctgaaactggatcccttccttacaccttatacaaaaattcatccaagatggattaaagacttaaacgttagacctaaaaccataaaaaccctagaagaaaacctaggcaataccattcaggacataggcatgggcaaggacttcatgtctaaaacaccaaaagcaatggcagcaaaagccaaaattgacaaatgggatctaattcaactaaagagcttctgcacagcaaaagaaactaccatcagagtgaacaggcaacctacaaaatgggagaaaattttcgcaacctactcatctgacaaagggctaatatccagaatctacaaagaactcaaacaaatttacaagaaaaaaaacaaacaaccccatcaaaaagtgggcgaaggacatgaacagacacttctcaaaagaagacatttatgcagccaacaaacacatgaaaaaatgctcaccatcactggccatcagagaaatgcaaatcaaaaccactatgagataccatctcacaccagttag

SEQ ID NO: 9128 - DNA, 2232 bp, Homo sapiens; identical to SEQ ID NO: 2163
  SIMILAR (1964)..(2035): 881254mologous to Homo sapiens putative p150,accession number U93572,Smith-Waterman Score=105.

SEQ ID NO: 9129 - DNA, 2667 bp, Homo sapiens
  SIMILAR (340)..(2595): 931254mologous to Homo sapiens putative p150,accession number U93572,Smith-Waterman Score=3717.
atgaatgaaatgaagcgagaagagaagtttagagaaaaaagaataaaaagaaacgaacaaagcctccaagaaatatgggactatgtgaaaagaccaaatctatgtctgattggtgtacctgaaagtgacggggagaatggaaccaagttggaaaacactctgcaggatattatccaggagaacttccccaatctagcaaggcaggccgacattcaaattcaggaaatacagagaacaccacaaagatactcctcgagaagagcaactccaagacacataattgtcagagtcaccaaagttgaaatgaaggaagaaatgttaagggcagccagagagaaagaaatacaaactaccatcagagaatactataaacacctctatgcaaataaactagaaagtctagaagaaatggataaattcctcaacacatacacctttccaagactaaaccacgtagaagttgaatctctgaatagaccaataacaggctctgaaattgaggcaataattaatagcttaccaacaaaaaaaagtccaggaccagatggattcacagccgaattctaccagaggtacaaggaggagcaggtaccattcattctgaaactattccaatcaatagaaaaagagggaatcctccctaactcattttatgaggccagcatcatcctgataccaaagccgggcagagacacaaccaaaaaagagaattttagaccaatatctttgatgaatattgacgcaaaaatcctcaataaaatactggcaaaccgaatccaggaacacatcaaaaagcttatccaccatgatcaagtgggcttcatccctgggatgcaaagctggttcaacatacaaaaatcaataaatgtaatccagcatataaacagaaccaaagacaaaaaccgcatgattatctcaatagatgcagaaaaggcctttgacaaaattcaacaacccttcatgctaaaaactctcaataaattaggtattgatgggacgtatctcaaaatagtaagagctatctatgacaaacccacagccaatatcatactgaatgggcaaaaactggaagcattccctttgaaaactggcacaagacagggatgccctctctcaccactcctattcaacatagtgttggaagttctggccagggcaattaggcaggagaaggaaataaagggtattcaattaggaaaagaggaagtcaaattgtccctgtttgcagatgacatgactctgtatctagaaaaccccattgtctcagcccaaaatctccttaagctgataagcaacttcagcaacatctcaggatacaaaattaatgtacaaaaatcacaagcattcttatacaccaacaacagacaaacagagagacaaatcatgagtgaattcccattcacaattgcttcaaagggaataaaatacctaggaatccaacttacaaggtatgtgaaggacctcttcaagaagaactacaaaccactgctcaatgaaataaaagaggatacaaacaaatggagtaacattccatgctcatgggtaggaagaatcaatattgtgaaaatggccatactgcccaaggtaatttacagattcaatgccatccccatcaagctaccaatgactttcttcacagaattggaaaaaactactttaaagttcatatggaaccaaaaaagagcccgcatcaccaagtcaatcctaagccaaaagaacaaagctggaggcatcacactacctgacttcaaactatactacaaggctacagtaaccaaaacagcatggtactggtaccaaaacagagatatagatcaatggaacagaacagagacctcagaaataatgccacgtatctacaactatctgatctttgacaaacctgagaaaaacaagccatggggaaaggattccctatttaataaatggtgctgggaaaactggctagccatatgtagaaagctgaaactggatccctttcttacacgttatacaaaaattaattcaagatggattaaacacttacatgttagacctaaaaccataaaaaccctagaagaaaacctaggcattaccattcagggcataggcatgggcaaggacttcatgtctaaaacaccaaaagcaatggaaacaaaagccaaaattgacaaatgggatctaattaaactaaagagcttctgcacagcaaaagaaactaccatcagagtgaacaggcaacctacaaaatgggagaaaatttttgcaagctactcatctgacaaagggctaatatccagaatctacaatgaactgagacaaatttacaagaaaaaatcaaacaaccccatcaaaaagtgggtgaaggatatgaacagacacttctcaaaagaagacatttatgcagctaaaaaacacatgaaaaaatgctcatcatcactggccatcagagaaatgcaaatcaaaaccacaatgagataccatctcacaccagttagaatggcgatcattaaaaagtcaggaaacgacaggtgctgtagaggatgtggagaaataggaacacttttacactgttggtgggactgtaaactagttcaaccattgtggaagtcgctgtgccaagcaggatctagaatattctttgtcagtgaagtagaagctgttgaagtaacttctgcaataggacag

SEQ ID NO: 9130 - DNA, 3033 bp, Homo sapiens
  SIMILAR (520)..(2688): 931254mologous to Homo sapiens putative p150,accession number U93574,Smith-Waterman Score=3522.
atggctgacatgctaacatgggaatcctgtcttgaggagtcactccaagaggagtcaccattggtcactcactgtggccccagctgctgcatctctggacagtcgcctccaagctcagctcgtccatcctcagtgtccagtgcaatctctgtgttgatgctgcctcagaacaggaagctgcctcctgcctggacgtctcctggaatcttccccacagatctggtggtttactccatgtcacttcctcatgcccttgccagatataactgtgatgtatgtaaaagcatgctgcctccaagattgtatgctcctgaggaaaaagctcgtacctctccactttgtggaacctggtactcaccttcactaccactttgtggagcctggtgcaagaagaatgagaagaagagggaaagagagagagagagaaagagacagagagaggatatactttctggtgcctcttcgtataaggacactattcatattcaattaagacccccaccttatgacgtccttcaacaaatacaaactaccatcagagaatacttcaaacacctctatgcaaataaactagaaaatctagaagaaatggataaactcctcgacacatacaccctcccaagactaaaccaggaagaagttgaatctctgaatagactaataacaggctctgaaattgtggcaataatcaacagcttaccaaccaaaaagagtccaagaccagatggattcacagctgaattctaccagaggtacaaggaggaactggtaccattccttctgaaactattccaatcaatagaaaaagggggactcctccctaactcattttatgaggccagcatcatcctgatgccaaagctgggcagagacacaaccaaaaaagagaattttagaccgatatccctgatgaacattgatgcaaaaatcctcaataaaatactggcaaaccaaatccagcagcacatcaaaaagcttatccagcatgatcaagtgggcttcatccctgggatgcaaggctggttcaatatttgcaaatcaataaatgtaatccagcatataaacagaaccaaagacaaaaaccacatgactatctcaatagatgcaggaaaagcctttgacaaaattcaacaactcttcatgctaaaaactctcaataaattaggtattgatgggacgtatctcaaaataataagagctatctatgacaaacccacagccaatatcattctgaatggggaaaaactggaagcattccctttgaaaactggcacaagacagggatgccctctctcaccactcctattcaacatagtgttggaagttctggccagggcaattaggcaggagaaggaaataaagggtattcgattacgaaaagaggaagtcaaattgtccctgtttgcagatgacatgattgtatatctagaaaaccccatcatctcagcccaaaatctccttaagctgataagcaacttcagcaaaatctcaggatacaaaatcaatgtacaaaaatcacaagcattcttatacaccaacaacagacaaacagagagccaaatcatgagtgaactcctattcacaattgcttcaaagagaataaaatacctaagaatccaacttactaaggacgtgaaggacctcttcaagaagaactacaaaccactgctcaatgaaataaaagaggatacaaagaaatggaagaacattccatgctcatgggtaggaagaatcaatatcgtgaaaatggccatacggcccaaggtaatttatagattcaatgccatccccatcaagctaccaatgactttcttcacagaattggaaaaaactactttcaagttcatatggaaccaaaaaagagcccgcatcgccaagtcaatcctaagccaaaagaacaaagctggaggcatcacactacctgacttcaaactatactacaaggctacagtaaccaaaacagcatggtactggtaccaaaacaaagatatagatcaatggaacagaacagagccctcagaaataatgccgcatatctacaactatctgatctttgacaaacctgacaaaaacaagcaatggggaaaggattccctatttaataaatggggctgggaaaactggctagccatatgtagaaagctgaaactggatcccttccttacaccttatacaaaaattaattcaagatggattaaagatttaaacgttagacctaaaaccataaaaaccctagaaaaaaacctaggcattaccattcaggacataggcatgggcaaggacttcatgtctaaaacaccaaaagcaatggcaacaaaagccaaaattgacaaatgggatctaattaaactaaagagcttctgcacagcaaaagaaactaccatcagagtgaacaggcaacctacaaaatgggagaaaatttttgcaacctactcatctgacaaagggctaatatccagaatctacaatgaactcaaacaaatttacaagaaaaaaacaaacaaccccatcaaaaagtgggtgaaggacatgaacagacacttctcaaaagaagacatttgtgcagccaaaaaacacatgaaaaaatgctcatcatcactggccatcagagaaatgcaaatcaaaaccacaatgagatatcatctcacaccagttagaatggcaatcattaaaaagtcaggaaacaacagcactattcacagtagcaaagacatggattcaacccaaatgtgcatcaatgatacactgtatgaagaaagtgtagaacatatacaccatgaaatacaatccagccataaaaaaggagttcacatcctttgcagcaatatggatggagctgaaagccactttcctaagcaaactaatgcaagaacagaaagccaaatactgcatgttctcacttggctttcttttaacccaccagttacaattactaaagttcatgaaaatgtctaccagccaagtaccactcgtaacactgaaacaacgcagggagtcccaagaaccagggaagaccaagaagcatatttataa

SEQ ID NO: 9131 - DNA, 1238 bp, Homo sapiens
  SIMILAR (1)..(516): 1001254mologous to Escherichia coli Formate dehydrogenase a chain (EC 1.2.1.2),accession number D90792,Smith-Waterman Score= 878.
atgcaagcaatatgtacggggcaggctcgagcattgatctgcatggggggcaattttgcgctggcaatgccagatcgggaagcgagcgctgtaccgttaacgcaattagatttggcggtacacgtagccactaagcttaaccgctctcatctgttgaccgcacggcatagctatattctgccggtcctgggacgtagcgagattgacatgcaaaaaaacggtgcgcaggcggtaaccgttgaggattcaatgtcgatgattcatgcctcgcgtggcgtgttaaaacccgccggtgtaatgctgaaatcagagtgtgcagtggtcgcgggaatcgcgcaggcagcactaccccagagcgtggtagcctgggagtatctggtggaagattatgatcgcattcgcaatgacattgaagctgtgctgccagagttcgccgactataaccagcgcatccgtcatcccggtggttttcacctgataaatgcagctgctgaaaggcgctggatgacgccgtcagaaatacaaactaccatcagagaatacttataaacacctctacacaaataaacttagaaaatctagaagaaatggataaattcctggacacatacagcctcccaagactaaaccaggaagaagttgaatctctgattagaccaataacaggctctgaaattgaggcagtagttaatagcccaccaaccaaaaacagtccaggaccagacagattcacagccaaattctaccagaggtacagaggagctggtaccattctttctgaaactattcctagcagcagtgcccgcaccaagcagtcatgggcctttctgctgttcaaggaaagcactacggggctccaaaactggctctgcgtatcccagcagctcagctctcagaagggttacagtatccgaagtagtctgcttattcgcagaagcacagttgttctgaatactgagatccgaaagaagtgtctcctatgtacttcttccacaaaggagccactctgtgatgctgaggataatgtcctcgagaatagtcctgtcctagagacaatagcaagattcatgaggccgcctgtcacagtgctcaaatgctggccacaggcaacgcccaacacagctttgcagaagaaaaacaactcgggccaggaagttagcgctctgctgctcaagcacaatgactgcttctgcagtcactctagagatacccaaactggaaactacttatctacctga

SEQ ID NO: 9132 - DNA, 3472 bp, Homo sapiens
  SIMILAR (1019)..(3325): 971254mologous to Homo sapiens putative p150,accession number U93563,Smith-Waterman Score=3935.
atggcttcggtctcctctgcgaccttctcgggccacggggctcggtccctactgcagttcctgcggctggtagggcagctcaagagagtcccacgaactggctgggtatacagaaatgtccagaggccggagagcgtttcagatcacatgtaccggatggcagttatggctatggtgatcaaagatgaccgtcttaacaaagaccgatgtgtacgcctagccctggttcatgatatggcagaatgcatcgttggggacatagcaccagcagataacatccccaaagaagaaaaacataggcgagaagaggggaataaatgtcataagcagaaggcaatggggaaacatcttaaagaaccacatgttcttggacaagaaaccaaaggcttggagagcactgatgttctattgcctcttcctgctgctggtcaggatttgggaagagagaagaaaatcagggaggaagctatgaagcagataacccagctcctaccagaggacctcagaaaggagctctatgaactttgggaagacctagaatttgaatctccatcctgcttggactccttgtccctctgttgctctttgaaaccccagtctgagtcctctcctgtcctaccagaaggctgcgaaacactgattcagagactctgtgccgtggggactggggtcacagccgccctggccaccaggctctgcagagcctcagggctgccagcaccccatcagtgggcctcggaattacaaaggagcaggaaaaaggaagaggaagagggcaaaacctcaaaagacttccaatgtttcaagaaaatgttggactttgttgtgcgccactatcaagctttttccaaatttggtttccaaattactacggcaaagagaaagcaggaaagatccaaaattgacaccctaacatcacaattaaaagaactagaaaagcaagagcaaacacattcaaaagctagcagaaggcaagaaataactaaaatcagagcagaactgaaggaaatagagacaaaagaaaacccttcaaaaaatcaatgaatccaggagctggttttttgaaaggatcaacaaaattgatagaccgctagcaagactaataaagagaaaaagagagaagaatcaaatagacacaataaaaaatgataaaggggatatcaccaccgatcccacagaaatacaaactaccatcagagaatactacaaacacctctacgcaaataaactagaaaatctagaagaaatggatacattcctcgacacatacactctcccaagactaaaccaggaagaagttgaatctctgaatagaccaataacaggctctgaaattgtggcaataatcaatagtttaccaaccaaaaagagtccaggaccagatggattcacagccgaattctaccagaggtacaaggaggaattggtaccattccttctgaaactattccaatcaatagaaaaagagggaatcctccctaactcattttatgaggccagcatcattctgataccaaagccgggcagagacacaaccaaaaaagagaattttagaccaatatccttgatgaacattgatgcaaaaatcctcaataaaatactggcaaaccgaatccagcagcacatcaaaaagcttatccaccatgatcaagtgggcttcatccctgggatgcaaggctggttcaatatacgcaaatcaataaatgtaatccagcatataaacagagccaaagacaaaaaccacatgattatctcaatagatgcagaaaaagcctttgacaaaattcaacaacccttcatgctaaaaactctcaataaattaggtattgatgggacgtatttcaaaataataagagctatctatgacaaacccacagccaatatcatactgaatgggcaaaaactggaagcattccctttgaaaactggcacaagacagggatgccctctctcaccgctcctattcaacatagtgttggaagttctggccagggcaatcaggcaggagaaggaaataaagggtattcaattaggaaaagaggaagtcaaattgtccctgtttgcagacgacatgattgtttatctagaaaacctcatcgtctcagcccaaaatctccttaagctgataagcaacttcagcaaagtctcaggatacaaaatcgatgtacaaaaatcacaagcattcttatacaccaacaacagacaaacagagagccaaatcatgggtgaactcccattcacaattgcttcaaagagaataaaatacctaggaatccaacttacaagggatgtgaaggacctcttcaaggagaactacaaaccactgctcaaggaaataaaagaggacacaaacaaatggaagaacattccatgctcatgggtaggaagaatcaatatcgtgaaaatggccatactgcccaaggtaatttacagattcaatgccatccccatcaagctaccaatgactttcttcacagaattggaaaaaactactttaaagttcatatggaaccaaaaaagagcccgcattgccaagtcaatcctaagccaaaagaacaaagctggaggcatcacactacctgacttcaaactatactacaaggctacagtaaccaaaacagcatggtactggtaccaaaacagagatatagatcaatggaacagaacagagccctcagaaataatgccgcatatctacaactatctgatctttgacaaacctgagaaaaacaagcaatggggaaaggattccctatttaataaatggtgctgggaaaactggctagccatatgtagaaagctgaaactggatccctttcttacaccttatacaaaaatcaattcaagatggattaaagatttaaacgttagacctaaaaccataaaaaccctagaagaaaacctaggcattaccattcaggacataggcgtgggcaaggacttcatgtccaaaacaccaaaagcaatggcaacaaaagccaaaattgacaaatgggatctaattaaactaaagagcttctgcacagcaaaagaaactaccatgagagtgaacaggcaacctacaacatgggagaaaattttcacaacctactcatctgacaaagggctaatatccagaatctacaatgaactcaaacaaatttacaagaaaaaaacaaacaaccccatcaaaaagtgggcgaaggacatgaacagacacttctcaaaagaagacatttatgcagccaaaaaacacatgaagaaatgctcatcatcactggccatcagagaaatgcaaatcaaaaccactatgagatatcatctcacaccagtcacagtccaggtaccagggactgtggagtttcctggccaaatagcccagtctattcctgacctgttcaggtcttttgccagctctgttctgaaagtgccttgcatcactggcggaccactcataggcccaagagaggaccaaagagcaggcattttgtag

SEQ ID NO: 9133 - DNA, 3907 bp, Homo sapiens
  SIMILAR (2966)..(3694): 881254mologous to Homo sapiens putative p150,accession number U93564,Smith-Waterman Score=1102.
atggctgcctggaacctgctacttaaatcatatgcatattggggaggtctaaggaaggaagatttccactgtttagaccggaagaccctgaggacagtatcctttctggctgccctgctgtcatatgagtccatagggggcaaaggaaaactaacaaccagaaaggacatctacaccgaaaacccatctgtacatcaccatcatcaaagaccaaaagtagataaaaccacaaagatggggaaaaaacagaacagaaaaactggaaactctaaaatgcagagcgcctctcctcctccaaaggaacgcagttcctcaccagcaacagaacaaagctggatggagaatgattttgaagagctgagagaagaaggcttcagacgatcaaattactctgagctacgggaggacattcaaaccaaaggcaaagaagttgaaaactttgaaaaaaatttagaagaatgtataactagaataaccaatacagagaagtgcttaaaggagctgatggagctgaaaaccaaggctcgagaactacgtgaagaatgcagaagcctcaggagccgatgcgatcaactggaagaaagggtatcagcaatggaagatgaaatgaatgaaatgaagcgagaagggaagtttagagacaaaagaataaaaagaaatgagcaaagcctccaagaaatatgggactatgtgaaaagaccaaatctacgtctgattggtgtacctgaaagtgatgtggagaatggaaccaagttggaaaacactctgcaggatattatccaggagaacttccccagtctagcaaggcaggccaacgttcagattcaggaaatacagagaacgccacaaagatactcctcgagaagagcaactccaagacacataattgtcagattcaccaaagttgaaatgaaggaaaaaatgttaagggcagccagagagaaaggtcgggttaccctcaaaggaaagcccatcagactaacagcggatctctcggcagaaaccctacaagccagaagagagtgggggccaatattcaacattcttaaagaaaagaattttcaacccagaatttcatatccagccaaactaagcttcataagtgaaggagaaataaaatactttatagacaagcaaatgctgagagattttgtcaccaccaggcctgccctaaaagagctcctgaaggaagcgctaaacatggaaaggaacaaccggagaaagcaggaaagatccaaaattgacaccctaacatcacaattaaaagaactagaaaagcaagagcaaacacattcaaaagctagcagaaggcaagaaataactaaaatcagagcagaactgaaggaaatagagacacaaaaaacccttcaaaaaatcaatgaatccaggagctggttttttgaaaggatcaacaaaattgatagaccgctagcaagactaataaagaaaaaaagagagaagaatcaaatagacacaataaaaaatgataaaggggatatcaccactgatcccacagaaatacaaactaccatcagagaatactacaaacacctctacgcaaataaactagaaaatctagaagaaatggatacattcctcgacacatacactctcccaagactaaaccaggaagaagttgaatctctgaatagaccaataacaggctctgaaattgtggcaataatcaatagtttaccaaccaaaaagagtccaggaccagatggattcacagccgaattctaccagaggtacaaggaggaactggtaccattccttctgaaactattccaatcaatagaaaaagagggaatcctccctaactcattttatgaggccagcatcattctgataccaaagccgggcagagacacaaccaaaaaagagaattttagaccaatatccttgatgaacattgatgcaaaaatcctcaataaaatactggcaaaccgaatccagcagcacatcaaaaagcttatccaccatgatcaagtgggcttcatccctgggatgcaaggctggttcaatatacgcaaatcaataaatgtaatccagcatataaacagagccaaagacaaaaaccacatgattatctcaatagatgcagaaaaagcctttgacaaaattcaacaacccttcatgctaaaaactctcaataaattaggtattgatgggaagtatttcaaaataataagagctatctatgacaaacccacagccaatatcatactgaatgggcaaaaactggaagcattccctttgaaaactggcacaagacagggatgccctctctcaccgctcctattcaacatagtgttggaagttctggccagggcaatcaagcaggagaaggaaataaagggtattcagttaggaaaagaggaagtcaaattgtccgtgtttgcagacgacatgattgtttatctagaaaaccccatcgtctcagcccaaaatctccttaagctgataagcaacttcagcaaagtctcaggatacaaaatcaatgtacaaaaatcacaagcattcttatacaccaacaaccgacaaacagagagccaaatcatgagtgaactcccattcacaattgcttcaaagagaataaaatacctaggaatccaacttacaagggatgtgaaggacctcttcaaggagaactacaaaccactgctcaaggaaataaaagaggacacaaacaaatggaagaacattccatgctcatgggtaggaagaatcaatatcgtgaaaatggccatactgcccaaggtaatttacagattcaatgccatccccatcaagctaccaatgactttcttcacagaattggaaaaaactactttaaagttcatatggaaccaaaaaagagcccgcatcgccaagtcaatcctaagccaaaagaacaaagctggaggcatcacactacctgacttcaaactatactacaaggctacagtaaccaaaacagcatcggtactggtaccaaaacagagatatagatcaatggaacagaacagagccctcagaaataatgccgcatatctacactattctgatcctttggacaaacctgagaaaaacaagcatgggggaaaggcatccctaatttataaaatggctgctggggaaaactggctagcccatatgtaggaagctgaaactggatcccttccttacaccttatacaaaaatcaattcaagatggattaaagatttaaacgttagacctaaaaccataaaaaccctagaagaaaacctaggcattaccattcaggacataggcgtgggcaaggacttcatgtccaaaacaccaaaagtaatggcaacaaaagccaaaattgacaaatgggatctaattaaactcaagagcttctgcacagcaaaagaaactaccatcagagtgaacaggcaacctacaacatgggagaaaattttcgcaacctactcatctgacaaagggctaatatccagaatctacaatgaactcaaacaaatttacaagaaaaaaacaaacaaccccatcaaaaagtgggcgaaggacatgaacagacacttctcaaaagaagacatttatgcagccaaaaaacacatgaagaaatgctcatcatcactggccatcagagaaatgcaaatcaaaaccactatgagatatcatctcacaccagttagaatggcaatcattcaaaagtcaggaaacaacagggacaacacaaaggaagcactgctgtgtaacaacttggtggctgaagtcttggaggccaaacaggctcagaagcttcaaggcaaagcagccgtcctcagcctctcaaaaatctatgcgatcacagagacaaatgctgagacacccaacaggaagatgaaaattaaactgaagagacccatgaccaaattgcacccaagcatccaaatgttggtg

SEQ ID NO: 9134 - DNA, 3197 bp, Homo sapiens
  SIMILAR (414)..(2981): 981254mologous to Homo sapiens putative p150,accession number U93563,Smith-Waterman Score=4383.
ctttcccaagtttcaagatagctattcctaaaaatgatcatgggcatgaacaacatttttggggatatagagttccaaataatgccatggaagatacagcttatcaactggtccaccagtaccctacaagaatgcaggcccggagatgcaggatcgcgctgtcacagtggtcctcttcgcatcctctcccggcaaagagagatgctccggttaccagcggcgcgcatccccgcaggcgcctctcctctcgccgatacccacccaggcagtcccgacaggcgcgcctgcctacctggtggccggctgtcagcgaagcggcggtgcctcagccccttctcagctgctacagcgctcccagcgccatgttcccggtctccccgggcgcacgctggggaactactactggctggaagttctttgaaaccaacgagaacaaagacacaacataccagaatctctgggacgcattcaaagcagtgtgtagagggaaatttataccactaaatgcccacaagagaaagcaggaaagatccaaaattgacaccctaacatcacaattaaaagaactagaaaagcaagagcaaacacattcaaaagctagcagaaggcaagaaataactaaaatcagagcagaactgaaggaaatagagacacaaaaaacccttcaaaaaatcaatgaatccaggagctggttttttgaaaggatcaacaaaattgatagaccgctagcaagactaataaagaaaaaaagagagaagaatcaaatagacacaataaaaaatgataaaggggatatcaccaccaatcccacagaaatacaaactaccatcagagaatactacaaacacctctacgcaaaaaaactagaaaatctagaagaaatggatacattcctcgacacatacactctcccaagactaaaccaggaagaagttgaatctctgaatagaccaataacaggagctgaaattgtggcaatattcaatagtttaccaaccaaaaagagtccaggaccagatggattcacagccgaattctaccagaggtacaaggaggaactggtaccattccttctgaaaatattccaatcaatagaaaaagagggaatcctccctaactcattttatgaggccagcatcattctgataccaaagccaggcagagacacaaccaaaaaagagaattttagaccaatatccttgatgaacattgatgcaaaaatcctcaataaaatactggcaaaccgaatccagcagcacatcaaaaagcttatccaccatgatcaggtgggcttcatccctggaatgcaaggctggttcaatatacgcaaatcaataaatgtaatccagcatataaacagagccaaagacaaaaaccacatgattatctcaatagatgcagaaaaagcctttgacaaaattcaacaacccttcatgctaaaaactctcaataaattaggtattgatgggacgtatttcaaaataataagagctatctatgacaaacccacagccaatatcatactgaatgggcaaaaactggaagcattccctttgaaaactggcacaagacagggatgccctctctcaccgctcctattcaacatagtgttggaagttctggccagggcaatcaggcaggagaaggaaataaagggtattcaattaggaaaagaggaagtcaaattgtccctgtttgcagacgacatgattgtttatctagaaaaccccatcatctcagcccaaaatctccttaagctgataagcaacttcagcaaagtctcaggatacaaaatcaatgtacaaaaatcacaagcattcctatacaccaacaacagacaaacagagagccaaatcatgagtgaactcccattcacaattgcttcaaagagaataaaatacctaggaatccaacttacaagggatgtgaaggacctcttcaaggagaactacaaaccactgctcaaggaaataaaagaggatacaaacaaatggaagaacattccatgctcatgggtaggaagaatcaatatcgtgaaaatggccatactgcccaaggtaatttacagattcaatgccatccccatcaagctaccaatgactttcttcacagaattggaaaaaactactttaaagttcatatggaaccaaaaaagagcccgcatcgccaagtcaatcctaagccaaaagaacaaagctggaggcatcacactacctgacttcaaactatactacaaggctacagtaaccaaaacagcatggtactggtaccaaaacagagatatagatcaatggaacagaacagagccctcagaaataacgccacatacctacaactatctgatctttgacaaacctgagaaaaacaagcaatggggaaaggattccctatttaataaatggtgctgggaaaactggctagccatatgtagaaagctgaaactggatcccttccttacaccttatacaaaaatcaattcaagatggattaaagatttaaacgttagacctaaaaccataaaaaccctagaagaaaacctaggcagtaccattcaggacataggcgtgggcaaggacttcatgtccaaaacaccaaaagcaatggcaacaaaagccaaaattgacaaatgggatctaattaaactaaagagcttctgcacagcaaaagaaactaccatcagagtgaacaggcaacctacaacatgggagaaaattttcgcaacctactcatctgacaaaaggctaatatccagaatctacaatgaactcaaacaaatttacaagaaaaaaacaaacaaccccatcaaaaagtgggcgaaggacatgaacagacacttctcaaaagaagacatttatgcagccaaaaaacacatgaaaaaatgctcatcatcactggccatcagagaaatgcaaatcaaaaccactatgagatatcatctcacaccagttagaatggcaatcattaaaaagtcaggaaacaacagccagagaggcttttatgattctataaaaagccccacaaaggaatcctatgcagccataaaaaggaacgagatcatgtcctttgcaggctatggatggagctggacgctgttatccttagcaactaacacaggaacggaaaaccaaacactgcatattttcacttataagtgggagctgaacaatgagagcacatggatacatgaagggatgggg

SEQ ID NO: 9135 - DNA, 3160 bp, Homo sapiens
  SIMILAR (469)..(2130): 921254mologous to Homo sapiens putative p150,accession number U93563,Smith-Waterman Score=2586.
atggtaaagggatcaattcaacaagaggagctaactatcctaaatatttatgcacccaatacaggagcacccagattcataaagcaactcctgagtgacctacaaagagacttagactcccacacattaataatgggagactttaacaccccactgtcaacattagacagatcaacgagacagaaagtcaacaaggatacccaggaattgaactcagctctgcaccaagcagacctaatagacatctacagaactctccaccccaaatcaacagaatatacattgttttcagcaccacaccacacctattccaaaattgaccacatacttggaagtaaagctctcctcagcaaatgtaaaagaacagaaattataacaaactatctctcagaccacagtgcaatcaaactagaactcaggattaagaatctcactcaaagccgctcaactacatggaaactgaacaacctgctcctgaatgactactggagaaagcaggaaagatccaaaactgacaccctaacatcacaattaaaagaactagaaaagcaagagcaaacacattcaaaagctagcagaaggcaagaaataactaaaatcagagcagaactgaaggaaatagagacacaaaaaacccttcaaaaaatcaatgaatccaggagctggttttttgaaaggatcaacaaaattgatagaccgctagcaagactaataaagaaaaaagagaagaatcaaatagacacaataaaaaatgataaaggggatatcaccaccgatcccacagaaatacaaactaccatcagagaatactacaaacacctctacgcaaataaactagaaaatctagaagaaatggatacattcctcgacacatacactctcccaaggctaaaccaggaagaagttgaatctctgaatagaccaataacaggctctgaaattgtggcagtaatcaatagtttaccaaccaaaaagagtccaggaccagatggattcacagccgaattctaccagaggtacaaggaggaactggtaccattccttctgaaactattccaatcaatagaaaaagagggaatcctccctaactcattttatgaggccagcatcattctgataccaaagtcgggcagagacacaaccaaaaaagagaattttagaccgatatccttgatgaacattgatgcaaaaatcctcaataaaatactggcaaaccgaatccagcagcacatcaaaaagcttatccaccatgatcaagtgggcttcatccctgggatgcaaggctggttcaatatacgcaaatcaataaatgtaatccagcatataaacagagccaaagacaaaaaccacatgattatctcaatagatgcagaaaaagcctttgacaaaattcaacaacccttcatgctaaaaactctcaataaattaggtattgatgggacgtatttcaaaataataagagctatctatgacaaacccacagccaatatcatactgaatgggcaaaaactggaagcattccctttgaaaactggcacaagacagggatgccctctctcaccgctcctattcaacatagtgttggaagttctggccagggcaatcaggcaggagaaggaaataaagggtattcaattaggaaaagaggaagtcaaattgtccctgtttgcagacgacatgattgtttatctagaaaaccccattgtctcagcccaaaatctccttaagctgataagcaacttcagcaaagtctcaggatacaaaatcaatgtacaaaaatcacaagcattcttatacaccaacaacagacaaacagagagccaaatcatgagtgaactcccattcacaattgcttcaaagagaataaaatacctaggaatccaacttacaagggatgtgaaggacctcttcaaggagaactacaaaccactgctcaaggaaataaaagaggacacaaacaaatggaagaacattccatgctcatgggtaggaagaatcaatatcgtgaaaatggccatacttgcccaaggtaatttacagattcaatgccatccccatcaagctaccaatgactttcttcacagaattggaaaaaactactttaaagttcatatggaaccaaaaaagagcccgcatcgccaagtcaatcctaagccaaaagaacaaagctggaggcatcacactacctgacttcaaactatactacaaggctacagtaaccaaaacagcatggtactggtaccaaaacagagatatagatcaatggaacagaacagagccctcagaaataatgccgcatatctacaactatctgatctttgacaaacctgagaaaaacaagcaatggggaaaggattccctatttaataaatggtgctgggaaaactggctagccatatgtagaaagctgaaactggatcccttccttacaccttatacaaaaatcaattcaagatggattaaagatttaaacgttagacctaaaaccataaaaaccctagaagaaaacctaggcattaccattcaggacataggcgtgggcaaggacttcatgtccaaaacaccaaaagcaatggcaacaaaagccaaaattgacaaatgggatctaattaaactaaagagcttctgcacagcaaaagaaactaccatcagagtgaacaggcaacctacaacatgggagaaaattttcgcaacctactcatctgacaaagggctaatatccagaatctacaatgaactcaaacaaatttacaagaaaaaaacaaacaaccccatcaaaaagtgggcgaaggacatgaacagacacttctcaaaagaagacatttatgcagccaaaaaacacatgaagaaatgctcatcatcactggccatcagagaaatgcaaatcaaaaccactatgagatatcatctcacaccagccaaaattcagaatgggtcgagaaatatagttaagagcaacatgaattgcttaatatcgcaaaacagtcctcaggtaccgtgtacaactgttgcaaaatatcatcctaattcccgtgtaactccagaaccacgaagtggaacaccaaaggaagacagaagatggatacttatgacttctgggaaattatacttccttattcaaaaatctactgaacacatgctgtctgggagaaaagattga

SEQ ID NO: 9136 - DNA, 3288 bp, Homo sapiens
  SIMILAR (703)..(2490): 961254mologous to Homo sapiens putative p150,accession number U93572,Smith-Waterman Score=3000.
atgaaggttgcttcacagtcttcccttctatctgattcagtggaccaagtaaatgactctctggtaactgcagaggctatttcctggaatgaatcaacgagtgaaacgaataactctatggtgactgaattcatttttctgggtctctctgattctcaggaactccagaccttcctatttatgttgttttttgtattctatggaggaatcgtgtttggaaaccttcttattgtcataacagtggtatctgactcccaccttcactctcccatgtacttcctgctagccaacctctcactcattgatctgtctctgtcttcagtcacagcccccaagatgattactgactttttcagccagcgcaaagtcatctctttcaagggctgccttgttcagatatttctccttcacttctttggtgggagtgagatggtgatcctcatagccatgggctttgacagatatatagcaatatgcaaacccctacactacactacaattatgtgtggcaacgcatgtgtcggcattatggctgtcgcatggggaattggctttctccattcggtgagccagttggcctttgccgtgcacttacccttctgtggtcccaatgaggtcgatagtttttattgtgaccttcctagggtaatcaaacttgcctgtacagatacctacaggctagatattatggtcattgctaacagtgaaatacaaactaccatcagagaatactacaaacacctctatgcaaataaactagaaaatctagaagaaatggataaattcctggacacatacactctcccaagactaaaccaggaagaagttgaatctctgaatagaccaataacagaagctgaaattgtggcaataatcaatagcttaccaaccaaaaagagtccaggaccagatggattcacagccgaattctaccagaggtacaaggaggaactggtaccattccttctgaaactattccaatcaatacaaaaagagggaatcctccctaactcattttatgaggccagcatcattctgataccaaagccaggcagagacacaacaaaaaaagagaattttagaccaatatccttgatgaacattgatgcaaaaatcctcaataaaatactggcaaaacgaatccagcagcacatcaaaaagcttatccaccaagatcaagtgggcttcatccctgggatgcaaggctggttcaatatatgcaaatcaataaatgtaatccagcatataaacagagccaaagacaaaaaccacatgattatctcaatagatgcagaaaaagcctttgacaaaattcaacaacgcttcatgctaaaaactctcaataaattaggtattgatgggacgtatttcaaaataataagacctgtctatgacaagcccacagccaatatcatactgaatgggcaaaaactggaagcattccctttgaaaactggcacaagacagggatgccctctctcaccactcctattcaacatagtgttggaagttctgcccagggcaactaggcaggagaaggaaataaagggtattcaattaggaaaagaggaagtcaaattgtccctgtttgcagacgacatgattgtatatctagaaaaccccattgtctcagcccaaaatcttcttaagctgataagcaacttcagcaaagtctcaggatacaaaataaatgtacaaaaatcacaagcattcttatacaccaacaacagacaaacagagagccaaatcatgagtgaactcccattcacaattgcttcaaagagaataaaatacctaggaatccaacttacaagggatgtgaaggacctcttcaaggagaactacaaatcactgctcaaggaaataaaagaggatacaaataaatggaagaacattccatgctcatgggtaggaagaatcaatattgtgaaaatggccatactgcccaaggtaatttacagattcaatgccatccccatcaagctaccaatgactttcttcacagaattggaaaaaactactttaaagttcatatggaaccaaaaaagagcctgcatcgccaagtcaatcctaagccaaaagaacaaagctggaggcatcacgctacctgacttcaaactatacgacaaggctacagtaaccaaaacagcatggtactggtaccaaaacagagatatagatcaatggaacagaacagagccctcagaaataatgccgcatatctacaactatctgatctttgacaaacctgagaaaaacaagcaatggggaaaggattccctatttaataaatggtgctgggaaaactggctagccatatgtagaaagctgaaactggatcccttccttacaccttatacaaaaatcaattcaagatggattaaagacttaaacgttagacctaaaaccataaaaaccctggaagaaaacctaggctttaccattcaggacacaggcatgggcaaggacttcatgtctaaaacaccgagagaggcactcttatgcattgttggtgagaatacaaaatggagcaaagaccccagtgctttatccacacctccaacaagctgcagtcgaccacaaagaagaaacaagtctgtctcccatgggtcctacccacaccccctgctgttcaccatgaatgatagagtcaacagtgtgaaaacgaccatactgccaaaagcaacctacaaattcaatgcaattcccatcaaaataccaccatcattcttcacagaactagaaaaaacaaggctaaaattcacatggaaccaaaaaagagcccacacagccaaagcaagactaagcaaaaagaataaatctagaggcatcacattactcgacttcaaactatactataaggccatagtcaccaaaacagcatggtactggtataaaaataggcatatagaccaatggaatagaatagagaacccagaaataaagccaaatactttcagccaactgatctttgacaaagcaagcaaaaacataaagtggggaaaggacaccctattcaacaaatggtgctggtataattggcaagccacatgtagaagaatgcaactggatcctcatctctcaccttataaacaaatcaactcaagatggttcacagacttaaatctaagacctgaaaccataaaaattctagaagataagattggaaaaacacttctagacattggcttaggcaaagacttcacaatcaagaacccaaaagcaaacacaacaaagataaatagatgggacttaattaaactgaaagccttctgcacatcaaaataa

SEQ ID NO: 9137 - DNA, 2275 bp, Homo sapiens
  SIMILAR (2241)..(2273): 811254mologous to Homo sapiens putative p150,accession number U93572,Smith-Waterman Score=51.
atggggagaaaccagctcaaaaagcctgaaaattccaaaaaccagaatgcctcttctactccaaaggttcacaactcctcaccagcaagggaacaaaactggacagagaatgagtttgacgaattgacagaagtaggcttcagaaggtgggtaataacaaactcctccgagctaaaggagcatgctctaacccaatgcagggaagctaggaaccttgaaaaaagctactctaaaattggagatgactatttcatcagaggcacagacatcaacacagggacacaagaagcatggaaaaaaatacaaactaccatcagagaatgctataaacacctctacgcaaataaactagaaaatctagaagaaatggatacattcctcgacacatacaccctcccaagactaaaccaggaagaagtcgaatctctgaatagaccaataacaggctctgaaattgaggcaataattaatagcttaccaaccaaaaaaagtccaggaccagacggattcacagccaaattctaccagaggtacaaaggggagctggtaccattccttctgaaactattccaatcaataaaaaaagagagaatcctccctaactcattttatgaggccagcatcatactgataccaaagcctggcagagacacaacaaaaaaaagagaattttagaccaatatctttgatgaacatcgatgcaaaaatcctcaataaaatactggcaaaccaaatccagcagcacatcaaaaagcttatccaccatgatcaagtgggcttcacccctgggatgcaaggctggttcaatatatgcaaatcaataaatataatccagcatataaacagaaccaaagacaaaaaccacatgattatttcaatagatgcagaaaaggcctttgacaaaattcaacaacacttcatgctaaaaactctcaataaattaggtattgatgggacgtatctcaaaatgataagaactatctatgacaaacccacagccaatatcatactgaatgggcaaaaactggaagcattccctttgaaaactggcacaagacagggatgccctctctcaccactcctattcaacatagtgatggaacttctggccagggcaattaggcaggagaaggaaataaagggtattcaattaggaaaagaggaagtcaaattgtccctgtttgcagatgacatgattagaataaaataccttggaatccaacttataagggacatgaaggacctcttcaaggagaactacaaaccactgctcaatgaaataaaagaggatacaaacaaatggaagaacatcccatgctcatgggtaggaagaatcaatatcgtgaaaatggccatactgcccaaggtaatttatagattcaatgccatccccatcaagctaccaatgactttcttcacagaattggaaaaaactactttaaatttcatatggaaccaaaaaagagcccccacattgccccaagtccaatccctaagcccaaaagaacaaagctgggaggcatcacggctacctgacttcaaactatacctacaaggcctacagtaacccaaaacagcatggtatggtactggtacccaaaacagagatatagaccaatggaacagaacagagccctcagaaataacaccgcatatctacaactatctgatctttgacaaacctgagaaaaacaagcaatggggaaaggattccctatttaataaatggtgctgggaaaactggctagccacatgtagaaagctgaaactggatcccttccttacaccttatacaaaaattaattcaagatggattaaagacttaaacgttagacctaaaaccataaaaaccctagaagaaaacctaggcattaccattcaggacataggcatgggcaaggacttcatgtctaaaacaccaaaagcaatggcaacaaaagccaaaattgacaaatgggatctaattaaactcaagagcttctgcacagcaaaagaaactaccatcagagtgaacaggcaacctacaaaatgggagaaaattttcgcaacctactcatctgacaaagggctaatatccagaatctacaatgaacttaaacaaatttacaagaaaaaaacaaacaaccccatcaacaagtgggcgaaggatatgaacagacacttctcaaaagaagacatttatgcagcccaaaaacacatgaaaaatgctcaccatcactggccatcagagaaatgcaaatcaaaacacaatgagataccatctcacaccagttag

SEQ ID NO: 9138 - DNA, 3542 bp, Homo sapiens
  SIMILAR (1026)..(3266): 931254mologous to Homo sapiens putative p150,accession number U93563,Smith-Waterman Score=3641.
aaacctcaactctctatgcagcttcgatcgtaggtatgtgtggggcttctgtaaaagtctgatccagggttactttgcccaattacactctccgctgcctgctggaccccacttgtgatgccccttgtaatgatcatggcatgaacacccgctggatgagccatagatactgtgagatggtgagctcactttctttagagaattttcattgttgcacccaaaggagctccattctcttccctcatgtgcctgttggcagaagacaactcgtatggaaagtggtttttggaatcgatgtgattctacatgaggttctatgcagagtcaatgcctctgcaaggagaagcaggcttgcccacacatggtttgccctgagagcatgtactgtctgtatttatctccctgtctatatgcagcccactgtcttacaacagtgcagtgcaagccctgcagctggtaggatatcaaaacctgaaggcctagatttcaagtgccatccagatatgaaatctttcaacctttcggtggctttgaatctaaagtgtgtctcttgtaaatggcacactgagtttgaagtgcctcacagtgaggtctctgctgtgggcgactgctgggcttcaagcagtccaggacccttcagtcaactgcccaagttcagatggcccagttctccaaaaggagagaagggtgcaccagaatgtcaccagggcagagagcgaaacagatcatggtagcgatccttccccagatccaggccctcccccttcctccttctctctcgttatctcagaattcacatggtattctcagttttgccttttggcctgcaaaacccgaaatatttactatctggctctttgcaggaaaagttcaggacccctggtataaattcccataaaacactggatccaaatagagtaatcattaaggtgaggaggaggctggagaaggagaaagccctgagggcctatgttgggaaatcagaggttcgtaacatgcatttaagagaaagatgcaaactatagaagaaaagagagaagaatcaaatagacacaattaaaaatgataaaggggatatcaccactgatgccacagaaatacaaactaccatcagagaatactataaacacctctatgcaaataaactagaaaacctagaagaaatggataaattcctcgacacatacatcctcccaagactaaaccaggaagaagttgaatctctgaatagaccaataacaggctctgaaattgaggcaataattaatagcttaccaaccaaaagaagtccaggaccagatggattcacagccgaattctaccagacgtacaaagaggagctggtaccattccctctgaaactattccaatcaacagaaaaagagggaatcctccctaactcattttatgaggccagcatcatcctgataccaaagcctggcagagacacaacaaaaaaagagaattttagaccaatatccttgatgaacatcgatgcaaaaatcctcaataaaatactggcaaaccgaatccagcagcacatcaaaaagcttatccactatgatcaagtgggcttcatccctgggatgcaaggctggttcaacaaacgcaaatcaataaatgtaatccagcatataaacagaaccaatgacaaaaaccacatgattatctcaatagatgcagaaaaggcctttgacaaaattcaacaacccttcatgctaaaaactctcaataaattaggtattgatgggacgtatctcaaagtaataagagctatctatgacaaacccacagccaatatcatactgaatgggcagaaactggaagcattccctttgaaaactgacacaagacagggatgccctctctcaccactcctattcaacatagtgttggaagttctggccagggcagtcaggcaggagaaggaaatagagggtattcaattaggaaaagaggaagtcaaattgtccctgtttgcagatgacatgattgtatatctagaaaaccccatcgtctcagcccaaaatctcctcaagctgataagcaacttcagcaaagtgtcaggatacaaaatcaacatacaaaaatcacaagcattcttatacaccaataacagacaaacagagagccaaatcatgagtgaactcccattcacaactgcttcaaagaaaataaaatacctaggaatccaacttacaagggatgtgaaggacctcttcaaggagaactacaaaccactgctcaatgaaataaaagaggatacaaacaaatggaagaacattccatgctcgtgggtaggaagaatcaatatcatgaaaatggccatactgcccaaggtaatttgtagattcaatgccatccccatcaagctaccaatgcctttcttcacagaattggaaacaactactttaaagttcatatggaaccaaaaaagagcccgcatcgccaagtcaatcctaagccaaaagaacaaagctggaggcatcacgctacctgacttcaaactatactacaagcctacagtaaccaaaacagcatggtactggcaccaaaacagagctatagagcaatggaacagaacagagccctcagaaataacgacacatatctacaactatctgacctttgacaaacctgagaaaaacaagcaatggggaaaggattccctatttaataaatggtgctgggaaaactggctagccatatgtagaaagctgaaactggatcccttccttacaccttatacaaaaatcagttcaaaatggattaaagacttaaacgttagacctaaaaccataaaaacccaagaagaaaacctaggcattaccattcaggacataggcatgggcaaggacttcatgtctaaaacacaaaaagcaatggcaacaaaagccaaaattgacaaaggggatctaattaaactaaagagcttctgcacagcaaaagaaactagcagcagtgtgaacaggcaacctacaaaatgggagaaaatttttgcaacctactcatctgacaaagggctaatatccagaatctacaatgaactcaaacaaattcacaagaaaaaaacaaacaaccccatcaaaaagtgggcaaaggatatgaacagacacttctcaaaagaagacatttatgcagccaaaaaacacatgaaaaactgttcaccatcactggccatcagagaaatgcaaatcaaaaccacaatgagataccatctcacaccacttagaatggcaatcattaaaaagtcaggaaacaacagacgcacagcaactttaagtttgctgccagctatacgtcatgaaagggaagcttttcatcaaagggaagaagaaaaggaagggggaagaatcctacttttacaaaacagagtaattctttgctcctgctccctttgcccacatctctcacctgcgtccaaaccaaaacacaggggcctagatcgctttaagtcacaaagcacgtctatgttctcaggtgtgctcagcgttcggaattctctgcatgctcctcaggttgtttcctggttgcagcgctaa

SEQ ID NO: 9139 - DNA, 5357 bp, Homo sapiens
  SIMILAR (1857)..(3437): 951254mologous to Homo sapiens putative p150,accession number U93563,Smith-Waterman Score=2709.
atggggaaaaaacagaacagaaaaactggaaactctaaaatgcagagcgcctctcctcctccaaaggaacgcagttcctcaccagcaacggatcaaagctggatggagaatgactttgacgagctgagagaagaaggtttcagacgatcaaattactctgagctacgggaggacattcaaaccaaaggcaaagaagttgaaaactttgaaaaaaatttagaagaatgtataactagaataaccaatacagagaagtgcttaaaggagctgatggagctgaaaaccaaggctcgagaactacgtgaagaatgcagaagcctcaggagccgatgcgatcaactggaagaaagggtatcagcaatggaagatgaaatgaatgaaatgaagcaagaagggaagatcaaaagagacaaagaaggccattacataatggtaaagggatcaattcaacaagaagagctaactatcctaaatatatatgcacccaatacaggagcacccagattcataaagcaagttctgagtgacctacaaagagacttagactcccacacattaataatgggagactttaacacctcactgttaacattagacagatcaatgagacagaaagtcaacaaggatacccaggaattgaactcatctctgcaccaagcggacctaatagacatctacagaactctccaccccaaatcaatagaatatacatttttttcagcaccacaccacacctattccaaaattgaccacatagttggaagtaaagctctcctcagcaaatgtaaaagaacagaaattataacaaactatctctcagaccacagtgcaactcaaactagaactcaggattaagaatctcactcaaagccgctcaactacatggaaactgaacaacctgctcctgaatgactactgggtacataacgaaatgaaggcagaaataaagatgttctttgaaaccaacgagaacaaagacacaacataccagaatctctgggacgcattcaaagcagtgtgtagagggaaatttatagcactaaatgcccacaagagaaagcaggaaagatccaaaattgacaccctaacatcacaattaaaagaactagaaaagcaagagcaaacacattcaaaagctagcagaaggcaagaaataactaaaatcagagcagaactgaaggaaatagagacacaaaaaacccttcaaaaaaatcaatgaatccaggagctggttttttgaaaggatcaacaaaattgatagaccactagcaagactaataaagaaaaaaagagaggagaatcaaatagacacaataaaaaatgataaaggggatatcaccaccgatcccacagaaatacaaactaccatcagagaatactataaacacctctacgcaaataaaccagaaaatctagaagaaatggataaattcctcgacacatacactctcccaagactaaagcaggaagaagttgaatctctgaatagaccaataacaggagctgaaattgtggcaataatcaatagtttaccaaccaaaaagagtccaggaccagatggattcacagccgaattctaccagaggtacaaggaggaactggtaccattccttctgaaactattccaatcaatagaaaaagagggaatcctccctaactcattttatgaggccagcatcattctgataccaaagccgggcagagacacaaccaaaaaagagaattttagaccaatatccttgatgaacattgatgcaaaaatcctcaataaaatactggcaaaccgaatccagcagcacatcaaaaagcttatccaccatgatcaagtgggcttcatccctgggatgcaaggctggttcaatatactgttggatgttctggccagggcaattaggcaggagaaggaaataaagggtattcaattaggaaaagaggaagttaaattgtccctgtttgcagacgacatgattgtatatctagaaaaccccattgtctcagccgaaaatctccttaagctgataagcaacttcagcaaagtctcaggatacaaaatcaatgtacaaaaatcacaagcattcttatacaccaacaacagacaaacagacagccaaatcatgagtgaaatcccattcacaattgcttcaaagagaataaaatatctaggaatccaacttacaagggatgtgaaggacctcttcaaggagaactacaaaccactgctcaaggaaataaaagaggatacaaacaaatggaagaacattccatgttcatgggtaggaagaatcaatatcatgaaaatggccatactgcccaaggtaatttacagattcaatgccatccccatcaagctaccaatgcctttcttcacagaattggaaaaaactactttaaagttcatatggaaccaaaaaaaaccccgcatcgccaagtcaatcctaagccaaaagaacaaagctggaggcatcacactacctgacttcaaactatactacaaggctacagtaaccaaaacagcatggtactggtgccaaaacagagatatagatcaatggaacagaacagagccctcagaaataacgccgcatatctacaactatctgatctttgacatacctgagaaaaacaagcaatggggaaaggattccctgtttaataaatggtgctgggaaaactggctagccatatgtagaaagttgatactggatcccttccttacaccttatataaaaatcaattcaagatggattaaagacttaaacgttggacctaaaaccataaaaaccctagaagaaaacctaggctttaccattcaggacataggcatgggcaaggacttcatgtctaaaacaccaaaagcaatggcaacaaaagccaaaattgacaaatgggatctaattaaactcaagagcttctgcacagcaaaagaaactaccatcagagtgaacaggcaacctacaaaatgggagaaaattttcgcaacctactcatctgacaaagggctaatatccagaatctacaatgaactcaaacaaatttacaagaaaaaaacaaacaaccccatcaaaaagtgggtgaaggacatgaacagacacttctcaaaagaagacatttatgcagccaaaaaacacatgaaaaaatgctcatcatcactggccatcagagaaatgcaaatcaaaaccacagtgagataccatctcacaccagttagaatggcaatcatgaaaaagtcaggaaacaacaggtgctggagaggatgtggagaaataggaacacttttacactgttggtgggactgtaaactagttcaaccattgtggaagtcagtgtggcgattcctcagggatctagaactagaaataccatttgacccagccatcccattactgggtatatacccaaaggactataaatcatgctgctataaagatacatgcacacctctcaagaaacacatcagctttcatctttatcagtatgacactgacatgataggaaatgctgggctggtgattcagcagccatccattttacagtcagaggacaagtcgtacaatggtggaggaataggttcttcaaataggatcatggacttcttggaggagccaatccctggtgtagggacctatgatgatttcaatacaattgattgggtgagagagaagtctcgagaccgggataggcaccgagagggagcctttgcctacatagtcaattatttcatgtacgtcctctgggctctcctatttgccttccttgccgtatctcttgtcaaggtgtttgcgccttatgcctgtggctctggaatccctgagataaaaactatcttgagtggtttcattattaggggctatttgggtaagtggactctggttatcaaaaccatcaccttggtgctggcagtgtcgtctggcttgagcctgggcaaagagggccctctagtgcacgtggcttgctgctgtgggaacatcctgtgccactgcttcaacaaatacaggaagaatgaagccaagcgcagagaggtcttgtcggctgcagcagcagctggtgtatctgtagcctttggagcacctataggtggagtattattcagccttgaagaggtcagctactattttcccctcaaaacattgtggcgttcattctttgctgccttggtggcagcattcactctacgctccatcaatccatttgggaacagccgcctggtactattttatgtggagtttcacaccccatggcatctctttgagctcgtgccattcattctgctgggcatatttggtggtctgtggggagcactgtttatccgcacaaacattgcctggtgtcggaagcgaaagaccacccagttgggcaagtatcctgttatagaggtactcgtcgtgacagccatcactgccatcctggctttccccaatgaatacactcggatgagcacaagtgagctcatttctgagctgtttaatgactgtggccttctggactcctccaagctctgtgattatgagaaccgtttcaacacaagcaaagggggtgaactgcctgacagaccggctggcgtgggagtctacagtgcaatgtggcagctggctttaacactcatactgaaaattgtcattactatattcacctttggcatgaagatcccttctggcctctttatccctagcatggctgttggtgctatagcaggtcgacttctaggagtaggaatggaacagctggcttattaccaccaggaatggaccgtcttcaatagctggtgtagtcagggagctgattgcatcacccccggcctttatgcaatggttggggctgcagcctgcttagccaaagaagagtttgctcataagaccctggcaatggatgtgatgaaaccccggagaaatgatcctttgttgactgtccttactcaggacagtatgactgtggaagatgtagagaccataatcagtgaaaccacttacagtggcttcccagtggtggtatcccgggagtcccaaagacttgtgggctttgtcctccgaagagatctcattatttcaattgaaaatgctcgaaagaaacaggatggggttgttagcacttccatcatttatttcacggagcattctcctccattgccaccatacactccacccactctaaagcttcggaacatcctcgatctcagccccttcactgtgactgaccttacacccatggagatcgtagtggatattttccgaaagctgggactgcggcagtgcctggttacacacaacgggcgattgcttggaatcattaccaaaaaggatgtgttaaagcatatagcacagatggcgaaccaagatcctgattccattctcttcaactag

SEQ ID NO: 9140 - DNA, 2492 bp, Homo sapiens
  SIMILAR (1011)..(2123): 891254mologous to Homo sapiens putative p150,accession number U93572,Smith-Waterman Score=1691.
atgggagactttaacaccccactgtcaacattagacagatcaacgagacaggaagttaacaaggatacccaggaattgaactcagctctgcaccaagtggacctaatagacatctacagaactctccaccccaaatcaacagaatatacattcttttcagcaccacactacacctactccaaaattgaccacatagttggaagtaaagcactcctcagcaaatgtaaaagaacagaaattataacaaactgtctctcagaccacagtgcaatcaaactagaactcaggattaagaaactcactcaaaaccactcaactacatggaaactgaacaacctgctcctgaatgactactgggtaaataatgaagtgaaggcagaaataaagatgttctttgaaaccaacgagaacaaagacacaacataccagaatctctgggacacattcaaagcaatcaacaaaattgatagaccactagcaagactaataaagaagaaaagagagaagaatcaaatagatgcaataaaaaacgataaattgggatatcaccactgatcccacagaaatacaaactaccatcagagaatactataaacacctctatgcaaataaactagaaaatctagaagaaatggataaattcctggacacatacaccctcccaagactaaaccaggaagaagttgaatctctgaatagaccaataacaggctctgaaattgaggcaataactaatagcctaacaaaccaaaaaaagtccaggaccagacggattcacagccaaattctaccagaggtacaaggaggagcttgtacccattccttctgaaactattccaattaatagaaaaagagggaatcctccctaactcattttatgaggccagcatcatcctgataccaaagcctggcagagacacaacaacaacaaaaaaagaattttagaccaatatccctgatgaacatcgatgcaaaaatcctcaataaaatactagcaaaccgaatccagcaaacacatcaaaaagcttatccaccatgatcaagtgggcttcatccctggggatgcaaggcttgttcaacatatgcaaatcaataaacgtaatccatcatataaacagaaccaaagacaaaaactacatgattatctccaataggatgcagaaaaggcctttgacaaaattcaacaacccttcatgctaaaaactctcaataaattaggtattgatgggacgtatctcaaaataataagagctatctatgacaaacccacagccgatatcatactgaatgggcaaaaactggaagcattctctttgaaaactggcacaagacagggatgccctctctcaccactcctattcaacatagtgttggaagttctggccagggcagtcaggcaggagaaggaaataaagggcattcgattaggaaaagaggaagtcaaattgtccctgcttgcagatgacatgattgtatatctagaaaaccccatcgtctcagccccaaatctcctcaagctgataagcaacttcagcaaagtctcaggatacaaaatcaatgtacaaaaatcacaagcattcttatacaccaataacagacaaacagagagccaaatcatgagtgaactcccattcacaattgcttcaaagagaataaaatacttaggaatccaactcacaagggacatgaaggacctcttcaaggagaactacaaaccactgctcaatgaaataaaagaggatacaaacaaatggaagaacattccatgctcatgggtaggaagaatcaatatcatgaaaatggccatactgcccaaggtaatttatagattcaatgccatccccatcaagctaccaatgactttcttcacagaattggaaaaaactactttaaagttcatatggaaccaaaaaagagcccgcatcgccaagtcaatcctaagccaaaagaacaaagctggaggcatcacactacctgacttcaaactatactacaaggctacagtaaccaaaacagcatggtactggtaccaaaacagagatatagatcaatggaacagaacagagccctcagaaataacaccgcatatctacaactatctgatctttgacaaacctgagaaaatgagtataatagatacagggggatggtatgaggcaccagtcagttccttcttcaaggagggactatgccgcacaggtactgagaatcaggttaacagacagcctccagctgccagtcccttcaaggtttacgtcagctgcacggggtcacttcaccctaggccacactacttcttggagcatccatatccaagcttcctttctttctcttcaacaagtgctgccactgcagctgatgacattccaggagcttttaatgaattaaagccacatttgcccaaagaagccagcaaagttactgactggtttgagaatagttatgtgtatggtaggataagaagatactcactcaacgatgttgctgtttga

SEQ ID NO: 9141 - DNA, 3083 bp, Homo sapiens
  SIMILAR (712)..(1749): 961254mologous to Homo sapiens putative p150,accession number U93572,Smith-Waterman Score=1691.
atggggaaaaaacagaacagaaaaactggaaactctaaaacgcagagcgcctctcctcctccaaaggaacgcagttcctcaccagcaacagaacaaagctggatggagaatgattttgacgagctgagagaagaaggcttcagacgatcaaattactctgagctatgggaggacattcaaaccaaaggcaaagaagttgaaaactttgaaaaaaatttagaagaatgtataactagaataaccaatacagagaagtgcttaaaggagctgatggagctgaaaaccaaggctcgagaactacgtgaagaatgcagaagcctcaggagccgatgcgatcaactggaagaaagggtatcagcaatggaagatgaaatgaatgaaatgaagcgagaagggaagtttagagaaaaaagaataaaaagaaatgagcaaagcctccaagaaatatgggactatgtgaaaagaccaaatctacgtctgattggtgtacctgaaagtgatgtggagaatggaaccaagctggaaaacactctgcaggatattatccaggagaacttccccaatctagcaaggcaggccaacgttcagattcaggaaatacagagaacgccacaaagatactcctcgagaagagcaactccaagacacataattgtcagattcaccaaagttgaaatgaaggaaaaaatgttaagggcagccagagagaaagaaatacaaactaccatcagagaatactacaaacacctctacgcaaataaactagaaaatctagaagaaatggatacattcctcgacacatacactctcccaagactaaaccaggaagaagttgaatctctgaatagaccaataacaggctctgaaattgtggcaataatcaatagtttaccaaccaaaaagagtccaggaccagatggattcacagccgaattctaccagaggtacaaggaggaactggtaccattccttctgaaactattccaatcaatagaaaaagagggaatcctccctaactcattttatgaggccagcatcattctgataccaaagccgggcagagacacaaccaaaaaagagaattttagaccaatatccttgatgaacattgatgcaaaaatcctcaataaaatactggcaaaccgaatccagcagcacatcaaaaagcttatccaccatgatcaagtgggcttcatccctgggatgcaaggctggttcaatatacgcaaatcaataaatgtaatccagcatataaacagagccaaagacaaaaaccacatgattatctcaatagatgcagaaaaagcctttgacaaaattcaacaacccttcatgctaaaaactctcaataaattaggtattgatggtacatatttcaaaataataagagctatctatgacaaacccacagccaatatcatactgaatgggcaaaaactggaagcattccctttgaaaactggcacaagacagggatgccctctctcaccgctcctattcaacatagtgttggaagttctggccagggcaatcaggcaggagaaggaaataaagggtattcaattaggaaaagaggaagtcaaattgtccctgtttgcagacgacatgattgtttatctagaaaaccccattgtctcagcccaaaatctccttaagctgataagcaacttcagcaaagtctcaggatacaaaatcaatgtacaaaaatcaccaagcattcctatacaccaacaacagacaaacagagagccaaatcatgagtgaactcccattcacacttactacaacaagaataaaatacctaggaatccaacttacaagggatgtgaaggacctcttcacggagaactacaaaccactgctcaatgaaataaaagaggatacaaacaaatggaagaacattccatgctcatgggtaggaagaatcaatatcgtgaaaatggccatactgcccaaggtaatttatagattcaatgccatccccatcaagctaccaatgactttcttcacagaattggaaaaaaactactttaaagttcatatggaaccaaaaaagagcccgcattgccaagtcaatcctaagacaaaagaacaaagctggaggcatcacactacctgacttcaaactatactacaaggctacagtaaccaaaacagcatggtactggtaccaaaacagagatatagatcaatggaacagaacagagccctcagagataatgccgcatatctacaactatctgatctttgacaaacctgagaaaaacaagcaatggggaaaggattccctatttaataaatggtgctgggaaaactggctagccatatgtagaaagctgaaactggatcccttccttacaccttatacaaaaatcaattcaagatggattaaagatttaaacgttagacctaaaaccataaaaaccctagaagaaaacctaggcattaccattcaggacataggcgtgggcaaggacttcatgtccaaaacaccaaaagcaatggcaacaaaagccaacattgacaaatgggatctaattaaactaaagagcttctgcacagcaaaagaaactaccatcagagtgaacaggcaacctacaacatgggagaaaatttttgcaacctactcatctgacaaagggctaatatccagaatctacaatgaactcaaacaaatttacaagaagaaaacaaacaaccccatcaaaaagtgggcgaaggacatgaacagacacttctcaaaagaagacatttatgcagccaaaaaacacatgaagaaatgctcatcatcactggccatcagagaaatgcaaatcaaaaccactatgagatatcatctcacaccagttagaatggcagtcattaaaaagtcaggaaacaacaggtcacatttcaacatgagatttggagaggacagacacccgaatcacagcaatgggtctcagcaagcagctccatcagctgcctcagacttgtctggaaggtggcagacgtgggcaattcctgccttgctgaagagggatacactgctgagtgaatgctctgaagcagaggagcatttggtgcaactgaagttgtctgaa

SEQ ID NO: 9142 - DNA, 4202 bp, Homo sapiens
  SIMILAR (2239)..(3045): 951254mologous to Homo sapiens putative p150,accession number U93572,Smith-Waterman Score=1304.
atgaggaaaaaacagagcagaaaaactggaaactctaaaaagcagagcacctctcctcctccaaaggaacgcagttcctcaccagcaatggaacaaagctggacggagaatgactttgacgagttgagagaagaaggtttcagacgatcaaactactccaagctacaggaggaaattgaaaccaaaggccaagaagttgaaaacttggaaaaaaatttagacaaatgtataactagaataaccaatatagagaagtgcttaaaggagctgatggagctgaaagccaaggctcgagaactacatgaagaatgcagaagcctcaggagccgatgcgatcaactggaagaaagggtatcagtaatggaagatgaaatgaatgaaatgaagcaagaagggaagtttagagaaaaaagaataaaaagaaatgaacaaagcctccaagaaatatgggactatgtgaaaagaccaaatctacctccgattgatgtacctgaaagtgacagggagaatggaaccaagttggaaaacactctgcaggatgttatccaggagaacttccccaacctagcaaggcaggccaacattcagattcaggaaatacagagaatgccacaaagatactcctcgagaagagcaactccaagacacataattgtcagattcaccaaagttgaaatgaaggaaaaaatgttgagggcagccagagagaaagcattcaagcaggcctcccggagagaagatgacattgccaaggtaaccagtggcatgagagttttattcaagccaggaaccacagaggtacaggagctggccctttgctatggtggaatggccaacagaaccatctcagccctcaagaccactcagaggcagctttccaagctctggaaggaggagctgctgcaggacgtgtgtgcaggactggcagaggagctgcatctgcctcccgatgcccctggtggcatggtggacttccggtgcaccctcaccctcagcttcttcttcaagttctacctgacagtccttcagaagctgggccaagagaacctggaagacaagtgtggtaaactggaccccactttcgccagtgcaactttactgtttcagaaagaccccccagccgatgtccagctcttccaagaggtgcccaagggtcagtctgaggaggacatggtgggccggcccctgccccacctggcagcggacatgcagcctctggtgaggccgtgtactgtgacgacattcctcgctacgagaatgagctgtctctccggctggtcaccagcacccgggcccacgccaagatcaagcatcgagatgaagttcaagaatatgctgtttcctatgattgtctgcccagcctggatccctgagctgaattcggtagaacatggacccgacggtatctcctttggagctgcttgccccctgagcattgtggaaaaaaccctggtggatgctgttgctaagcttcctgcccaaaagacagaggtgttcagaggggtcctggagcagctgcgctggtttgctgggaagcaagtcaagtctgtggcgtccgttggagggaacatcatcactgccagccccatctccgacctcaaccccgtgttcatggccagtggggccaagctgacacttgtgtccagaggtgagctgcctgaagcagaggtccaggaagaaggacttgggggagaaaagtctcaccagataggtcattttctggagaaacagagctcaaagttcagtgacccagctttccctgtgatttggatccagggaagcatggagaatgtacctggtttggtggacgggaaagctggatattttctctgtagagaattcacagcaggaactgctacctgcatgccttacctagtggggcaccaggagaactgtccagatggaccacaccttcttccctggctacagaaagaccctgctgagcccggaggagatactgctctccatagagatcccctacagcagggagaaatacaaactaccatcagagaatactacaaacacctctccgcaaataaactagaaaatctagaagaaatggataaattcctcgacacatacactctcccaagactaaaccagaaagaagttgaatctctgaatagaccaataacaggagctgaaattgtgccaataatcaacagcttaccaaccaaaaagagttcaggactagatggattcacagccgaattctaccagaggtacaaggaggaactgcatataaacagaaccaaagacaaaaaccacatgattatctcaatagatgcagaaaaggcctttgacaaaattcaacaacccttcatgctaaaaactctcaataaattaggtattgatgggacgtatctcaaaataataagagctatctatgacaaacccacagccaatatcatactgaatgggcaaaaactggaagcattccctttgaaaactggcacaagacagggatgccctctctcaccactcctattcaacatagtgttggaagttctggccagggcaatcaggcaggagaaggaaataaagggtattcaattaggaaaagaggaagtcaaattgtccctgtttgcagatgacatgattgtatatctagaaaaccccattgtctcagcccaaaatccccttaagctgataagcaacttcagcaaagtctcaggatacaaaatcaatgtacaaaaatcacaagcattcttatacaccaataacagacaaacagagagccaaatcatgagtgaactcccattcacaattgcttcaaagagaataaaatacctaggaatccaacttacaagggacgtgaaggacctcttcaaggagaactacaaaccactgctcaatgaaataaaagaggatacaaacaaatggaagaacattccatgctcatgggtaggaagaatcaatatcatgaaaatggccatactgcccaaggtaatgtatagattcaatgccatccccatcaagctaccaatgcctttcttcacagaattggaaaaaactactttaaagttcactactggaaccaaaaaagagcccgcatcgccaagtcaatcctaagccaaaagaacaaagctgtaggcatcacactacctgacttcaaactatactacaaggctacagtaaccaaaacagcatggtactggtaccaaaacagagatatagatcaatggaacagaacagagccctcagaaataatgccacatatatctacaactatctaatctttgacaaacctgagaaaaacaagcaatggggaaaggataccctatttaataaatggtgctgggaaaactggctagccatatgtagaaagctgaaactggatcccttccttacaccttatacaaaaattaattcaagatggattaaagacttaaatgttagacctaaaaccataaaaaccctagaagaaaacctaggcaataccattcaggacataggcatgggcaaggacttcatgtctaaaacaccaaaagcaacggcaacaaaagccaaaattgacaaatgggatctaattcaactaaagagcttctgcacagcaaaagaaaccaccatcagagtgaacaggcaacctacagaatgggaggaaatttttgcaacctactcacctgacaaagggctaatatccagaatctacaatgaactcaaacaaatttacaagaaaaaaacaaaaaaaccccatcaaaaagtgggcaaaggatgtgaacagacacttctcaaaagaagacatttatgcagccaaaaaacacatgaaaaaatgctcatcatcactggccatcagagaaatgcaaatcaaaaccacaatgagacaccatctcacaccagttagaatggcaatcattaaaaagtcaggaaacaacacgtgctggagaggatgtggagaaataggaacacttttacactgttggtgggactgtaaactagttcaaccattgtggaagtcagtgtggcgattcctcagggatctagaactagaaataccatttgacccagccatcccattactgggtatatacccaaatgactataaatcatgctgctataaagacacatgcacacagctttcagctgacgagaattgtgctgatagcatttggaggggaagggatgactgcgaacacctctgcatacccactggaggtcaaggttttggggatgaacaggaagtaccagcagggaatgattag

SEQ ID NO: 9143 - DNA, 6194 bp, Homo sapiens
  SIMILAR (4746)..(5891): 921254mologous to Homo sapiens putative p150,accession number U93565,Smith-Waterman Score=1935.
tgcacccaatacaggagcacccagattcataaagcaagtcctgagtgacctacaaagagacttagactcccacacaataataatgggagactttaacaccccactgtcaacattagacagatcaatgagacagaaagttaacaaggatatccaggaattgaactcagctctgcaccaagcggacctaatagacatctacagaactctccaccccaaatcaacagaatatacattcttttcagcaacacaccacacctattccaaaattgaccacatagttggaagtaaagctctcctcagcaaatgtaaaagaacagaaattataacaaactgtctctcagaccacagtgcaatcaaactagaactcaggattaagaaactcactgaaaaccgctcaactacatggaaactgaacaacctgctcctgaatgactactgggtacataacgaaatgaaggcagaaataaagatggtctttgaaaccaatgacactctcccaagactaaaccaggaagaagttgaatctctgaatagaccaaaaacaggctctgaaattgaggcaataattaatagcctaccaaccaaaaaaagtccaggaccagatggattcacagctgaattctaccagaggtacaaggaggagctggtaccattccttctgaaactattccaatcaatagaaaaagagagaatcctccctaactcattttatgaggccagcatcatcctgataccaaagcctggcagaggcacaacaaaaaaaaagagaattttagaccaatatccctgatgaacatcgatgcaaaaatcctcaataaaatgctggcaaaccaaatccagcagcacatcaaaaagcttatctaccatgatcaagttggcttcatccctgggatgcaaggctggttcaacatatgcaaatcaataaatgtaatccatcatataaacagaaccaaagacaaaaaccacatgattatctcaatagatgcagcaaaggcctttgacaaaattcaacaacccttcatgctaaaaactctcaataaattaggtattgatgggacttatctcaaaataataagagctatctatgacaaacccacagccagtatcatactgaatggacaaaaactggaagcattcactttgaaaactggcacaagacagggatgccctctctcaccactcctattcaacatagtgttggaagttctggccagggcaatcaggcaggagaaggaaataaagggcattcaattaggaaaagaggaagtcaagttgtccttgtttgcagatgacatgattgtatatctagaaaaccccatcatctcagcccaaaatctccttaagctgataggcaacttcagcaaagtctcaggatacacaatcaatgtgcaaaaatcacaagcattcttatacaccaataacagacaaacagagagccaaatcatgagtgaactcccattcacaattgcttcaaagagaataaaatacctaggaatccagcttacaagggatgtgaaggacttcttcaaagagaactacaaaccactgctcaatgaaataaaagaggataaaaacaaatggaagaacattccatgctcatgggtaggaagaatcaatattgtgaaaatggccatactccccaagaggactccattattatcgctgcctagtacattatatgaggagctgtggagacttaggtcctacttcccattgtgccctcaactttacaacatggagcagaataccacagactgggtaatttataaagaacagtgcatttggctcacagctctggagactggggagtccaagagcactgcaccagcatttggcaagggttatcccatggcagaatacatcatatggggcagattgacacctcacatggctggctactcctctgagacaaaacttccagaggaacgatcaggcagcaacatctgctgttcaccaatatccgctgttctgcagcctctgctgctgatacccaggcaaacagggtctggagtggacctccagcaaactccaacagacctgcagctgagggtcctgactgttagaaggaaaactaacaaacagaaaggacatccacaccaaaaccccatctgtacgtcaccatcatcaaagaccaaaggatcaaattcacacataacaatattaaccttaaatgtaaatgggctaaatgctccaattaaaagacacagactggcaaattggataaagaggtcaagacccattcagtgtcctgtattcaggagacccatctcacgtgcagagacacacacaggatcaaaataaagggatggagggagatctaccaagcaaatggaaaacaaaaaaaggcaggggttgcaatcctagtctctgataaaacggactttaaaccaacaaagatcaaaagagacaaagaaggccattacatgatggtaaagggatcaattcaacaagaagagctaactaccctaaatatatatgcacccaatacaggagcacccagattcataaagcaagtccttagagacctacaaagagacttagactcccacacattaataatgggagactttaacaccccactgtcaacattagacagatcaacgagacagaaagttaacaaggatatccaggatttgaactcagctctgcaccaagtggacctaatagacatctacagaactctccaccccaaatcaacagaatatacattcttctcagcactacaccacatttattccaaaattgaccacatagttggaagtaaagcactcctcagcaaatataaaacaacagaaattataacaaactgtctctcagaccacagtgcaatcaaactcgaactcaggattaagaaactcactcaaaaccgctcaactacatggaaactgaacaacctgctcctgaatgactactgggtacataacaaaatgaaggcagaaataaatacattatttgaaaccaacgagaacaaagacacaacataccagaatctctgggacacattcaaagcagtgtgtagagggaaattcatagcactaaatgcccacaagagaaagcaggaaagatctaaaattgacaccctaacatcacaattaaaagaactagagaagcaagaacaaacacattcaaaagctagcagaaggcaagaaataactaagatcagagcaaaactgaaggaaatagagacacaaaaaaacccttcaaaaaatcaatgaatccaggagctggttttttgaacagatcaacaaaattgatagactgctagcaagactaataaagaagaaaagagagaagaatcaaatagacacaataaaaaatgacaaaggggatatcaccaccgatcccacagaaatacaaactaccatcagagaatactataaacacctctacgcaaataaactagaaaatctagaagaaatggataaattcctcgacacatacactctcccaagactaaaccaggaagaagttgaatctctgaatagaccaataacgggctctgaaattgaggcaataattaatagcttaccaaccaaaaaaagtccaggaccagatggattcatagccgaattctaccaaaggtacaaggaggaactggtaccattccttctgaaactattccaatcaataggaaaagagggaatcctccctaactcattttatgaggccagcatcattctgataccaaagccaggcagagacacaaccaaaaaagcaaattttagaccaatatccttgatgaacattgatgcaaaaatcctcaataaaatactggcaaaacgaatccagcagcacatcaaaaagcttatccaccatgatcaacatataaacaaagccaaagacaaaaaccacatgattatctcaatagatgcagaaaaagcctttgacaaaattcaacaacccttcatgctaaaaactctcaataaattaggtattgatgggacgtatttcaaaataataagagctatctatgacaaacccacagccaatatcatactgaatgggcaaaaactggaagcattccctttgaaaactggcacaagacagggatgccctctctcaccactcctattcaacatagtgttggaagttctggccagggcaattaggcaggagaaggaaataaagggtattcaattaggaaaagaggaagtcaaattgtccctgtttgcagatgacatgattgtatatctagaaaaccccattgtctcagcccaaaatctccttaagctgataagcaacttcagcaaagtctcaggatacaaaatcaatgtacaaaaatcacaagcattcttatacaccaacaacagacaaacagagagccaaatcatgagtgaactcccattcacaattgcttcaaagagaataaaatacctaggaatccaacttacaagggatgtgaaggacctcttcaaggagaactacaaaccactgctcaaggaaataaaagaggatacaaacaaatggaagaacattccatgctcatgggtaggaagaatcaatatcgtgaaaatggccatactgcccaaggtaatttatagattcaatgccatccccatcaagctactaattactttcttcacagaattggaaaaaactactttgaagttcatatggaaccaaaaaagagcccgcatcgccaagtcaatccctaagccaaaagaacaaagctggaggcatcacactacctgacttcaaactatactacaaggctacagtaaccaaaacagcatggtactggtaccaaagacagagatatagatcaatgggacagaacagagccctcagaaataatgccgcatatctacaactatctgatctttgacaaacctgagaaaaacaagcaatggggaaaggattccctgtttaataaatggtgctgggaaaactggctagccatatgtaggagaaagctgaaactggatcccttccttacaccttatacaaaaattaattcaagatggattaaagacttaaatgttagacctaaaaccataaaaaccctagaagaaaacctaggcaataccattcaggacataggcatgggcaaggacttcatgtctacaacaccaaaagcaatggcaacaaaagccaaaattgacaaatgggatctaattaaactaaagagcttctgcacagcaaaagaaactaccatcacagtgaacaggcaacctacagaatgggagaaaatttttacaatctacccatctgacaaagggctaatatccagaatctacaaagaactcaaacaaatttacaagaaaagaacaaacaaccccatcaacaagtgggtgaaggatatgaacagacacttctcaaaagaagacatttatacagccaaaaggcacatgaaaaaatgctcatcatcactggccatcagagaaatgcaaatcaaaaccacattgagataccatctcataccagttagaatggcgatcattaaaaagtcaggaaacaacaggtgctggagaggatgtggagaaataggaacacttttacactgttggtggaactgtaaactagttcaaccattgtggaagtcagtgtggcgattcctcagggatctagaactagaaataccatttgacccagccatcccattactgggtatatacccaaaggactataaatcatgctgctataaagacacatgcacacgtatgtttattgcagcactattcacaatagcaaaggcttggaaccaagccaaatgtccaacaatgataaactggattaagaaaatgtggcgcatatacaccatggaatactatgcggccataaaaaatgatgagttcatgtcctttgtagggacatggatgaaattggaaatcatcattctcagtaaactatcgcaagaacaaaaaaccaaacactgcatattgtcactcatagaccgtcttgaccagcgcaacttcctcctaggttccagcggggcctttccactgtcccatgacctggctgagcgggaccaggcctctgggacaggcaaggcctctcctcacaggcaactcaacccttcacatccagcccagccctcggtggactccggaccgctgaccgccaatcacaacacagcctctgctactttcagcctgccctgcctttgggctaaggctcccccagctggccacctggaacatggcacctttcgagtgaaaagttttctgggccacagtcctgccatcaatcaataa

SEQ ID NO: 9144 - DNA, 5122 bp, Homo sapiens
  SIMILAR (855)..(2072): 581254mologous to Homo sapiens putative p150,accession number U93565,Smith-Waterman Score=925.
aaagaaggccattacataatggtaaaaggatcaattcaacaagaagagctaactatcctaaatatatatgcacccaatacaggagcacccagattcataaagcaagtcctgagtgacctacaaagagacttagaatcccacacattaataatgggagactttaacaccccactgtcaacattagacagatcaacgagacagaaagtcaacaaggatacccaggaattgaactcagctctgcaccaagcagacctaatagacatctacagaactctccaccccaaatcaacagaatatacatttttttcagcacccacaccacacctattccaaaattgaccacatacttggaagtaaagcactcctcagcaaatgtaaaagaacagaaattataacaaactgtctctcagaccacagtgcaatcaaactagaactcaggattaggaaactcaactcaaaaccagctcagctacatggaaagtgaacaacctgcctcctggaatgacctactgggtaccataacggaaatgaaggccagaaattaaagatgttctttgaaacccaatgggaaccaaggacacagcataccagaatctctggggacacatttaaagcagggtgtagagggaaatttattgcactaaatgcccacaagaggaaagcaggaaaagatccaaaattgacacccctaacatcacaattaaaaaaaactagagaagcaagagcaaacaacattcaaaagctagcagaaggcaagaaataacttaaaatcagagcagaactgaaggaaatagagacacaaaaaaacccctccttcaacccttcaaaaaaattaatgaatcccaggagctgggttttttgaaaggatcaacaaaattgatagaccgcttagcaaggacttaataaagaaaaaaagagagaagaatcaaatagacacaataaaaaaatgataaagggaatatcaccaaccgatcccacagaaatacaaaactaccatcagagaatactataaacacctctacgcaaataaactagaaaatctaggagaaataaggattaattcctcgacacatacactctcccaagactaaaccaggaagaagttgaatctctgaacagaccaataacaggagctgaaattgtggcaataatcaatagcttaccacaccatgcacagtccaggaccagatggattcactgccgaattctaccagaggtacaaggaggaactggtaccattccttctgagactattccagtcaatagaagggagcgggaatcctccactaactcattttatgagggccagcatcattctgataccaaagccaggcagagacacaacaaaaaaaagagaattttagaccaatatccctgatgaacattggacggcaaaaatcccttaataaaaatactgacaaaactgaatcccagcagcacatcaaaaaagcttatcccaccatgattaaagtgggcttccatccccctgggatgcaagactggttccaacatacacaaatcaataaatcctaattcagcatataaacagaaccaaagacaaaaaccacatgattatctcaatagatgcagaaaaggtctttgacaaaattgaacagcccttcatgctaaaaactctcaataaattaggtactgatgggacatatatttcaaaataataagagctatcctatgacaaaaccccacagccaatatcatactgaatggggccaaaaactggaagcattcccctttgaaaaactggcacaagaacagggatgcccctctctcacccactccctattcaacataggtgtttgggaagttctgggccaggggcaattaggcaggagaaggaaatacagggtattctattaggaaaagaggaagtcaaatcctccctgctttgcagataaacatgattgtatatctaggaaatcccatcgttctcagcccaaaatctccttaagctgataaggaacttcagcaaagtctcaggatacaaaatcaatgtgcaaaaatcacaagcattcttatataccaataacagacaaacagagagccaaatcatgggtgtgagtgaactcatgagtgaactcccagttcacaattgcttcaaagagaataaaatacctaggaatccaacttacaagggatgtgaaggacctcttcaaggagaactacaaaccactgctcaaccgaaataaaagaggacacaaacaaatggaagaacattttcattccatgcttatgggtaggaagaatcagttatcatgaaaatggccatattgcccaaggtaatttacagattcaatgccatccccatcaagctaaccaatgactttcttcacagaattggaaaaaaactactttaaaggttcatatggaaccaaacaagagcctggtttcgccaagtcaatcctaagcccaaaagaacaaagttggaggcatcacgctacctgacttcaaactatactacaaggctacagtaaccaaaacagcatggtactggtaccaaaacagagatatagatcaatggaacagaacagatccctcagaaataatgccacattatctacaactatctgatctttgacaaacctgagaaaaacaggcaatggggaaaaggattccctatttaataaatgggtgctgggaaaactgggctagccatatgtagaaagctgaaactggatcccttccttacaccttatacaaaaattaattcaagatggatgaaagacttaaatgttagacctaaaaccataaaaatcctagaagaaaacctaggcatttaccattcaggacataggcatgggcaaggacttcatgtccaaaacaccaaaagcaatggcaacaaaggacaaaattgacaaatgggatctaattaaactaaaagagtttctgcacatctgcacagcaaaagaaactaccatcagagtgaacaggcaacctacaaaatgggagaaaattttcacaacctactcatctgacaaagggctaatatccagaatctacaatgaactcaaacaaatttacaagaaaaaaatcaaacaaccccatcaaaaagtggacgaaggcacatgaacagacacttctcaaaagaagacatttatgcagccaaaaaacacatgaaaaaaatgctcatcatcactggccatcagagaaatgcaaatcaaaaccacaatgagataccatctctcaccagttagaatggcgatcattaaaaagtcaggaaacaacaggtgctggagaggatgtggagaaataggaacacttttacactgttggtgggactgtaaactagttcaaccattgtggaagtcagtgtggcgattcctcagggatctagaactagaaataccatttgacccagccatcccattactgggtatatacccaaagaactctaaatcatgctgctataaagacacctgcacacgtatgtttattgcggcattattcacaatagcaaagacttggaaccaacccaaatgcccaacaatgatagactggattaagcaaatgtggcacatatacaccatggaatactatgcagccataaaaaatgatgagttcatgtcctttgtagggacatggatgaaattggaaagcaacattctcagtaaactatcgcaagaacaaaaaaccaaacaccgcatattctcactcataggtgggaattgaacaatgagatcacatggacacaggaaggggaatatcacactctggggactgtgtaacaagttttgtgcagattgccagtctaaaggtagcgcatcccacctggcgggccaggggtccagccgcgccggggtggtgggggtgggctgcgtgatgagccagatctgcctcagctgtggccatccgtcagcgtaaggttgctctggtggtcgtcttcagtttgtccagctcttccccttatcccccatcctccctgctgaggtgtgtgggcgcacagcgcgggactggcgggcagctccacctgcagccccagtgcgagatccactggatgaagccagctgggctcctgagtctggtggggccttggagaacctttatgtctagctcagggattgtaaatacaccagtcggcactctgtgaatctgggggtgcacatatccagggtaaagtcagttaacctcgaccagtggactcaagaacagattcaggtacttagcccaagagtgagtcagctgcttccatatatctatgtaaaaggaattccagatgaatttgtttttgagaaggtgaaaatggtaagttgggaagtatttgcactgtatggacagcctcaggtatgtgtatatttgtgaaagggaatggatttgttgggccttggtaagagttggacttttcagcttccatgttcttacaaattttgataaattctcagtgaccctggtctgttggcctctgttccatccccttcttcttccggttccagaaaggtgagtcttgtgggctcctcaggattaaagaacattctgaaatgggtgattttgatatcttaatcggagccagggagcaaatcagaagaaataggcaagaaacagctctctaaagactccattctttcactgtatggatcccagacgcctcaaatgcctactcaaggtagatttcatgggtgtcatggccatgtgccaggtagagacatgagggcttccatgcaggaattacctcctaacagcataatggggagcatgatgcctccaccagtaggcatggttgctcagccaggagcttctgggatggttgcccccatggccatgcctgcaggctatatgggtggcatgcaggcatcaatgatgggtgtgccgaatggaatgatgaccacccagcaggctggctacatggcaggcatggcagctatgccccagactgtgtatggggtccagccagctcagcagctgcaatggaaccttactcaggtaagctaccccattttacttgcagcaagagttttgagccttcctcaagtttttctcggtttgtcaatgagtggcggaaatggacaggcagcaaatcagactctcagtcctcagatgtggaaataaaaacaaaacacctgtatggctgccattctcttcagccctcgctctcccctttccacagcctcca

SEQ ID NO: 9145 - DNA, 1680 bp, Homo sapiens
  SIMILAR (1680)..(1021): 991254mologous to Escherichia coli Sensor kinase CitA,accession number D90702,Smith-Waterman Score=1090.
ttacccctgtgtctcttcccagtctgccagcgtatatagcgttgccccagctgctgacatctccataaacgcgtgcgcactgtcctggggctggatattcacgccacgacaaccatcggtaatcacgtttaccttataacctaactgtaacgcgtccagcacggtaaacttcacgcaatagtcagtagccaggcccataacgatcaattcatcgatttcatgatcgcgtaaccagtcatcgagagaggttttctgccgacggccgttatcaaaaaaggcactgtaactgtcaactaaaggattttcgcctttatggaacaccgctgcgatcgctttttggtgcagtaacggatgtaattgtgcgccttcactgttctgcacacagtgatctggccagaaggtttgtggcaaaccgtcgagttggcctggcgtataaggctctacaccgtgctgactggcaaaactgccgtgattcgccgggtgccagtcctgactggcgataaccgcttcaccgcgcgactggcaccagtcaatcaggcggttagcgacatccaccgtactgtcaccttccggcacggcgagcgcgccaccagcacagaaatcattttgtgcggacccagtgcgcttgtatcgacattcaggagctgccgcgtcctggcgggagtgctcaagcaggttctgcaaataatgcagcgtgactgcagggaccagcggcgcgatagccgtgagatcgtttttcgccagcagttgacgtacccgggaagcggatatcggcatctcctggtaacgcagccgctcaatttcaaccagttcgatgggcggtgcggagatagtcggcgtttccagccagtagcgcatatcctggttgtactgggcggtaacgcgacaaaagggttcagtaccgacaaagcggtgagttacacccagcgcgggagcgaggtactgacggaaaatcttcagatcaatttcggtgtaacaatggttaatgacgctccaatccaggccgtcttcataggggaacgtgatatccagtcctggcggcagttgcgaaagctggctaccggggacaatgatcatttttagccccagttcccgggcgcgctgcactttaccaaaaagcagccccgccacctggcgatcggcaaacgcctcgcgcaggctgtcaataagctgttgctgggcctgagactccccctgcaccatcgccagcacgcgatcatactctttcatctgcaacagaccattgagcgtcgacatccaattgagatgctcgtgtcgcaatgtacgaaggctctcaacgtattgttttatttgcgtcagttgcgcattgagggtggaaatttcgtctttactacgaaagctgataatggcccccagcaaatcatcacctgaacgaatagcttcccggttggcaataacgctcagaccgttaaagttcgccaccacatcctgacgtttttcatcaatctgttcggtaaagaaatcggcgggcctgaccacttcaacaatgggtttacccaaccattgccgtccgggggaactcagccccagcatctttcttgcgttacgattgatggcggtaatgtaaccatgcggatccaccgcaatcagcccttcataaaccgaactaaacagcgcctcttgctgacggaccacgcgtgcgatttgctttggctccat

SEQ ID NO: 9146 - DNA, 2601 bp, Homo sapiens
  SIMILAR (397)..(900): 1001254mologous to Escherichia coli ORF_506,accession number U18997,Smith-Waterman Score=877.
atgaacggtcctggtcgcaacttttatttagcacggagcagttctggcagcagctgccggggactggatcgggacgcgccagacagaacatatcgcgcaaaacgccgcgcgaacacgccggtggttaccgccgcgacaacggcaataattgggccgtgccccatatccagtgcaaccttgtgccccgatgatagaaaagaccaccagtccgagcgcatcgagcaccagaaacactttgcgcaagtaaagcattacaagagcaacgatattgggtttttgagttactccggtaatgtcgtcttagcaaagctggtaagcaatggatggtcaaataatttcctcaatgccgtctttacctcggcattaatgtttggttatttcatcggctcacttactgagctgaacggcgatctaaagaatgtgagcagtcacttaccttcaccgttagccaaacctgcgggtgaaccactagcggtaaacgttaaggttgatggcaatctcaacagctttgaattaaccggacaggctggtgcggataatcatttcaatagccgctggttgctcggtcaaaagctgacgctcgatcgtgctatttgggcggcagacagtaaaacgctcccgccgttgccggaacaaagtggcgttgaactcaatatgccgccgatgaatggtgccgagtggctggccctgttccagaaaggcgctgcggagagtgtcggtggtgcagcgagtttcccacaacacataacgttacgtacgcctatgttgtcactgggaaatcagcaatggaataacctgagtattgtttcgcaaccgacggcaaatggcaccctggttgaagcgcaagggcgtgaaatcaacgccacgctagcgatgcgtaataacgcgccgtggctggcgatatcaaatatctttattacaacccgagcgtggcgaaaactcgtgaccacctctctaccggtactcgaccgcgaggtgctggacgaactgcgcgagatcgcaggcacggaaacggcgaccatcatcgacgtattcctcgatgacaccaccccgctcgtgcgccaactgcaggaggccgccgtcgtacccgacctggagcagcttcgcgaactggcgcacagcctcaaatcggccagcgccaacgtcggcgcccttgccctgtcggccgcggcacgccgcgtggaactggccgcccgtgccggcaggatcgagcgccccgcggtgatggtcgcgctgatcatcgccgacattggtgtcgtagtagtaggccccaacaatggaccaacgatcggcaattggccagctggcgacagcacctacctgcgaaataccattcttatattgctcagcagtggaatagtacttaggcagcgtagcctgaatatattccgggctggcgtaacggtaattcagctgtaccagacggtcttcatcccgacggtattcaatgctggagttactggtcgctacgttatccagacgtgtatcgtactgaatcccgccacgcaatccccaacgctcggagatacgccattaaatagcttgcaaaatacgtggccgtactggcgagcgaacaagttatggacggctgctgctggcgctgcgataccaaagttgagcggaaagagatcccgcagtggtttatcaaaatcactggttacgctgacgagctggtcaacgagctggatggactggatcactgggactcgtgagcagacggccccctcccaggagctgccccggcgcgtggagcgcgagctcgtggccttcctggtggcctgctgggccgtgagctgcgccctggcggtcgtgagtaacgccgccggccccctggctgacgcccgctacgggctgacccccgccatcctgcccaaggacgccgtcatttaccccgtcgagcagctcctgatgtgcatgccggcgctcctgcagctggtcctggccgacggcctgcgccgggggcgtcgctcggcggtctgcggcaccatcgccctgcagatcttcctgggggcgtgcgcggccctgttcgccctggtggagaagatcggcgagcacccttctaagctcgcatgcctcgtgagcgaaggcaaaccggatagcatcccggcggcggaaaaatttgctgctgaaaataaaaatacttatggtgcgctggcttctttggaacttgcgcagcaatttgttgacaaaaatgaactagagaaagctgccgcccagttacaacaggggctggcagacacgagcgatgaaaatctcaaagccgtgataaatctgcgtcttgctcgcgttcaggtacagctcaagcaggctgatgccgcgctgaaaacccttgataccatcaaaggtgaagggtgggctgccattgttgccgacctgcgtggtgaagcattgctgagcaaaggtgataagcaaggactgctttccgttacccttttaagcggctgttcgctgtttaacagcgaagaagatgtggtaaagatgtccccattgccaaccgttgaaaaccagtttacgccgaccacggcgtggagcacttccgttggtagcggcattggcaacttctattccaatcttcatccggcactggcgggcaatgattga

SEQ ID NO: 9147 - DNA, 4512 bp, Homo sapiens
  SIMILAR (700)..(1476): 841254mologous to Escherichia coli orfA,accession number X80762,Smith-Waterman Score=1116.
  misc_feature (1)...(4512): n = a,t,c or g
atgaaatccattacgcgtttcatagcgttgcggcacgcacttgcttcatcggcaccagatgcggattactgtaatcaccggtcatgggttttccagtgcttcaacaatgcgggcaacaggatgtatatccaccgcatcggcagccacccggcaagctgccttgcatggaagagagcaccgcagaacgccgcgtggggtaccaccattggcaaaatgtgtttatgctcaccaaactgttggcgcttgcattccccagcctgtcatcagcatgatggtattttggtggaaaatagccgccagctcgcggattttccgtgcgccaacaccacaaatctctgctgcccattcggcggtttgcgctattccgtaatggaccgagacacgaccactcgaggctctaccattgtgcgcaaaggggggggcaaagaaacttctcaactgaacaaactggatgacccagactgttctaccagggaggcgaacaaggacccacaaacaagcctcacccggggggtcccagggggcagacccaccggggaggcccccaccaaaaaagaaggttgcgagttgaaacctacacgaaaaatccgaacccttttctgcggtccccgcaacggtcttcaaggaaattaccacccgggaaacccatcatgggaccgctctgttttgcacatgggaaatccggggggaattccggttcttacccccgttaaccaactttggaaaaccgtggccaatcaatttcaggccgaagatcgtcgacgttttgtcgtcaaaattttatcgcctggaaacgttgacaagccgatcaaatcctcgaagacatcgaatttgcgttgccagctggtaaatgatgaagttccggtcgcagcacctgtggcctttacgggtcagactttatggaatcatcagggattttatttcgctgtttgtccaagcgtcggtggtcgccagttcgaagctgataatatcgatcagatggaagcggttgggcgttatttagggcgtatgcaccagacggggcgcaaacagctttttatccatcgcccgaccatcggtttgaacgaatatctcattgagccacgcaagctgtttgaggacgctacactgataccttccgggttgaaagcggcattcctgaaagcgacagatgagctgattgccgccgttacagcacactggcgagaagatttcaccgttctgcggctacatggagactgccacgccgggaatattctctggcgcgataaaccaatgtttgtttttctggatgatgcaccccatggtccagccgttcaggatttgtggatgttgctcaatggcgataaagccgagcagcggatgcaactggaaactattattgaagcttatgaagaatttagcgagttcgacaccgctgaaatcggactgattgaacctttacgcgccatgcgtttggtttattatcttgcctggctaatgcggcgttggctggagcattgtcagagcgacggagcactagagaaaaaagtgcgacacaaagcgaggacaccacgaccaggaaacacagaagcatccgagagatctggagacaacagcggacacagagaaggacgtcgcgatccacggcgctctgacggacacacacgcgacacaagagacacctgcgagagtaacacagcgcattcgcttacgcaagactgtcacgcgcacgttaagttggtcagaagacgtgaagagcatttcgcagagtgtcaggggacagaacaatccccggggattctctatgaaacacccgatttttcccacgggttttgggcacggattcgtttgctggatatccagcagaagaaagtggagaggcggaccggcgtttatttgccgagttatggcggtgtcgtagcgaactcttatctgccatcaaacgggctttctgcgttggggctgtatgcctgggcgcgggtcgatgaatcttccgataataattcattgcttaatccggcgaagaaattcacttatcaggcaccgcaaaacgttgaggacacttatgtcgtgtttatcatcggtgaaaccacgcgttgggaccatatgggtattttcggctatgagcgtaataccacgccgaaactggcccaggagaaaaatctggcggcgttccgtggttactcctgtgataccgcaaccaaactcgtactgcgttgcatgtttgtacgtcaggggggcgcggaagataatccgcagcgcacattaaaagaacagancattaaaaaggttctgaagctgtttggattcagccccgccctctacgctatgcagagcgaaatgtggttctacagcaacacgatggcggacaacattgcttatcgtgagcagattggtgcggagccacgtaatcgtggcaagccggtagatgatatgttgctggacgttgaccacgtttatcggcaatcctgctggccacatgagatttttgcttatcgagcattatttcccggcgtcgggttaagttggtttcccacgacggcgacaatgcttttccggatcgatttgcacatgcgggttaccgaggcgatccattgcatggaagatggacccgttattgcgccgcgatgccgcgccaggaatcacaatatccgccagttctgcaacgcgcggatcgtgatagtgattgagttcaatgatcactttcttcgcccgcagcagccagactcgaccatccggtgccagtgccgatgcttcaatgacggcaacatcaatgtcgccgaagaaaccgtaattgaccatttgcgccacttcgctcaaatgcaggtcaacgaaactcaccgcgccctgattgatctttttacttataatcaggagaaccgatctcattcatctccgatcggggaacgagaggaacccagtacaggtacaggcaacggccgtcaaaagaatctcccggtaagtagggccataaccgccgccaccccgggcccatcccggcatcgcgtgccgccaatcaacaccgtcaaacttggaggtcgtgaccgcgaccagcgttgccagcataaaaatggacagttccgacgaggatcaccggtcggcggcccacgcggtcggaaatcgggccataaaacagctgtgagacaccgaccttcgaaagaagcggaatcccagtctatgtttggatgcgacctgcagaagcagcagtacctcagacttagcgtcgtcactaaaaagcaccatgatctccgagacgacaaggagatcagcacgagtgtgtgtcagaagacacaacaatcatatagaatgtgcccgaacactacactcacatgcagagtaccaagcaccagtagacagctagacaccgatcgagacctagagaccgtgtcggagacaacgatggacactatggacactgtgaagcggcgtaacttctaccggaaccactatggggtgcctacgatcgaagaaatccgccgtgcggtgaaaagtcagagtggtttctccgctgcaagactttcggaacgtcacacaacgcgaatcgacgtgcggaatggtatccgcaaccgagaaggcagagcccggacaaacccgaaaatatgtcgctccatggccatctgggagccatcatttgggcaccgaacatggaaccagttcttgtcaagctttacgaaattccggatgtcgggcacccaagatggcaaacaggtgccagcacaatgcgatttcaggacacgaaatcgtgtcgctgacgtcatgctgtgcgaattcaggtccccctctcgcaccacactacatcgagcgacggcgagcaacacaaccgtggatctagcacgaagagtcactgccacatcagactcactcaccagctactcgacttgcacactcgccccgagcgaacacactcaccatgagcaccaataccacaagttccccaagtcaaccagactgactctcctttctccaattaaccgccacgaatcgtcgaaaaatccggagtgtccgcacaggcacatggagagaacatctagggtttcaaagcagatcttccattccgccttctttttctacactggaatggggaccgcactccacctcgagcactggactcagagagccaactggagactcagccttcgagatggcaccgcgacacaagagtgggaccatctgactcggacaagaagcacggctgggatcgggactacggcactcagaatgcacctcaatatgcgcaccggtactagaacagggagtcccactgtgagtaaagcaccggagcaccggggtggccctggacagtccggaacgagccgagaaccagggctacccccagcgcacaaggaccgaggacgtgtggtcgagtggaacgaactacacgtcgtagccagcagaccacaacaggaacctacccggacacaagctcgcggtcgtactcgcactgcccgggacttcgaggtccctggagctggagaacgaaggaacccaaccgtccaaacactgggggaattggaaaagttggccacttcggaatctcgaaagtccctgtga

SEQ ID NO: 9148 - DNA, 510 bp, Homo sapiens
  SIMILAR (19)..(264): 981254mologous to Escherichia coli No definition line found,accession number U00039,Smith-Waterman Score=424.
atgtgttttgtttattatgagaaaaatctggcggcgttccgtggttactcctgtgataccgcaaccaaactctcaatgcgttgcatgtttgtacgtcaggggggcgcggaagataatccgcagcgcacattaaaagaacagaacattttcgcggttctgaagcagttaggattcagttctgacctctacgctatgcagagcgaaatgtggttctacagcaacacgatggcggacaacattgcttatcgtgagcagattggtgcaagcgaaatgtggttctacagcaacacgatggcggacaacattgcttatcgtgagcagattggtgcggagccacgtaatcgtggcaagccggtagatgatatgttgctggtagacgaaatgcagcaatcgatagggcgcaacccggatggccctaatcattattcggaaggctactttaggttgaaggacacttcaatatcaagagaactatctaaccaacaaaaattggtttccaacatgatctag

SEQ ID NO: 9149 - DNA, 3676 bp, Homo sapiens
  SIMILAR (3351)..(2323): 961254mologous to Escherichia coli No definition line found,accession number U00039,Smith-Waterman Score=1748.
atggaacaatatgatcaaattggcgcaagactggaccgcttgcctttggcccggtttcattatcgtatatttggtattataagctttagtctgttattaacagggtttttgagttactccggtaatgtcgtcttagctaagctggtaagcaatggatggtcaaataatttcctcaatgccgcctttacctcggcattaatgtttggttatttcatcggctcacttactggtgggtttattggtgactactttgggcggcgcagggcgtttcgcataaatcttctcatcgtcggtattgctgcaacaggggccgcttttgtccctgatatgtactggctcatcttctttcgcttcctgatgggaacaggaatgggggcgctgattatggttggctatgcctcatttacggagtttatccccgcgacggtgcgtggaaaatggtccgcgcggctctcatttgttggtaactggtcgcccatgctgtctgcggcgataggcgtggtggttatcgctttttttagttggcgaataatgtttctgctgggtggtattggcatactgttagcctggtttctctcaggtaaatactttatcgagtcgccacgatggctggcagggaaagggcaaatcgcaggtgcagaatgccaacttcgtgaagtagagcagcaaattgaaagagagaagagtattcgtttacccccgcttacttcgtatcagagcaacagcaaggttaaagtaatcaagggtactttctggctcctgtttaaaggtgaaatgttacgacgtacattagtcgcgattactgttttaattgcaatgaacatttcgctttataccatcaccgtatggataccgaccatatttgttaactccggcattgatgtcgataaatcaatattaatgaccgctgttattatgattggcgctccggtaggaatatttattgcggcattaattattgatcattttcctcgtcggttatttggctccaccttacttattattattgccgtgttaggctatatctattcaattcagactacagagtgggcgattttaatctatggactggtgatgatcttctttttatacatgtatgtttgcttcgcgtcggcggtttatatcccggagctttggccaacgcatttacgcctgcgcggttcgggtttcgttaatgccgtcggacggatcgtcgcagtcttcacgccctatggcgttgcggcattattaacacattatgggtcgatcacggtgtttatggtacttggtgttatgttattgctctgtgcgctggttctctccatttttggcatcgaacacgcggacaggtgtcgttggacagagatttctgaggtgaatcaaatctttcgttgatggccatcaattgccagatgtgccactgacgtgtcctatttggcctacaatgccagtacacgcaatgtaggacaccgtcaacacttacccctgtgtctcttcccagtctgccagcgtatatagcgttgccccagctgctgacatctccataaacgcgtgcgcactgtcctggcgctggatattcacgccacggcgcgcatcggtaatcacgtttaccttataacctaactgtaacgcgtccagcacggtaaacttcacccaatagtcagtagccaggcccatatcgatcaattcatcgatttcatgatcgcgtaaccagtaatcgagagaggttttctgccgacggccgttctcaaaaaaggcactgtaactgtcaactaaaggattttcgcctttatggaacaccgctgcgatcgctttttggtgcaataacggatgaaattgtgcgccttcactgttctgcacacagtgatctggccagaaggtttgtggcaaaccgtcgagttggcctggcgtataaggctctacaccgtgctgactggcaaaactgccgtgattcgccgggtgccagtcctgactggcgataaccgcttcaccgcgcgactggcaccagtcaatcaggcggttagcgacatccaccgtactgtcaccttccggcacggggagcgcgccaccagcacagaaatcattttgtaaatcgaccagtaacagggcgcgagggggcattacagtctccgggggcataacacccatgttcactgtacgggcatcatcgggtccgttgacacacaatacgggaacgcggggctgtaaaccgaggaggtggttgagggcgtacacagcaaagaggggagaaagataccggtgggcgaaaaggcacgaagaaaaccggaaaagcatagctggtccggcgatgtactcagttgttgttttcgttaattccaccatcggtgaagtatagccaagacaacccatgatggtatcgtacagctctacgtgacggcgtggcactttcatgtcggcttcttttttcagctgcgcaaacgcctgcgcattggccggattttccagatatttatctgacatccagaccatcatcggtacgcggaactgctccggcggtgccagttcacgcggcgtgccgtgcaggtgctcgcgttcattaattgactcaccgtggtcagctgcgtagaacacaatcgctttcttatcgcgaacctgatcaatcacgctggagataaagtgatccacataggtcaccgagttgtcataggagttgatcatctgcgctttggtacagccgctatcaacaccaatacattccggcttccactgcgcgaagctacgcggataacgctgggtgtagttaaaatgcgaacctttggtatgcagaatgatcagatgcttaccatccgggttgcgccctagcgattgctgcatttcgtctaccagcaacatatcatctaccggcttgccacgattacgtggctccgcaccaatctgctcacgataagcaatgttgtccgccatcgtgttgctgtagaaccacatttcgctctgcatagcgtagaggtcagaactgaatcctaactgcttcagaaccgcgaaaatgttctgttcttttaatgtgcgctgcggattatcttccgcgcccccctgacgtacaaacatgcaacgcagtgagagtttggttgcggtatcacaggagtaaccacggaacgccgccagatttttctcctgggccagtttcggcgtggtattacgctcatagccgaaaatacccatatggtcccaacgcgtggtttcaccgatgataaacacgacataagtgtcatcaacgttttgcggtgcctgataagtgaatttcttcgccggattaagcaatgaattattatcggaagattcatcgactcgcgcccagggcatacagccccaacgcagaaagcccagtttgatggccagataagagttcgctacgaacaccggcataactcggccaatcaacgccggtcgccctctccactttcttctgctggatatccagcaaacgaatcggtgcccaaaccataatacccgccagtacgacgaccgccaggctgcgaatacgctgccctggggttcgcagttgtcggagcaaggtgtagcgacagcggttattccagataaggataagaggcaatgcactaacggcgattaaccagagaataaagttcagaccaacaacttcttttgacaggtcgatatcggtggtcatgacggaagcgatgatgccataaccaatgaccacattaaggaaggtcat

SEQ ID NO: 9150 - DNA, 2655 bp, Homo sapiens
  SIMILAR (1)..(480): 981254mologous to Escherichia coli TorCAD response regulator,accession number D90736,Smith-Waterman Score=796.
atgttaacccgcgccctgcgagaacgctcaacggtggggattattctggttaccggacgcagcgatcggattgaccgtattgttgggctggaaatgggcgcagacgattacgtcaccaaaccgctggaactgcgcgaactggtagtacgggtgaaaaatctgctctggcgaatcgacctcgcgcgacaagctcaaccgcacactcaggacaactgctatcgctttgccggttattgcctgaatgtgtcgcgccatacgctggagcgggatggcgagccgattaaactgacccgcgcagagtatgaaatgttggtggcatttgtgacgaatccgggcgaaattctcagccgtgaacgtctgctacgtatgctttctgcgcgtcgggtggaaaaccctgacctgcgcaccgtcgatgtgttaattcgtcgtttacgtcataaactcagcgcggatttactggtgacgcaacatgccgggtacctgtgtgaagtaaaggacccggagcggggtcaggggacggtccaatatatggcctcgttgggcgcgccaatgccgatgctggcagcgattattgcggtagttatggaagtgcccgccgcgatattaatcgtgcttggctttttcacccgtccgctggcggtgctgtttattttctacacgctggaagaaatcaaacgcatatcctttatcaaacgcagggtcggaaacaaagatgaaataacacggtgcaggtggcgtcgtttccatgatgatggcataaccttcctgcggctgctcgatgcgggcctgaccattccatccggcaaaaccattgttcacccactggcgcggcaacggcgcgggctggttaaaatccagttcctgcgtgatagacaccgctgcgatgttcatacaccagacacaaactatcatcgctgtgcgagacacattgccactcgcccagccagccatcgccgtgtagatagtgcgcatcccactcaacattcggttgcagttgatactcacgcccctgccagacaaaacgattgccgatcacccggtttgcaaatggcaccagcggaaaacatgaggcatcggttgacacaccgatttttttaccaggacgtaagagcggcgtcgtatcgcgccagaagccttcgattacgccgacctgggctgacgttctcgtgtatctgtctgctcggcggcgtggtgatgttgtatgtgaatcctagtgtgattggcgcgttcacgatgattacaaccgtttccgcgattctgtttatgttcgtctggacgattatcctttgctcgtaccttgtgtatcgcaaacagcgtcctcatctacatgagaagtcgatctacaagatgccgctcggcaagctgatgtgctgggtatgtatggcgttctttgtgttcgtggtcgtgttgctgacactggaagatgacactcgccaggcgctgctggttaccccgctgtggtttatcgcgctggggttgggctggctgtttattggtggtgcaggcttctggcggcggtgtgacgttattggtggtgtgtttaatcacttccagcagttcgcccgcttcatcgtgctcgctttccattacgctgattggccccattgcctggctgcccatgccttgtttgatcatcgggaagaggatctgctcttctttcatcatgtggctggaaagctcttcatgcagcatggtcaggccatcttccagacgcgttacgctcacgttacccgcattgtaagaacctacaaagacaaactgcccctggtgatcggtggaaatatgcgtcggactacccggcagcgcagactctgcggcaaaggtcagtgcgccatcgtccggggcgatacgatacgccaggacgcgaaactcagggcgaacaccaacatagagataacgtttgtccgggctgaccaccatcggctgcacctgccccggcacatcgacaacctgtgtcagcgtcagtgcgccttcatgattcagattccagaccattttggtaagcatgtcgaacatgaactgggactggagtgtgaatggtcctggcacgatcaggttgatattgcacgcggcggcaacagcaaagtaaacgttgacgaaatggtgaggcaacagttgtttgcttctaaaatggcggagaacatggcgaggcttgctgccttacttcattacttcagcggtgatggaggcgatatatctgttaccggtgcgttcaccgaatacgtgcgcaacaaccgtcttccggagcctgtcatacgcgtaaaacagccagcgctggcgcgatttagccccgacgtatccccactgttcgtccatttccgcgcagacgatgacgtcactgcccggctgtatgcgcgaggttaccgactgcggcctgagttttttaaatggcggaaaatcgtgttgaggccaacgcccataatgcgggctgttgcccggcatccaacgccattcatggccatatcaatgattttctgcaacaaacgggaccgaggcaacgacgggtactactggcaccacaacgaccactaccggcgcaaccacgactgctactaccactggtggcgtggctgctggcgctgtcggcacggcgacagttgtcggtgtggcaacggctgttggtgtggcgacgttggcagttgttgcagcaaatga

SEQ ID NO: 9151 - DNA, 785 bp, Homo sapiens
  SIMILAR (90)..(512): 1001254mologous to Escherichia coli yqjF,accession number Y11070,Smith-Waterman Score=736.
agagcggcaaaacgtttgatgcgaaactgttgatagatgagaacatcgcgcttaaatcactgtaaccaggataattagcgaatatctcaatgcctggggcgtggcgaggtgcaagagtgtgtattacgtttaaatcacattatcttgcaaagggattggttatgaacacactacgttattttgattttggagctgcccgccccgttttgttattaattgcccgtatcgccgtggtcttaattttcattatttttggttttcccaaaatgatgggctttgacggtacggtccaatatatggcctcgttgggcgcgccaatgccgatgctggcagcgattattgcggtagttatggaagtgcccgccgcgatattaatcgtgcttggctttttcacccgtccgctggcggtgctgtttattttctacacgctgggtacggcggtgattggtcaccattactgggatatgaccggcgatgcggttgggccaaatatgattaatttctggaagaatcgcaatgagatcacccccttccgggcgatgatgatcatccggcgcatggctcatcggttccagacagaagaaatcaaacgcatatcctttatcaaacgcagggtcggaaacaaagatgaaataacacggtgcaggtggcgtcgtttccatgatgatggcataaccttcctgcggctgctcgatgcgggcctgaccattccatccggcaaaaccattgttcacccactggcgcggcaacggcgcgggctggttaaaatccagttcctgcggtag

SEQ ID NO: 9152 - DNA, 1968 bp, Homo sapiens
  SIMILAR (397)..(1083): 901254mologous to Escherichia coli Hypothtical protein in gltJ 5'region ,accession number D90705,Smith-Waterman Score=1047.
atgaacaattcccagggaatccccacaggaaggaggaaccactctcaaactgaaattattgaagagaaccatcatgctgctcatgactggaatacagaggagctgtgtggggagcgcggaaaaacaccgggatcccagcgcgaggagctggccgaggtggatgtggactggctgatcgccgagcgccccggcaagcatccacgcaagaacaaaacggccatcaacatcgaatacatgaaagccagcatccgggccagggtggagcacccatttcgcatcatcaagcgacagttcggcttcgtgaaagccagatacaaggggttgctgaaaaacgataaccaactggcgatgttattcacgctggccaacctgtttcgggcggaccaaatgatacgactggcacaggcagatgacgccgccccggcagcgggcagtacactggacaaaatcgccaaaaacggtgtgattgtcgtcggtcaccgtgaatcttcagtgcctttctcttattacgacaatcagcaaaaagtggtgggttactcgcaggattactccaacgccattgttgaagcagtgaaaaagacactcaacaaaccggacttgcaggtaaaactgattccgattacctcacaaaaccgtattccactgctgcaaaacggcactttcgattttgactgtggttctaccaccaacaacgtcgaacgccaaaaacaggcggctttctctgacactattttcgtggtcggtacgcgcctgttgaccaaaaagggtggcgatatcaaagattttgccaacctgaaagacaaagccgtagtcgtcacttccggcactacctctgaagttttgctcaacaaactgaatgaagagcaaaacatgaatatgcgcatcatcagcgccaaagatcacggtgactctttccgcaccctggaaagcggtcgtgccgttgcctttatgctggatgacgctctgctggccggtgaacgtgcgaaagcgaagaaaccagacacctggaacatcgtcggcagccgcagcccaggaggctacgggtgtatttgccgtcaccaggacaaaggctatgacagagtcccgctggtggtgccgttgctgttttatcatggcgaaaactcgccttacccgtactcactcaactggctggatgagtttgacgatccgcaacttgcccggcagttgtacaccgaagcttttctgttggtggatatcaccatcgtacctgacgatgagatcatgcaacatcggcgtatagctctgctggaactgattccaaagcatattcgcgaacgcgatttaatcgggatggtcgacaggatcaacacgcttttgatagcaccatcacacaagacaagacgacgggaccacaaaaacgagcagacacagactacgcaagcagagggaaataacgaagccaaaccgccacaggaaaccaaaacgacagcgaagacgcaaagacctgagccagagacaccgaataggcaaaaccaacaaacagcgaggccgcaaagatcgacgacagcccggaccgagaagagcaacaaccagaagcacaacagcacaaagacgccagcaatgacgacgaacgcacactacagacagaaacgtgtagtgtctgtggaccaggctgcggtacagcaaagtattatcgaagggctggtctgggagcaggcgacacccacaacgattactcatccacagcaacttcacgaagaactggcgcgtattcgccgtcagggctggagctatgacaacggcgaagattacgccgatgtccgtggtgtcgctgcgccggtgtttaacgccaataacgagcttaccgctgcgatctcggtggtcggtacccgcttacaaatcaatgaagaataccgtgattatctggcgggcaaggccattgcctgcgccagggatatttcacgtctgttgggatggaaaagtccctttgacttacaagcctcataa

SEQ ID NO: 9153 - DNA, 1575 bp, Homo sapiens
  SIMILAR (1575)..(1081): 951254mologous to Escherichia coli Tail fiber protein GP37,accession number D90774,Smith-Waterman Score=780.
ttacagggtcacttggttggtgattatgtgtcgctgtcgtgtttgccgtttggaatcatggggcacggcaactggccgctgtgggtgctgacggcatgtttggttttgctgctgtgttgatgagtcttcgccgacagtgaattcagcagtaagcgccgtcagaccagaaaagagattttcttgtcccgcatggagcagattcgatcgatgaatttccgccacctgctggagcagcatcaactggcccgccaattgttcaagaccatcaatcgctggctggccgaagcaggcgtcatgatgactcaaggcaccttggtcgatgccaccatcattgaggcacccagctcgaccaagaacaaagagcagcaacgcgatccggagatgcatcagaccaagaaaggcaatcagtggcagtgcggcgatatgtggtgcaaggtcccacgcgtgctccccttgacgatcccgaaataaggtgtaacaacataagctgctaaaatagggaaagccaaattgaagaagttccaacggagcaactagaggccaaaggaatcggggaccgggaacccgcacacaacgtcgaaaatagggacccaagggccgataacaagcaatgcaatgccactccatagggcctggagacaccgggccaacgcaaacgagaggagcaggatccagtacccatccgaggcatggaacgggaaaaggaccccccagttggcccagggaacaggaatagggagcctcagagcaattagacggcaaacctaggacccagatgcggaatcgtcgaccaaaggtcgtgttcgtgaagaaatgggagaaagtgcgagttagtaagggtcgtaagggtagaaggaggcgagcgtcgcgaagtgtgttatgccgtgggcgcgcgggttgtggggggcccgcggccggccgttgtttggggcttggggggaaaggggggcccgttgtttgttgggccggcgcgttttgggttggtgggtttcccgaagaaggttgaggaaggtttctaaagggccgaagcacgagcgccaggagactgggggaaggaacaggatgatgaacaagtgcaaatgagctacccgcctgtccggctgacgtgctggctgcgcgtgctgagtccccagcatcagccgcatggtttcccgcttcacgggctaatgtgcggcaatcactggctgacttcttcgcggctgccgtgttctgtgccaccgcggacgcgttacgcgccacctcttccaccatcagttcaaaacggcgcagtgcctccggacgggcatcatcctccgtcatggcaccgagaaaatcattcagcgtaccgggttgagaatcttcatacacggtaatggtcccggcatgtgacggcgggaatccttccaccaacagaataacgctgtactgaccgtactcaacgtccatgctgtaacgcccggcttcatccggattttctgaggccagcgtgttcaccaccaccgtggtgctgttacgttttgctttcagctggattgtgcagttctgtaccggttttcctgtgccgtctttcagtacacctgaaatctttactgccat

SEQ ID NO: 9154 - DNA, 595 bp, Homo sapiens
  SIMILAR (589)..(377): 971254mologous to Escherichia coli IS5 39.3kDa protein,accession number U70214,Smith-Waterman Score=362.
ctttggtcgacgattccgcatctgggtcctaggtttgccgtctaattgctctgaggctccctattcctgttccctgggccaactggggggtccttttcccgttccatgcctcggatgggtactggatcctgctcctctcgtttgcgttggcccggtgtctccaggccctatggagtggcattgcattgcttgttatcggcccttgggtccctattttcgacgttgtgtgcgggttcccggtccccgattcctttggcctctagttgctccgttggaacttcttcaatttggctttccctattttagcagcttatgttgttacaccttatttcgggatcgtcaaggggagcacgcgtgggaccttgcaccacatatcgccgcactgccactgattgcctttcttggtctgatgcatctccggatcgcgttgctgctctttgttcttggtcgagctgggtgcctcaatgatggtggcatcgaccaaggtgccttgagtcatcatgacgcctgcttcggccagccagcgattgatggtcttgaacaattggcgggccagttgatgctgctccagcaggtggcggaaattcatcgatcg

SEQ ID NO: 9155 - DNA, 1611 bp, Homo sapiens
  SIMILAR (1)..(960): 861254mologous to Escherichia coli K12 IS5 transposase,accession number AE000291,Smith-Waterman Score=1393.
atgagtcatcaacttaccttcgccgacagtgaattcagcagtaagcgccgtcagaccagaaaagagattttcttgtcccgcatggagcagattctgccatggcaaaacatggtggaagtcatcgagccgttttaccccaaggctggtaatggccggcgaccttatccgctggaaaccatgctacgcattcactgcatgcagcattggtacaacctgagcgatggcgcgatggaagatgctctgtacgaaatcgcctccatgcgtctgtttgcccggttatccctggatagcgccttgccggaccgcaccaccatcatgaatttccgccacctgctggagcagcatcaactggcccgccaattgttcaagaccatcaatcgctggctggccgaagcaggcgtcatgatgactcaaggcaccttggtcgatgccaccatcattgaggcacccagctcgaccaagaacaaagagcagcaacgcgatccggagatgcatcagaccaagaaaggcaatcagtggcactttggcatgaaggcccacattggtgtcgatgccaagagtggcctgacccacagcctggtcaccaccgcggccaacgagcatgacctcaatcagctgggtaatctgctgcatggagaggagcaatttgtctcagccgatgccggctaccaaagggcgccacagcgccgaggagcttgccgaggtggatgtggactggctgatcgccgagcgccccggcaaggtaagaaccttgaagcagcatccacgcaagaacaaaccgcccatcaacatcgaatacatgaaagccagcatcccgggccaggggtggagcacccatttcgcatcatcaagcgacagttcggcttcgtgatagccagatacaaggggttgctgaaaaacgataaccaactggcgatgttattcacgctggccaacctgtttcgggcggaccaaatgataccattggcatcaactgttgagtatggtgagacagttgatggtgttgtcctggaaaaagatatccagctggtttatgggaccgccaataatacgaaaatcaatcctggcggagaacagcatataaaagaatttggtgtaagtaataatactgaaattaacggagggtatcagtacattgaaatgaatggcgccgcagaatactcagtattaaatgacggttatcaaattgttcaaatgggtggcgcggcaaaccagactacgctcaataatggtgtgctacagctccacgaccacgctgcttacttagtagacaacctgtgggactgtgcagggactcagctgaaggactgggagggtctgacaagcctgctgctggagaaggaccagagcacgtgccacatggagccagggccagggaccttccacctcctaggggtgccgcgtcctgccctccggtgtgttgtgtggctgggtagttgcgcgtgccgctcgcgacgaggtgccgtggggtgcgtcgacgtggacctctcggtgcgtgtcccgaggctccgcgaccggctccggaaccatcgagctgctcatctcatccccacaaaccgtgctcgtcgagccgacggtgtgcgcgaatttcgaatgcgcggcacccgatga

SEQ ID NO: 9156 - DNA, 894 bp, Homo sapiens
  SIMILAR (894)..(373): 981254mologous to Escherichia coli IS5 39.3kDa protein,accession number U70214,Smith-Waterman Score=898.
tcacaataaccctgccagcggcgttcgcgtaatgcgctcctcgccgttaatgacttttggaccacggacatgaaccgtgtcgccatcaaaggcttcaacgacggcgtggtcggttaactccacatggttttcaattatcaccgcacctgtaatacggctctcacaaagctggaaaggcctgtggcttgggccctccgtttcctgccgttctttctctcgcttccccgctggatctccccagctcctcctggctttctccttgctgctgctccaatgcaccaagtgcactttagagcactgtagcaggccgtcgaagactgcctctgacagattggtctggcttccacgaaccgaactgtcgcttgatgatccgaaatggtgctccaccctggcccggatgctggcttccatgtattcgatgttgatggccgttttgttcttgcgtggatgctgtttcaaggttcttaccttgccggggcgctcggcgatcagccagtccacatccacctcggccagctcctcgcgctgtggcgccccttggtagccggcatcggctgagacaaattgctcctctccatgcagcagattacccagctgattgaggtcatgctcgttggccgcggtggtgaccaggctgtgggtcaggccactcttggcatcgacaccaatgtgggccttcatgccaaagtgccactgattgcctttcttggtctgatgcatctccggatcgcgttgctgctctttgttcttggtcgagctgggtgcctcaatgatggtggcatcgaccaaggtgccttgagtcatcatgacgcctgcttcggccagccagcgattgatggtcttgaacaattggcgggccagttgatgctgctccagcaggtggcggaaattcat

SEQ ID NO: 9157 - DNA, 1542 bp, Homo sapiens
  SIMILAR (778)..(1467): 901254mologous to Escherichia coli Tail fiber protein GP37,accession number D90774,Smith-Waterman Score=1095.
atgagtcatcaacttaccttcgccgacagtgaattcagcagtaagcgccgtcagaccagaaaagagattttcttgtcccgcatggagcagattctgccatggcaaaacatggtggaagtcatcgagccgttttaccccaaggcgggcaatggccgacggccctatccgctggagaccatgctacgcattcactgcatgcagcattggtacaacctgagcgatggcgcgatggaagatgccctgtacgaaatcgcctccatgcgtctgtttgcccgattatccctggatagcgccttgccggaccgcaccaccatcatgaatttccgccacctgctcgagcagcatcaactggcccgccaattgttcaagaccatcaatcgctggctggccgaagcaggcgtcatgatgacccaaggcaccttggtggatgccaccatcattgaggcacccagctctaccaagaacaaagagcagcaacgcgatccggagatgcatcagaccaagaaaggcaatcagtggcactttggcatgaaggcccacattggtgtcgatgccaagagtggcctgacccacagcctggtcaccaccgcggccaacgagcatgacctcaatcagctggtgcagaatgaattggagacagcagaacgtttcagaagacaagaagacactcaatcaaaatgtctactctcatctataatgttgtatatcaaaaacttaagcggccctgatgtatcagagctcatttcaccactctcagagggctttaatttatgctcgtcagtggtagtggctgttatcgctgctgtgttaagaagggcaccgatacatatgccatccggatggtggcgttcatggaatgcagaatctggcgcttacaatgtcacccgctctggcgacagctatattctggttaacttctataccggagccggaagttgccggaccctgcagatgaaggcgcattacagaaatggtggtctgttctaccgttcttcaagagacggttatggttttgaggaagactgggcagaagtttatacctcgaaaaatcttccaccagaaagctacccagtcggcgcaccaatcccgtggccatcagataccgttccgtctggttatgccctgatgcaggggcaggcttttgacaaatctgcttacccgaaacttgcagccgcttatccgtcaggcgtgatccctgatatgcgtggctggacgattaagggcaaacctgccagtggtcgggccgtattgtctcaggaacaggacggcattaaatcgcatacccacagcgccagcgcatccagtacagatttggggacgaaaaccacatcgtcgtttgattacggcactaaatccacgaataacaccggggcacatacacacagtgtgagcggctctacaaactcggctggagcacacacacactcactagccaacgtgaacacggctagtgctaactccggtgctgctttagagcacagggcgataatcccgaacacatttgatttggatttgaagcattcgaatcaactttgtagatga

SEQ ID NO: 9158 - DNA, 987 bp, Homo sapiens
  SIMILAR (987)..(247): 991254mologous to Escherichia coli IS5 39.3kDa protein,accession number U70214,Smith-Waterman Score=1291.
ttactgctgctggcagtgggagcccaagtgcattggcacatctgagaagcacacagaagcatcccaggattgtcctcgtgcggtcgtgcgatcagagccacggacccgccgtgggcacgggggggtccgaggtcgctttcccccaagggcggggggaaattccctcggtgggggtgaccggcgtaattcgttgttcaaccgaggcaccccgtagggtccggggagtcgtccttcctcccctttttccttgccggggcgctcggcgatcagccagtccacatccacctcggccagctcctcgcgctgtggcgccccttggtagccggcatcggctgagacaaattgctcctctccatgcagcagattacccagctgattgaggtcatgctcgttggccgcggtggtgaccaggctgtgggtcaggccactcttggcatcgacaccaatgtgggccttcatgccaaagtgccactgattgcctttcttggtctgatgcatctccggatcgcgttgctgctctttgttcttggtcgagctgggtgcctcaatgatggtggcatcgaccaaggtgccttgagtcatcatgacgcctgcttcggccagccagcgattgatggtcttgaacaattggcgggccagttgatgctgctccagcaggtggcggaaattcatgatggtggtgcggtccggcaaggcgctatccagggataaccgggcaaacagacgcatggaggcgatttcgtacagagcatcttccatcgcgccatcgctcaggttgtaccaatgctgcatgcagtgaatgcgtagcatggtttccagcggataaggtcgccggccattaccagccttggggtaaaacggctcgatgacttccaccatgttttgccatggcagaatctgctccatgcgggacaagaaaatctcttttctggtctgacggcgcttactgctgaattcactgtcggcgaaggtaagttgatgaatcat

SEQ ID NO: 9159 - DNA, 1980 bp, Homo sapiens
  SIMILAR (619)..(1977): 821254mologous to Escherichia coli RhsB core protein with unique extension,accession number U00039,Smith-Waterman Score=1975.
atgctacgcattcactgcatgcagcattggtacaacctgagcgatggcgcgatggaagatgctctgtacgaaatcgcctccatgcgtctgtttgcccggttatccctggatagcgccttgccggaccgcaccaccatcatgaatttccgccacctgctggagcagcatcaactggcccgccaattgttcaagaccatcaatcgctggctggccgaagcaggcgtcatgatgactcaaggcaccttggtcgatgccaccatcattgaggcacccagctcgaccaagaacaaagagcagcaacgcgatccggagatgcatcagaccaagaaaggcaatcagtggcactttggcatgaaggcccacattggtgtcgatgccaagagtggcctgacccacagcctggtcaccaccgcggccaacgagcatgacctcaatcagctgggtaatctgctgcatggagaggagcaatttgtctcagccgatgccggctaccaaggggcgccacagcgcgaggagctagccgaggtggatgtggactggctgatcaccgagcgccccggcaaggtaagaaccttgaaacagcatccacgcaagatcaaaacggccatcaacatcgaatacatgaaagccagcatccgggccaaggacggttacagccgcagcgagtcactgtggctggtgcgcggcggcgtggcgaaactggatgaaggtcaccggctggccgcactctggcaggcgctgccggaagaactccgcttaagtccgcatcgttatctggcgacaaacagtccgcaggggccgtggtggctgctcggctggtgtgagcgggtgccggaagcggatgaggtgctgcctgcgccgctgccgccgtaccgggtactgaccgggctggtggaccgcttcgggcgcacacagaccggcgaaatcaccggcgtgacggatggtgccgggcgtcacttccggctggtactgaccacgcatgcgcacgaggcagaagaagcccggcagcaggccatttccggcgggacggaaccgtccgcttttcctgataccctgccgggttacaccgaatatggccgggacaacggcatccgtctgtctgccgtgtggctgacgcacgacccggaatacccggagaatttaccctgcgcgccgctggtgcgctatggctggacgccccgcggcgaactggcggtggtgtatgaccgtagtggcaaacaggtgcgcagctttacttacgatgataaataccggggccggatggtggcgcaccgtcacacgggccggccggaaatccgttaccgttacgacagcgacgggcgggtgacagaacagctaaacccggcaggcttaagctacacgtatcagtatgagaaagaccgcatcaccatcaccgacagcctggaccgccgtgaagtgctgcacacgcagggcgaagccgggctgaagcgggtggtgaaaaaggaacacgcggacggcagcgtcacgcagagtcagtttgacgccgtgggcaggctcagggcacagacggatgccgcaggcaggacaacagagtacagcccggatgtggtgacgggcctcatcacgcgcataaccacgccggatggcagggcatcggcgttttactataaccaccacaaccagttaacgtcagccaccgggcctgacgggctggaattgcgccgggaatatgatgaattgggccgtctgattcaggaaactgcccctgacggcgatatcactcgctaccgttatgataatccacacaatgaccggccggtcaccgcgaggaagggcttaatcagtaccgcgcatacgaaagccgttgaccgtatattgccgttaaagacacgcagggccattaaaacccggtttgaattcaacatcgcccggtaccttaccgccgtaatttcccccgaaggaaatcgacacatcaaggatcaggatttgcggagtatagaccagaaagagagccagtga

SEQ ID NO: 9160 - DNA, 2472 bp, Homo sapiens
  SIMILAR (859)..(1533): 921254mologous to Escherichia coli Adhesin AIDA-I precursor,accession number D90839,Smith-Waterman Score=1029.
atggagaaaaaatccccggcctacttctgctgtcgggatatgcaggtaattcactctgacgctgctttacaacggttattgacacgtttcaacgatcctgaagggtggagtaatctggcgaaaaatcagtatctgagcacgtcgatgaaacaaaaaatttggcaacgtgctttatcgcatcggaaaaataatccgaaagcagattcagatgcatatgaaaccagcgctgatatgattttgtctgagctgattagccacggcgaagttgatgaccagatgctattaaatgccaccgccctgatacgttcggacgactgggactttttagagagtgcattaattagttgggataatttacccgctgttgttctcaaggaattacagcaaaacacgccacgcaatgatatttgggcgaagttttttctgaggcaggaaaacagttcccgtgcgcaggttgacgaagcgttacgtgtttattatgcactagaccccgatgcgttagcacaactggatgtactggctaaacgcccttacaaaacagcggcctttcggggtgagaaaacgcatcgcgtgccacggcgtagtgtgcggcagaacatcatcgaccaggccgaccgactgcatggtgcgcagcgcctcgtcatcaataccaatcgcacgcgggtagtcgatcaacttatcgagtttctccaccaccagcacgtcaatgcccatctggccgagatagttcgccatcatcagcccaaccgggccggcaccagcgatcgccacctgaacgctatggttaacagcaggctggatgtcaggactttgttgcccccacgacctagtgttgggtctgatcaccccaacattcctggcttcccaaccctgaacaggtcacccacggaaacaccgctgaatggggaataccagtatgtgcacaacggcggtacagcgtctgacactgttgtgaacagtgacggctgccagattgtcaaaaacgggggtgtggccgggaataccaccgttaatcagaaggccagactgcaggtggacgccggtggtacagccacgaatgtcaccctgaagcagggcggcgcactggttaccagtacggctgcaaccgttaccggcataaaccgcctgggagcattctctgttgtggagggtaaagctgataatgtcgtactggaaaatggcggacgcctggatgtgctgaccggacacacagccactaatacccgcgtggatgatggcggaacgctggatgtccgcaacggtggcaccgccaccaccgtatccatgggaaatggcggtgtactgctggccgattccggtgccgctgtcagtggtacccggagcgacggaaaggcattcagtatcggaggcggtcaggcggatgccctgatgctggaaaaaggcagttcattcacgctgaacgccggtgatacggccacggataccacggtaaatggcggactgttcaccgccagtggcggcacactggcgggcaccaccacgctgaataaaggcgccataattaacccttcccgggaacacggccaggtgctggctgtcggtgaagatattcaccagcttgcgcaggttgaagtatgtggtatcaagcgcgatgtgaatatcgccctgatttgtgaaggtaaccctgccgatctactgggccagtgggtgctggtacacgtcggatttgccatgagcatcatcgacgaagatgaagcccaagccacattagacgcactgcgccaaatggattacgacattaccagcgctgaattcagcagtaagcgccgtcagaccagaaaagagattttcttgtcccgcatggagcagattctgccatggcaaaacatggtggaagtcatcgagccgttttaccccaaggctggtaatggccggcgaccttatccgctggaaaccatgctacgcattcactgcatgcagcattggtacaacctgagcgatggcgcgatggaagatgctctgtacgaaatcgcctccatgcgtctgtttgcccggttatccctggatagcgccttgccggaccgcaccaccatcatgaatttccgccacctgctggagcagcatcaactggcccgccaattgttcaagaccatcaatcgctggctggccgaagcaggcgtcatgatgactcaaggcaccttggtcgatgccaccatcattgaggcacccagctcgaaccggaggattttggccctggccaaaacccaggttgcccaatggcccaaactttttaccaacaggttcatccccaacccaaattggggcccccattctggcccctggccgtgcccaatgcccccccaaaaatgggtccccaggggtcgcatgccctcaaatggcccagtgggggaaagaagcttgagaggatttcaagggctttcgggtaccacatgcgcccaatttttgggaaaggccaatgggaaccaacctaacactcccctggccagctga

SEQ ID NO: 9161 - DNA, 759 bp, Homo sapiens
  SIMILAR (1)..(555): 931254mologous to Escherichia coli O157:H7 putative amino acid/amine transport protein,accession number AE005611,Smith- Waterman Score=886.
atggcagataacaaaccagagctacagcgtgggctggaagctcgacatatcgaactcatcgccctggggggcaccattggcgtcggcctgtttatgggggccgccagtaccctgaaatgggccgggccatccgtattgttggcctatatcatcgccgggctgttcgtctttttcatcatgcgttcaatgggcgaaatgttgttcctcgaaccggttaccggttcgttcgccgtttatgcgcatcgttatatgagcccgttctttggctatctcaccgcctggtcttactggtttatgtggatggcggtggggatctctgaaatcaccgccattggcgtttatgtccagttctggttcccggagatggcgcagtggatacccgcattgatcgcagtggcgctggtggcgttggcgaatctggcggcggtacggttgtacggcgaaatcgagttctggttcgcgatgatcaaagtcaccacgattatcgtgatgattgtcattggcctgggcaatctgctccatgcgggacaagaaaatctcttttctggtctgacggcgcttactgctgaattcactgtcggcgaaggcccctctgctgcaggtctgctggagtttgctggaggtccactacagaccctgttttcctgggtatcaccagcagaggctgcagaacggcaaagattgctgcctgttccttcctctggaagcttcgtccaagaggggcacccaccagatgccagccagagctctcctgtatga

SEQ ID NO: 9162 - DNA, 2150 bp, Homo sapiens
  SIMILAR (1269)..(2054): 961254mologous to Escherichia coli K12 IS5 transposase,accession number AE000234,Smith-Waterman Score=1318.
  misc_feature (1)...(2150): n = a,t,c or g
agcggcttctgcagcaaattaaccagttcactaactacgagccagtgatcggcattatgggtaaaaccggtgttgggaagagcagtctgtgcaatgccctgtttgccggagatatatcaccggtcagcgatgtggcggcctgtacacgtgagccactgcgctttcgcctgcaagtcggcgaccgctatataacgctgatggatctgcccggcgtgggcgaaagtggcgctcgcgataccgagtatgctgcgctgtaccgcgaacagcttcctcgcctcgacctggtactgtggctgattaaggccgatgaccgggcgctgacggtggatgaacatttttatcatcaggtgattggagaggtataccggcataaggtgctgtttgttatcagccagtcggataaggccgaacctaccagncggtggtccacctcaaatgtcgcaacggcccaagcggccggcccgggcctcacccccatcaacccattcgaggaggcatcggacccggccaccaccgccaaacacacagtacatcacagcaaggcacaactgcaacatgcaccatcacaaacaattggtacaagaagccccacaggacctgaacttttgattacggctgatgatcgggcactggcgactgatgagcatttttaccgtcaggtgattggcgaagcataccggcataagatgctgtttgttatcagccagtcagacaaagctgaacccaccagcggtggaaatatcctttccacagagcagaaacaaaatatcagccgcaaaatctgcctgctgcatgagctattccagcccgtgcatccggtgtgtgccgtgtcggttcgcctgcagtggggactaagggtgatggcagagcggatgattaagtgtctgccgcgtgaggccagcagcccggtagtagcgctactgcaacatccctttcgaacaacggtagcccgggagcaggcacgtgacgatttcggtgaaaccgtaggtgccatactcgatacgtggcccgcgctgtctgggatttcttcttctgagtgtttaattctgccctattattctccgagccctgtcgcaagtgcggcagggctttctttatttgttttacccatactgaggagtctgcttatgacccgtctggcttcgcgctttggcgctgcaaatcttattcgccgtgaccgtccgttaacccgtgaagagtatttcgcgtggtgccagcgtatcagtgagatcggacaagatctctctctcgcatggagcagatctgcatggcagaatatgaccgctgtcatcgagccgttttatcccaaggcgggcaatggccgacggccctatccgctggagaccatgctgcgtattcactgcatgcagcattggtacaacctgagcgacggtgccatggaagatgccctgtacgaaatcgcctccatgcgcctgtttgcccgattatccctggatagcgccctgccggatcgcaccaccatcatgaatttccgccacctgctcgagcagcatcaactggcccgtcaattgttcaagaccatcaatcgctggctggccgaagcaggcgtcatgatgacccaaggcactttggtggatgccaccatcattgaggcacccagctctaccaagaacaaagagcagcaacgcgatccggagatgcatcagaccaagaaaggcaatcagtggcactttggcatgaaggcccacattggtgtcgatgccaagagtggcctgacccacagcctggtcaccaccgcggccaacgagcatgacctcaatcagctgggtaatctgcttcatggagagaagcaatttgtctcagccgatgccggctaccaaggagcgccacagcgcgaggagctggccgaggtggatgtggactggctgatcgccgagcgtcccggcaaggtaaaaaccttgaagcagaatccgcgcaagaacaaaacggccatcaacatcgaatacatgaaagccagcatccgtgccagggtggagcacccgtttcgcatcatcaagcggttttcgtgcagcgatgcgacgtccaggggcgtgaaacacagtttaaggcgctgctctatccgttcggcaacatatctctgcacttgccttcctcggcatgattttgctgctgatgtgcacgatggatga

SEQ ID NO: 9163 - DNA, 2763 bp, Homo sapiens
  SIMILAR (1432)..(2526): 591254mologous to Pseudomonas aeruginosa probable guanine deaminase,accession number AE004580,Smith-Waterman Score=1147.
atgccgatggaaatgctttgtacggtattcctcactcgttctttcccccgtttcccttggatcgccctcgccggcccgcaccccttcatgaatttccgccacctgctggagcagcatcaactgccccgccaattgttcaagaccatcaatcgctggctgcccgaagcaggcgtcatgatgactcaaggcaccttggtcgatgccaccatcattgaggcacccagctcgaccaagaacaaagagcagcaacgcgatccggagatgcatcagaccaagaaaggcaatcagtggcactttggcatgaaggcccacattggtgtcgatgccaagagtggcctgacccacagcctggtcaccaccgcggccaacgagcatgacctcaatcagctgggtaatctgctgcatggagaggacaatttgtctcagccgatgccggctaccaaggggcgccacagcgcgaggagctgccgaggtggatgtggactggctgatcgccgagcgccccggcaaggtaagaaccttgaaacagcatccacgcaagaacaaacggccatcaacatcgaatacatgaaagccagcatccgggccagggtggagcacccatttcgcatcatcaagcgacagttcggcttcgtgaaagccagatacaaggggttgctgaaaaacgataacccactggcgatgttattcacgctggccaacctgtttcgggcggaccaaatgatacgtcactgtgatggggtgatcgcgtttggcggcggctcggtgctggatgcggcgaaagccgtgacgttgctggtgacgaacccggatagcacgctggcagagatgtcagaaaccagcgttctgcaaccgcgcttgccgctgattgccattccaactaccgccggaaccggctctgaaaccaccaatgtaacggtgattatcgacgcggtgagcgggcgcaagcaggtgttagcccatgcctcgctgatgccggatgtggcgatcctcgacgccgcattgaccgaaggtgtgccgtcgcatgtcacggcgatgaccggcattgatgcgttaacccatgccattgaagcatacagcgccctgaacgctacaccgtttaccgacagtctggcgattggtgccattgcgatgattggcaaatcgctgccgaaagcggtgggctacggtcacgaccttgccgcgcgcgagagcatgttgctggcttcatgtatggcgggaatggcgttttccagtgcgggtcttgggttgtgccacgcgatggcgcatcagccgggcgcggcgctgcatattccgcacggtctcgcgaacgccatgttgctgccaacggtgatggaatttaaccggatgtcagattggtcggcactgcgaactaaaaatccagataatagccttgaccgggaaaacggaaagcatcaaattcctgacaccattcgcgtgcgcgactatcgcggcaaactgatagtaccgggctttgtcgatacacatatccattatccgcaaagtgaaatggtgggggcctatggtgagcaattgctggagtggttgaataaacacaccttccctactgaacgtcgttatgaggatttagagtacgcccgcgaaatgtcggcgttcttcatcaagcagcttttacgtaacggaaccaccacggcgctggtgtttggcactgttcatccgcaatctgttgatgcgctgtttgaagccgccagtcatatcaatatgcgtatgattgccggtaaggtgatgatggaccgcaacgcaccggattatctgctcgacactgccgaaagcagctatcaccaaagcaaagaactgatcgaacgctggcacaaaaatggtcgtctgctatatgcgattacgccacgcttcgccccgacctcatctcctgaacagatggcgatggcgcaacgcctgaaagaagaatatccggatacgtgggtacatacccatctctgtgaaaacaaagatgaaattgcctgggtgaaatcgctttatcctgaccatgatggttatctggatgtttaccatcagtacggcctgaccggtaaaaactgtgtctttgctcactgcgtccatctcgaagaaaaagagtgggatcgtctcagcgaaaccaaatccagcattgctttctgtccgacctccaacctttacctcggcagcggcttattcaacttgaaaaaagcatggcagaagaaagttaaagtgggcatgggaacggatatcggtgccggaaccactttcaacatgctgcaaacgctgaacgaagcctacaaagtattgcaattacaaggctatcgcctctcggcatatgaagcgttttacctggccacgctcggcggagcgaaatctctgggccttgacgatttgattggcaactttttacctggcaaagaggctgatttcgtggtgatggaattctggtgtcctgtcctctggtgttttcgtcggcattttcgtggagggcggcggatggcggtaaaaaccgtaacgttcaccccagcgttttcgataggccggagccttacgtccgcgcacccagagccgtatccagatcagcggctgaataaggtagagaagggcggtgtaaagcaattcgagcataaccagtcctgccgccagcaggtcggcgttaccattatcaaggtcgtcaaacagctggctgatattctgccgcacggtcactttcagttttacgccgaggtaatcggcaaactgtttcgccagcgatcagcgcgtgacgccatccggggatcctcatag

SEQ ID NO: 9164 - DNA, 3663 bp, Homo sapiens
  SIMILAR (1293)..(1334): 1001254mologous to Escherichia coli Formate dehydrogenase, nitrate-inducible, major subunit (EC 1.2.1.2) (Formate dehydrogenase-N a subunit),accession number D90788,Smith-Waterman Score=79.
  misc_feature (1)...(3663): n = a,t,c or g
atgaaactgatggccattcaggaacaggcgcgcggcgaacaatgcttccgtgattccgagtgggatttgcagttccacattcaggtcgctctggcgacgcagaactccgccctggcggctatcgtggaaaaaatgtggacccagcgtagtcataacccgtactggaaaaaactgcacgaacacattgattcccgtaccgtcgataactggtgtgatgaccacgatcaaatcctcaaggcgctgattcgcaaagatcctcatgctgctaagctggcaatgtggcagcatctggaaaacaccaagatcatgttatttaacgaaaccagcgacgacttcgagttcaatgccgaccgctatctattcgccgaaaacccggtggcgattgcgaaagaactggagctgaccgcatcagcggaaattttactctgggatgactattttgcacctggctacggcgtgccgaacgacgaaggcatggaagcagtgaaattgctgccgcggctggaaggcattctgcttgatcctgtgtataccggaaaagcgatgcgggggctgattgacggtatcagtcagaaacgcttcaaagatgaagggccgattctgtttattcatacccggcggtgcgcctgcgctgttcgcctatcatccccacgtttagctccggaaacgctcatgcaagaaagtatacaactggttattgattccttgccgttcctgctgaaaggggctgggtatacgctgcaactcagtatcggcggcatgttttttggcttactgctcgggtttattctcgcgctgatgcgtctgtcgccaatctggcccgtgcgctggctggcgcgtttttatatctctatttttcgtggtacgccgctcatcgcacaactgtttatgatctattacggcctgccgcagtttggtatcgaattagatcccattccgtcagcaatgattggtctgtcgttgaacactgccgcctatgctgccgaaacgctgcgcgccgccatttcttctattgataaaggtcagtgggaagcggcagccagtattggtatgacgccgtggcagaccatgcgtcgcgcgattttgccacaggcggcgcgtgtggcgttgccgccgctgtcgaacagctttattagcctggtaaaagatacgtcgctggccgcgacaatccaggtgccggagctgttccgtcaggcgcagttgattacctcgcgtacgctggaggtgttcaccatgtatctggcggcttcgctcatctactggatcatggcgactgtgttatcgacgttgcatctgacaaatggcagcgcattagctgggaagaagcattctccccaacgaaaccgggatgctgacccagaaatttgcccgctccctcgggatgctggcggtagacaaccaggcgcgcgtctgacacggaccaacgcaagtcttgctccaacatttggtcgcggtgcgatgaccaaccactgggtggatatcaaaaacgctaacgtcgtgatggtgatgggcggtaacgctgctgaagcgcatcccgtcggtttccgctgggcgatggaagcgaaaaacaacaacgacgcaaccttgatcgttgtcgatccccgttttacgcgtaccgcttctgtggcggatatttacgcgcctattcgttccggtacggacattacgttcctgtctggcgttttgcgctacctgatcgaaaacaacaaaatcaacgccgaatacgttaagcattacaccaacgccagcctgctggtgcgtgatgattttgctttcgaagacggtctgttcagcggctacgacgctgaaaaacgtcaatacgataaatcgtcctggaactatcagctcgatgaaaacggctatgcgaaacgcgatgaaacactgactcatccgcgctgtgtgtggaacctgctgaaagagcacgtttcccgctacacgccggacgtcgttgaaaagggatcctctagagaccagagatcccagtggtttaagccatcatccgcaaattatccgtgcctggcagcagggggcggacaatttggcatcggtagcggcggctccggtcacgtcagcggttatagcgtggtgcatcaggcactggaagaagagctggccgagtggcttggctattggcgggcactgctgaatatctctggtttcgtcgctaatcaggcagttattgccgcgatgatggcgaaagaggaccgtattgctgccgaccggcttagccatgcctcattgctggaagctgccagtttaagcccgtcgcagcttcgccgttttgctcataacgatgtcactcatttggcgcgattgcttgcttccccctgtccggggcagcaaatggtggtgacagaacgcgtgttcagcatggacggcgatactgcgccactggcggaaatccagcaggtaacgcaacagcacaatcgctggttgatggtcgatgatgcccacggcacgggcgttatcggggagcaggggcgcggcagctgctggctgcaaaagccgtgcgttacaactggcagaaaaactgcgtcagcaaggctgctgggtcacggcgattcgcccgccaaccgtacccgctggtactgcgcgactgcgcttaacgctaacccgatatcgaccgtctgctggaggtgctgcatggcaacggttaataaacaagccattgcagcggcatttggtcgggcagccgcacactatgagcaacatgcagatctacagcgccagagatgtgacgccttactggcaatgcttccacagcgtaaatacacccacgtactggacgcgggttgtggacctggctggatgagccgccactggcgggaacgtcacgcgcaggtgacggccttagatctctcgccgccaatgcttgttcaggcacgccagaaggatgccgcagaccattatctggcgggagatatcgaatccctgccgttagcgactgcgacgttcgatcttgcatggagcaatctcgcagtgcagtggtgcggtaatttatccacggcactccgcgagctgtatcgaggtggtgcagtgcctcagaggatccctaacctccgccatttaagtgaattcagcagtaagcgccgtcagaccagaaaagagattttcttgtcccgcatggagcagattctgccatggcaaaacatggtggaagtcatcgagccgttttaccccaaggctggtaatggccggcgaccttatccgctggaaanccatgtacgcattcactgcatgcagcattggtacaacctgagcgatggcgcgatggaagatgctctgtacgaaatcgcctccatgcgtctgtttgcccggttatccctggatagcgccttgccggaccgcaccaccatcatgaatttccgccacctgctggagcagcatcaactggcccgccaattgttcaagaccatcaatcgctggctggccgaagcaggcgtcatgatgactcaaggcaccttggtcgatgccaccatcattgagcacccagctcgaccaagaataatgttttcactgagtgcctttggcctgatgcgttcgattacccgaacggggtttatactatcgcgcgttgccgattatcggtattttgctggctggtttggtgtgcgaaaagcgttgctgaattcacagcactgcgcaagtcgtcgagcagattga

SEQ ID NO: 9165 - DNA, 1746 bp, Homo sapiens
  SIMILAR (1)..(753): 991254mologous to Escherichia coli similar to E. coli yeiG,accession number U73857,Smith-Waterman Score=1329.
  misc_feature (1)...(1746): n = a,t,c or g
atggaactcattgaaaaacatgtcagctttggcggctggcaaaatatgtatcggcattattcccaatcactgaaatgtgaaatgaatgtcggcgtctatctcccaccaaaagccgcgaatgaaaaattgccggtgctgtactggctttcaggcctgacctgcaacgagcagaatttcattactaaatcggggatgcagcgttacgcggctgagcacaacattattgttgttgcgccggacaccagtccgcgaggcagtcatgtcgcagatgctgaccgttacgatctcgggcaaggtgccgggttttacctgaacgcgacgcaagcgccgtggaatgaacattacaaaatgtatgactatatccgcaacgagctgccggatttagtgatgcatcattttccggcaacggccaaaaagtctatctctggtcattctatgggcgggctgggcgcgctggtgctggcgttacgtaacccagatgaatatgtcagcgtctcggcgttttcgcccattgtctccccatcgcaagtgccgtggggacagcaagcctttgctgcatatcttgctgaaaataaagatgcctggttggattacgacccggtgagtcttatttcacaaggtcaacgcgttgcggaaatcatggttgatcaggggttgagtgatgatttttacgcagaacagctgcggactccaaatcttgaaaagatctgccaggagatgaatatcaagacgttaatccgttatcaacgaggagcaatttgttcagccgatgcggctaccaggggcgcaaagcgggagagctgccgaagtggatgtggactgctgatcgcagagcgcccggcaaaggtagaacctggaacagcatcacgccaagacaatacggccatcaacatcgaatacatgaaagccagcatccgggccagggtggagcacccatttcgcatcatcaagcgacagttcggcttcgtgaaagccagatacaaggggttgctgaaaaacgataaccaactggcgatgttattcacgctggccaacctgtttcgggcggaccaaatgatacgtaatcctcacgatctctacgcgccggaagtggtacaccaaaaggcaaaagtgacaacgtccgggtacaggtttctgccctgctgcggttttgccaacaccttttgggggaaaacgaccgccgacgggacattgattgaacactttggtcgtcgctgtcagggatggtttgaagatgacgacggtcatcgcgaacaatgtgacttccgtttccgttttaaaaattgcccgcaatgtaacgcggaaaacgatattgccgcccgccgctgccgcgaatgtgacaccgtactggttgatccggacgatatgttaaaagcggcgctacgactgaaagacgcgctggtattacgctgtagcggcatgtctttgcaacatgggcacgacgagaaaggcgaatggttgaaaatcacctattacgatgaagacggcgcggatgtgagtgagcgtttccgtctgcaaacacctgcccagcgtaccgccttcgagcagctttttatccgcccgcatacgcgcacaccgggcatcnccgtgcgctggatcaccgccgccgatatcctcgcccagcaagccttattgcgacacccggattttgtcgtcacccgcatgaaaggccagtactggcaggtgcgtgaaaaagtgttcgattacgaaggtcgttttcgtctggcgcacgaattacgcggttaa

SEQ ID NO: 9166 - DNA, 2127 bp, Homo sapiens
  SIMILAR (1354)..(2070): 971254mologous to Escherichia coli 79-kDa multifunctional protein,accession number M74164,Smith-Waterman Score=1203.
atgacggatattgttgttgggttgtccactgcagggcggccattcagctatgcaggagacaagaatcgccagcttacccgttacagcgatacccgctggcatgaagattccgtgcgtaaccgctggttcagcgtgatggtggggccgtctgtgcgcgtgaatgaatggttcagcgcgtatgcgatggcgggtatggcttacagccgtgtgtcgactttctccggggattatctccgcgtaactgacaacaagggaaggttggccagtgtgaataacatcgccagttggttatcgtttttcagcagccccttgtatctggctttcacgaagccgaactgccgcttgatgatgcgaaacgggtgctccaccctggcacggatgctggctttcatgtattcgatgttgatggccgttttgttcttgcgcggattctgcttccaagtttttaccttgccggacgctcggggatcagccgtccattcacctcgggcagctctccgctgtgggccttggtaccggatggtggaccctggtctcccgaagggttcccgtttagtcgcctttgcgcgggaaaatcaggactgtgcatcgctgaccccggaaacttttttaccgcgtatccatgtcattaaaggtgtgaacatttccacggcgacagtttgccgtcagtgtgaagatgcaccgtgcgctaacgtctgcccgaatggtgctatcagccgtgataaagggtttgttcatgtgatgcaggaacgttgcattggttgcaaaacctgcgttgtggcttgcccgtatggtgcgatggaagtggtggtacgtccggtgatccgcaacagcggcgcgggtctgaatgtacgggctgacaaagccgaagccaataaatgcgacctgtgcaaccatcgtgaagacggcccggcgtgtatggcggcttgcccgactcatgcgctgatttgtgtcgatcgtaataaacttgaacaactgagcgcagaaaaacgccgccaatacggagcggcggtatcggcgacctgtgactgcgggatgcgaagctgtcgtgtccggcagaggggggtacgccatccaggagtgcgggattactcatggcgaaagccatcttgcgtgtccactggtattcgtggacaggcaggggtcggtttcgccgcttttggggtggcccattactctctcgcagttcgttgtcgtcgcgtttcagctgtggagcgcagcgattgtgttttttatatcgccggacgttgtttaggagatgttgtatcgcactctgtcagcgtgccatcgcctccctccgtccctctttcgtccgcgcctgccccgtcgccccctgtgcgtcggcgaccggccaaagcggttgttgaaaacccgaaagtgaaaaaagccgtactggcagaaaccgaacaaaaagtacgccaggataccgtgctggcgtctaacacttcaaccattcctatcagcgaactggccaacgcgctggaacgcccggaaaacttctgcgggatgcacttctttaacccggtccaccgaatgccgttggtagaaattattcgcggcgagaaaagctccgacgaaaccatcgcgaaagttgtcgcctgggcgagcaagatgggcaagacgccgattgtggttaacgactgccccggcttctttgttaaccgcgtgctgttcccgtatttcgccggtttcagccagctgctgcgcgacggcgcggatttccgcaagatcgacaaagtgatggaaaaacagtttggctggccgatgggcccggcatatctgctggacgttgtgggcattgataccgcgcatcacgctcaggctgtcatggcagcaggcttcccgcagcggatgcagaaagattaccgcgatgccatcgacgcgctgtttgatgccaaccgctttggtcagaagaacggcctcggtttctggcgttataaagaagacagcaaaggtaagccgaagaaagaagaagacgccgccgttgaagacctgctggcagaagtgagccagccgaagcgcgatttcagcgaaagaagagattatcgccgcatgatgatcgcgatggtcacgacgtgttcgctgtctggaggaagggattttcgccatccgggggaacggatttga

SEQ ID NO: 9167 - DNA, 1917 bp, Homo sapiens
  SIMILAR (1)..(741): 991254mologous to Escherichia coli K12 IS5 transposase,accession number AE000234,Smith-Waterman Score=1294.
atgagccatcaactcaccttcgccgatagtgaattcagcactaagcgccgtcagacccgaaaagagattttcctctcccgcatggagcagattctgccatggcagaatatgaccgctgtcatcgagccgttttatcccaaggcgggcaatggccgacggccctatccgctggagaccatgctgcgtattcactgcatgcagcattggtacaacctgagcgacggtgccatggaagatgccctgtacgaaatcgcctccatgcgcctgtttgcccgattatccctggatagcgccctgccggatcgcaccaccatcatgaatttccgccacctgctcgagcagcatcaactggcccgtcaattgttcaagaccatcaatcgctggctggccgaagcaggcgtcatgatgacccaaggcactttggtggatgccaccatcattgaggcacccagctctaccaagaacaaagagcagcaacgcgatccggagatgcatcagaccaagaaaggcaatcagtggcactttggcatgaaggcccacattggtgtcgatgccaagagtggcctgacccacagcctggtcaccaccgcggccaacgagcatgacctcaatcagctgggtaatctgcttcatggagagaagcaatttgtctcagccgatgccggctaccaaggagcgccacagcgcgaggagctggccgaggtggatgtggactggctgatcgccgagcgtcccggcaagcgtgcagcgggcctgggctttacctacaacgttggcgcattgggcggtgcactggccccaatcatcggcgcgttgatcgctcaacgtctggatctgggtactgcgctggcatcgctctcgttcagtctgacgttcgtggtgatcctgctgattgggctggatatgccttctcgcgttcagcgttggttgcgcccggaagcgttgcgtactcatgacgctatcgacggtaaaccattcagcggtgccgtgccgtttggcagcgccaaaaacgatttaccggttccggacagcccgctcgataaacccgaaatcgtcgccgccatggcattagcggcagaacaggcgggcgcggttgccattcgcattgaaggtgtggcaaatctgcaagccacgcgtgcggtggtgagcgtgccgattattggaattgtgaaacgcgatctggaggattctccggtacgcatcacggcctatattgaagatgttgatgcgctggcgcaggcgggcgcggacattatcgccattgacggcaccgaccgcccgcgtccggtgcctgttgaaacgctgctggcactccttactgaacatcagagacttcatactggtgtgaaacccttacgaattctacataagaaaattcatactgatgtgaagccctacaaatgtgtacgatgtgggaagacctttagatttggtttctaccttactgaacaccagagaattcacactggtgaaaagccctataaatgtaaagaatgtggaaaggcctttattcgtagagggaatcttaaagaacatctgaaaattcattctggtttaaaaccctatgactgtaaagaatgtgggaagtcctttagtcggcgtgggcagttcactgaacatcagaaaattcatacgggtgtaaaaccatacaaatgtaaagaatgtgggaaggcctttagtcgtagtgtagaccttagaatacatcaaagaattcatactggtgagaaaccctatgagtgtaaacaatgtgggaaggcctttagacttaattcacaccttactgaacatcagagaattcacactggtgagaaaccctatgagtgtaaggctctttctggcaaaggtaatgacatacgcatctgtgccagcatcaccaagagtgaggctggtttctggaaatccattctgactctgtga

SEQ ID NO: 9168 - DNA, 3117 bp, Homo sapiens
  SIMILAR (2479)..(3114): 1001254mologous to Escherichia coli K12 putative glutamine synthetase (EC 6.3.1.2),accession number AE000228,Smith-Waterman Score=1134.
atgcatatggagccgtgggatggcccggcgggcatcgtgatgtccgacgctcgttttgccgcctgtaacctcgaccgtaacggtctgcgtccggcgcgctacgtcatcaccaaagataagctcatcacctgcgcctctgaagtcggtatctgggattaccagcctgacgaagtggtcgaaaaaggccgcgtcgggccaggcgaactgatggttatcgacacccgcagtgggcgtattctgcactcggcagaaaccgatgacgatctgaaaagccgccatccatataaagagtggatggagaaaaacgtccgccgactggtaccgtttgaagatctgcccgatgaagaagtgggtagccgcgaactggacgacgacacgcttgccagctaccagaaacagtttaactacagcgcggaagagctggactccgtaattcgcgtactgggcgaaaacggtcaggaagcggtcggttcgatgggcgatgataccccattcgccgtgctctccagtcagccgcgcattatttacgactacttccgccagcagttgcccagcgtattgcagcaggtgcgacagctggttgcacagatggaacagcaggaaggggaaaatgatttaccctcgaccgccagtcgcgagatcttgtttatgcaattactgctcttgctgcgtaaaagcagtttgcaggagaacctggaaaacagcgcatcacgtctcaacttgcttctggcctggctggaggaccattttgccgatgaggtgaattgggatgccgtggcggatcaattttctctttcactgcgtacgctacatcggcagcttaagcagcaaacgggactgacgcctcagcgatacctgaaccgcctgcgactgatgaaagcccgacatctgctacgccacagcgaggccagcgttactgacatcgcctatcgctgtggattcagcgacataaccacttttcgacgctttttcgccgagagtttaactggtcaccgcgtagatattcgccaggacgggatggctttctgcaataacgcgaatcttctcaacgtatttgtacgccatattgcgaataatcgacttcgttctctggccgagtggcactttggcatgaatgcccacattggtgtcgatgccaagagtggcctgacccacagcctggtcaccaccgcggccaacgagcatgacctcaatcaggctgagagtaactctgcgtgcactggagaggagcaatttgtctcagccgatgccggctaccaaggggcgccacagcgcgaggagctggccgaggtggatgtggactggctgatcgccgagcgccccggcaaggtaagaaccttgaaacagcatccacgcaagaacaaaacggccatcaacatcgaatacatgaaagccagcatccgggccagggtggagcacccatttcgcatcatcaagcgacagttcggcttcgtgaaagccagatacaaggggttgctgaaaaacgataaccaactggcgatgttattcacgctggccaacctgtttcgggcggaccaaatgatactcacctctgccttggtgaatcctcgcgcctgccacgtgaccggtatgccaatccttcccgccgtgcagatctgtgatctgtcggtggtcggtgcgggacctgctggtctggcgtttgccattgacgcgccggcgcgtgggcatcagatccccggcaaagaggagttgtacgaaacgctgcgctattaccgccggatgatcgaagtgacgggcgtgacgctaaaactcaatcacaccgtgacggcggatcagttacaggctttcgatgaaacgatcctcgccagtgggatcgtgccgcgcactccgcccatcgacgggatcgatcatccgaagaatgaagctgacgacatgctgcgcatgggcttcatcgaagacgttgaaaccattatggcgcagatcccggaaggtcatcagaccgctctgttctctgcaaccatgccggaagcgattcgtcgcattacccgccgctttatgaaagagccgcaggaagtgcgcattcagtccagcgtgactacccgtccggacatcagccagagctactggactgtctggggtatgcgcgaacacgaagcactgacactggaacgcctgaaagatggtcgtctggacatcctgattgcgaccgacgttgcagcccgtggcctggacgttgagcgtatcagcctggtagttaactacgatatcccgatggattctgagtcttacgttcaccgtatcggtcgtaccggtcgtgcgggtcgtgctggccgcgcgctgctgttcgttgagaaccgcgagcgtcgtctgctgcgcaacattgaacgtactatgaagctgactattccggaagtagaactgccgaacgcagaactgctaggcaacgccgtctggaaaaattcgccgctaaagtacagcagcagctggaaagcagcgatctggatcataccgcacactaagcataagatgcacgccacttttatggcgaagccgtatgaagagcacgcgggcagcggaatgcatatccatatcagtatgcaaaataatcgtggcgagaacgtgctttctgacgcggaaggcgaagattcgccgctgctgaaaaagatgctcgccgggatgattgacctgatgccgtcgtcgatggcgttgctggcaccaaacgtgaactcgtatcgccgcttccagccgggaatgtatgtgccgacgcaggcgtcgtggggccataacaaccgcaccgtcgccctgcgtattccgtgcggcgaccgtcataatcaccgcgtggaatatcgcgtggcgggtgccgatgccaacccatatctggtgatggcagcgatttttgccggtattttgcatggccttgataacgagctgccgttgcaggaagaagtcgaaggcaacgggctggaacaggaaggcttaccctttccgattcgccagagcgatgccctgggtgagtttatcgagaatgatcacctgcgccgctatttaggcgaacgcttctgccatgtctatcacgcctgtaaaaatgatgagctgttgcagtttgagcgcctcatcacagaaacagaaattgagtggatgttgaaaaacgcgtaa

SEQ ID NO: 9169 - DNA, 2631 bp, Homo sapiens
  SIMILAR (2631)..(1900): 991254mologous to Escherichia coli K12 putative transport protein,accession number AE000394,Smith-Waterman Score=1249.
tcatccgccggtgccataggatggcactatcccagtgcggcatagcatcctgtaacgctcggcgacaatacgtaccgcacgcacatcaaacagctcatcaaaggcgaggttctttttctgcattttacgccagatgctgtagatgtgtttcggacgaccatacacttccgctttaacgccttcagctttcatctcagcgcgcagatgaccaacgaactcttcgatgtagtgttcgcggtcgagacgccgttcatgcagcagtttggcaattcgtttgtattcggttggatggaggtaacggaagcagtaatcttccagttcccatttcagttgtccgattccgagacggttagccagcggtgcgtagatgttggtacactcttttgccgccagtacacgttcatcttccggcgcatcttttacttcgcgcagatgagcaatacgctccgcctgtttgatgactacgcagaggaaatcatcgaccatcgccaataacatccggcgaacgcaatcgacctgctcggaggacacagaatcagtgtgcgtcgctttcagctggcggatcgccgccatatcacgcacgccgtgaataaggttaacgaccgacttaccgacgctctcacgcagcacatcttcgatgactacgttggcatctggatttgccctatgcggatgccattcgttataatgctcgaacgcctctgcaaggttctttgctgccgttaacccgtctggtttgggcatgatactgatgtagtcacgctttatcgttttcacgaagctctctgctattccgttactctccggactccgcaccgccgtgttcttcggttcaagtcccaacatccgggcgaactggcgtgtttcattagcccggtagcatgaaccattatccgtcagccactccactggagacgacggaagatcgttgccgaagcggcgttccaccgctcccagcatgacgtcctgtactgtttcactgttgaagccgccggtaaagagattttcttgtcccgcatggagcagattctgctggagcagcatcaacgggcccgccaatcgttcaagaccatcaatcgctggctggccgaagcaggcgtcatgatgactcaaggcaccttggtcgatgccaccatcattgaggcacccagctcgaccaagaacaaagagcagcaacgcgatccggagatgcatcagagcaagaaaggcaatcagtggcactttggcatgaaggcccacattggtgtcgatgccaagagtgggctgacccacagcctcttcaatagtttcttcgccggtagcgatggtgcccgcattaatatccattaaatcaaaccagcggttcgccagctcggtgcgggttgccattttaatgacgggtaccgccatcaggccgtacggcgtaccacgaccggtcgtaaacacttgcactgtgatacccgaagccacctgttgcgtgccacagacaaaatcgctggctggcgtcgcggcgtaaattaatccgcgtttagtcgggcgttgaccgggcgacagcacttcaacaattgcgcttttacccgatttagcaatggagccgagtgccttctctaccacgtttgccagaccgcctttcttgttgcccggcgaagggttggcgctgcggtcggtttttcccatattgagatagttatcgtaccactccatctcctccagcagccgttggccgacctcttcgttcacgttgcgcgtcggctgtccagcacgatgggaattcgcgatcaacgcccacttcccggttaacttctgaacaacatcacccgttggcgccgcagcgcaccagtagatcagacgcatagccaatcggcggggtttgccgttacaccagaaaacgcattcgtggccagtagcggacctagcagacatcgtcatcagcgctgaacatcccacgaaaaccagtgctgcattgaaggagtgcagttcacttaccaggtagccaatcaccagtggagtgacaatggaggcaacattgccaaagacgttaaagacgccgccgcagaggccaacaatctctttcggcgcggtgtcagaaatcaccggccagcccagcgcaccaaatcctttgccaaagaaagccagcgccatcagcatgaccaccagcgtggtgttgttggtgtagttacataagatgatggtggaagccagcaacattcccagcacaatcggtagcttacgtgccagggtcagggataaaccgcgtttgatcagataatccgagaagacacctcccagcacgccgcccgcaaaaccacacagtgctggaatcgaggcgaccagacccactttcagaatcgacatgcctttttcctgcaccagataaatcgggaaccaggtgaggaagaaccaggtgatggtgttgataaaatattgtccgaaaaatacgcccagcatcatgcggttagagagcaattgcttgatgtaatgcagtttgggtccgcttgctgccgcactgcccggctttttgtggtccatatcgaccaccgcgccattttcagagataaacttcagctcttccgcagacatacgtgggtgatctgtcgggttatgaatcaacttgatccacagcgccgtcagcacaaaaccaatcaaccccat

SEQ ID NO: 9170 - DNA, 2034 bp, Homo sapiens
  SIMILAR (1156)..(1875): 991254mologous to Escherichia coli No definition line found,accession number U00039,Smith-Waterman Score=1229.
atgtgcagcgaaattcaagctgcgtgtcgggaaacggcgcaaccgatcccggaaagtgatgctgaactggcgcgctgcattttcgacagtctggcgctggtgtatgccgatgtgttgcatgagctggcgcatctgcgcggtgaagatttctcgcaactgcatattgtcggcggaggctgccagaacacgctgctcaaccagctatgcgccgatgcctgcggtattcgggtgatcgccgggcctgttgaagcctcgacgctcggcaatatcggcatccagttaatgacgctggatgaactcaacaatgtggatgatttccgtcaggtcgtcagcaccaccgtgaatctgaccacctttacccctaatcctgacaattcactctacacgacagacaaaggagctttgcgcatgaccactcaactggaacaggcctgggagctagcgaaacagcgtttcgcggcggtggggattgatgtcgaggaggcgctgcgccaacttgatcgtttacccgtttcaatgcactgctggcaaggcgatgatgtcagcttgcacttcgtttatagctcacgcctacatatgccgacctgtagccggataggcacttgtgccgcatccggcaatcaatgcctgatgcgacgctgtcgcgtcttatcaggcctacaactgttgccgacccgtaggccggataaggcgctcgcgccgcatccggcagtgtttacccgcggcgactcaaaatttctttctcataagcccgcacgctctccagccattcgctacctgctggcgtatcaccgcctgccacggcaacgatttctgctcttccagcagtgccagacgcgcagtgtaatcgcccgccgcttccagcttgcgcagctcagcggtaggttccagcaacgcacgcagcagggcttttttcatattgcgtgtaccaatgacccacgcggcaatgcggttgatagaggcatcgaagaagtcaaggccgatatgcacccggtcaaacagatcgtgacgcacaatctcactggcaattgcctgggtttcatcatccagcagcactacgtgatcgctgtcccagcgaacctgacggctgacgtgcagcagcatctgcggcacatacagcatggcggcggaaatcttgtcggaaatcactttaatcggatgggcggtgtcgatttacggcttaaattttctggcgattcactgggtgatctctatgaactgacgggcgttctgctgcccgataccccgccgtttgaaacggatggtcggctggtagcgaaaatcgacactgaaaaatcgtcggtctttgattatcgcggttttaatgggcgaattggtgatagcgatatccacggttctctggtctacaccaccggaaagccacgaccaaaactggaaggtgatgtcgagtcgcggcaattgcggctggcggacctgggaccgttgattggcgttgattccgggaaaggggcagaaaagtcgaaacggtctgaacagaagaagggcgaaaaaagcgttcagcctgcgggcaaagtgctgccttatgaccgcttcgaaaccgataaatgggacgttatggatgccgatgttcgcttcaaagggcggcgcattgagcatggcagtagcctgccgattagcgatctttctactcatatcatcctcaaaaatgctgacctgcgcctgcaaccgctgaaatttggcatggcgggcggcagcattgcggcgaatattcatctggaaggcgataaaaagccgatgcaggggcgggcagatattcaggctcgtcgactgaaactgaaagaactgatgcccgatgtggaactgatgcagaagacgctgggggaaatgaacggtgacgcggaactacgcggtagcgctacacaagacacaaatagagatctatattataataccgctcagtgtcgacacccgtcatcacgtatacgatacacccgcaaaaagccccgacggcggcccgacgaacgtcgccccgagaacctccaagacaagaaaagctctgaatttgacggctga

SEQ ID NO: 9171 - DNA, 1698 bp, Homo sapiens
  SIMILAR (1271)..(927): 371254mologous to uncultured bacterium pCosFS1 ElsD,accession number AF250767,Smith-Waterman Score=140.
ttatcttcgatcaaatattaaatgcgtatgatagttctgtatatgcaatgatacttgagaatttacaccatttatggaaggccatccaagctccatgcctgcagcatgcctgcaggtctgcaatggcataagccagcttgactgcgagcgtgacggcgcgagcaggtgcgaaagcaggtcatagtgatccggtggttctgaatggaagggccatcgctcaacggataaaaggtactccggggataacaggctgataccgcccaagagttcatatcgacggcggtgtttggcacctcgatgtcggctcatcacatcctggggctgaagtaggtcccaagggtatggctgttcgccatttaaagtggtacgcgagctgggtttagaacgtcgtgagacagttcggtccctatctgccgtgggcgctggagaactgaggggggctgctccagccttggggtaaaacggctcgatgacttccaccatgttttgccatggcagaatctgctccatgcgggacaagaaaatctcttttctggtctgacggcgcttactgctgaattcaccggagtcagtttttaaaaactgtttaaagaaatgcacaagtattgtgattgattttttagttgtttttcttgatgagaagctgatgcaaaattccgtctttataatgaaaatgatgccaaagcgaacgacaaggttgtagttttcactacatgtccatacataaaatggggtaacattcacgcgcctggtagcgttaccaacgctacgctcaaacataatgattctaataaaacgcgacagtgagctggtaccgaatagcacgggtaaaatcagaatcgcgcgggtttgcggttcgcgcagcaacgactgcaactctttgcggattaactgtccataagcgatgaaacatgctcttctccctaatccagccgacgtttggttttcagccacgtcaggccgataaacatcaccgccgaagcgatcaaaaacagcacgtttaccaccagcaccactggaatattcccgtgcgaggaacaggctttgcagggtgctgacgaaataacgagcgggaataatgtacgtcaccgcgcggatcaccgcgggcatactgtcgatctgaaaaataaagccggaaagcataatcgacggcagaaaagcggcgttccagggcgacctagagcccggcattgcacactgggttgccgggctaatccgtggcaaatcagcagccccatccccagggtactgagtaaaaacaggcagcatacacagcaacatcgccagcatcccgagaaagtaataagggatcagcttacacagcagcagttccgtgcgggtaatctccgtagagagcagagcctccatggtgccgcgttcccattctcgcgccaccaacagcgaggtgagaatcgcgccgatgaccgtcatgataatggtcaccgcaccggggattgatgacttcatgtttcttaccctccggcagttggaagtttttgcagaagtattgaaaagtggatcaaccacccaggcgtcggtgatgctggcgttgtcgcaatcaacagtgagcgcagccttgaccgaccggacaagaatgcggttgcagtagctgattttcctcagccccctgaaactgaaagccgtacagcgcacaggtacacgtcgttgccggatcgttaacgtcagaggccaccgcat

SEQ ID NO: 9172 - DNA, 858 bp, Homo sapiens
  SIMILAR (1)..(567): 1001254mologous to Escherichia coli nmpC,accession number M13457,Smith-Waterman Score=1022.
atggcgatgtctgctcaggcagctgaaatttataataaagacagtaacaagctggatctgtacgggaaagttaatgctaagcactacttctcctctaatgatgcagatgatggtgatactacttatgcccgtcttggcttcaaaggtgaaacccaaatcaacgatcaactgactggtttcggtcagtgggaatatgaattcaaaggcaaccgcgctgaatctcaaggttcctccaaagataaaacccgtcttgccttcgctggcctgaaattcggtgactacggctccatcgattacggccgtaactacggtgtagcatacgacatcggtgcgtggactgacgtcctgccagaattcggtggtgacacttggactcaaaccgacgtgttcatgactcaacgtgcaactggtgttgcaacctatcgtaacaacgacttctttggtctggttgatggtctgaactttgctgctcagtaccaaggcaaaaacgatcgtagcgatttcgataactacactgaaggtaacggtgatggcttcggtttctctgctacctatgaatacgaagggattcggtatcggtgcaacttatgcgaaatctgatcgtaccgacactcaagttaatgcagggaaagttcttcctgaagtatttgcttccggtaaaaatggcgaagttttgggccgcaagtctgaaatatgaccctaaccacatttacctggccactacctaatttgaaaacccaaaatatgactgtatttgctgatcacttcgttgctaataaagcccaaaacttcgaagctgttgcacaatatcagttcgatttcggtctgcgtccgtccgttgcttacctgcaatactaa

SEQ ID NO: 9173 - DNA, 2147 bp, Homo sapiens
  SIMILAR (35)..(631): 971254mologous to Escherichia coli IS5 39.3kDa protein,accession number U70214,Smith-Waterman Score=1003.
  misc_feature (1)...(2147): n = a,t,c or g
atgctccatgcgctgttgccggtaatccntgatagcgcttgcggaccgcacacctatcatgatttcccgccacctgctggagcagcatcaactggcccgccaattgttcaagaccatcaatcgctggctggccgaagcaggcgtcatgatgactcaaggcaccttggtcgatgccaccatcattgaggcacccagctcgaccaagaacaaagagcagcaacgcgatccggagatgcatcagaccaagaaaggcaatcagtggcactttggcatgaaggcccacattggtgtcgatgccaagagtggcctgacccacagcctggtcaccaccgcggccaacgagcatgacctcaatcagctgggtaatctgctgcatggagaggagcaatttgtctcagccgatgccggctaccaaggggcgccacagcgcgaggagctggccgaggtggatgtggactggctgatcgccgagcgccccggcaaggtaagaaccttgaaacagcatccacgcaagaacaaaacggccatcaacatcgaatacatgaaagccagcatccgggccagggtggagcacccatttcgcatcatcaagcgacagttcggcttcgtgaaagccagatacaaaggggttgctgaaaaacgattaccaactggcgatgttattcacgctggccaacctgtttcgggcggaccaaatgatacatctgaattattatcacgatccccattcgacggaaattgaagaggatggcagcactatcagtgacgatgcggtgaagcaacggggtgaaataaaagtgggagtcacgggcaatatcagtcagcgagtgtccctgcgcggcagcgtggcgtggcagaaagggagtgatgattttgcccagacggcagggtttttgtcgatgacggtgaaatgccacagccctgattactatagtaaagcctgttatcactctcctgctacagcatggccttttaaagcctataaactctccttaccattcccccattttacctgtcctaaaaccagacaagccttacaagttagttcagaatctgcgccttatcaaccaaattgtttcgcctgtccaccccgtgtatttattcaggtacttaacccaatgaatattgcctatcgtaaacgggaagcggataaagtactggcaacccggctcgcgctgcgtacccaccgaattagttatatcacgctcatcgcggtgatcctgttttttgccttttcgtttaccttctcaattagccacgaagaagccgtttctgcctttgaacaaaatatctcagcactggcgctggccgcgcaggtgatccctgggcatatcattcatatcacctctacggtgcttaatatctttgccgtactgaccgcattctttggcatttatctcggtttccacgaggccattaaaggcattattctcaatctgttaagccgaattattgataccaagaaaattaactcacgcgtgctgactctggcgatctgcgcttttatcgtcattacgttgacgatttgggtttcgtttcgtgtatcggtgctggtgttctttcagttgggaagcccgttatatgttaaaaatggacagatcattaatcaaccaacaaacgcatttcagtctgatttcagccttgccgctttatggcgtaacgaaaatcatgctggggtaaaagatgcaaatcccgtggcagttaatcaggaaacacctaagctctctatagcgcttaatggcattgtactcacatcgaatgatgagacttcttttgtcttaattaatgaggggagcgaacaaaagcgatactccctcaacgaagcccttgagtcagcgccgggaacgtttattagaaaaataaataaaaccagcgttgtgtttgaaactcacgggcattacgaaaaagtaactctccatccagggctacctgacatcatcaagcagcctgattcagaaagtcaaaatgtactcgctgattatattatcgccacgcctatacgtgatggagaacagatatacgggcttcgattgaaccctcgtaagggcctcaatgcatttaccaccagcttgctacaaccagaggatatcgacctcaggatcaataatctatcgctgacccaacctgatgaggttcacaggcattaa

SEQ ID NO: 9174 - DNA, 2175 bp, Homo sapiens
  SIMILAR (1519)..(2172): 941254mologous to Escherichia coli Hypothtical protein in gltJ 5'region ,accession number D90705,Smith-Waterman Score=1036.
atggctgaagccagtgtttttcaaactgtggatccctggaggcccggatttgccaccatccccgattttctgaaggaacgttatgataaaacgacgcgtattatcatcgacttctgcttcttaattgccaccggcgtctgctttctgccgattgttctctactccggcgcgttggcgctcaacagcctgtttcacgtcggggaatcgctacagatttctcacggtgcggctatctggctactggtaattttgcttggtctggcgggaattttgtatgcggtgatcggcggactgcgcgcaatggcagtggcggactccatcaacggtattgggctggttatcggcgggttgatggtgccggtatttggcctaatcgcgatgggcaagggcagctttatgcagggcattgagcaactcaccaccgttcacgccgagaaattaaactcaatcggtggcccgaccgatcccttgccgattggcgcggcatttaccggtttgattctggtgaacaccttttactggtgtacaaatcagggcatcgtgcaacgcacgctggcgtcaaaaagcctggcggaagggcaaaagggggcgctgttaacggcggtgctgaaaatgctcgacccgctggggctgaaacccgatctgctggcgtataataccgcgctacgtgcactcatcccacagcggctgatcgctttcgatgacgcggtacgtagcacgttgaaagaggaggaaaaactggtcaactccagcgactggggctacgacgctcaggccttttgcccgctggcgaccggagtagtgaaccaaatcggcggtaaagagcgttatttctttggcaatattttgtggcagacacgggcgttgatggaccgcgcgatcggtcataagctggcgaaaggccgcccggagcgcgaatatttacagactggcgatgcggtggatagctggaaagtgattgtcgttgaaccggaaaaacaacttacgttgttatttggcatgaaagcgccggggctgggacgactgtgttttagcctggaagataaaggcgactatcgtactatcgatgtccgcgctttctggcatccgcacggcccacattggatcgatgccaagagtggcctgacccacagcctggtcaccaccgcggccaacgagcatgacctcaatcagctgggtaatctgctgcatggagaggagcaatttgtctcagccgatgccggctaccaaggggcgccacagcgcgaggagctggccgaggtggatgtggactggctgatcgccgagcgccccggcaaggtaagaaccttgaaacagcatccacgcaagaacaaaacggccatcaacatcgaatacatgaaagccagcatccgggccagggtggagcacccatttcgcatcatcaagcgacagttcggcttcgtgaaagccagatacaaggggttgctgaaaaacgataaccaactggcgatgttattcacgctggccaacctgtttcgggcggaccaaatgatacgactggcacaggcagatgacgccgccccggcagcgggcagtacactggacaaaatcgccaaaaacggtgtgattgtcgtcggtcaccgtgaatcttcagtgcctttctcttattacgacaatcagcaaaaagtggtgggttactcgcaggattactccaacgccattgttgaagcagtgaaaaagacactcaacaaaccggacttgcaggtaaaactgattccgattacctcacaaaaccgtattccactgctgcaaaacggcactttcgattttgactgtggttctaccaccaacaacgtcgaacgccaaaaacaggcggctttctctgacactattttcgtggtcggtacgcgcctgttgaccaaaaagggtggcgatatcaaagattttgccaacctgaaagacaaagccgtagtcgtcacttccggcactacctctgaagttttgctcaacaaactgaatgaagagcaaaacatgaatatgcgcatcatcagcgccaaagatcacggtgactctttccgcaccctggaaagcggtcgtgccgttgcctttatgctggatgacgctctgctggccggtgaacgtgcgaaagcgaagaaaccagacacctggaacatcgtcggcagccgcagcccaggaggctacgggtgtatttgc

SEQ ID NO: 9175 - DNA, 1572 bp, Homo sapiens
  SIMILAR (154)..(957): 931254mologous to Escherichia coli K12 IS5 transposase,accession number AE000234,Smith-Waterman Score=1286.
atgcaagttattggaaccggtcattttctccttggggaacttataaccgacacccacgatgaaaccgtcagtgcgccagtcgccactgccggggccttcataagcaatatcaatggccacggattcggtcgggttaaactgcacgccagctccccacgccagagacgtgttgctgtggcgaccgtcatcacttccggcgggcaatgccgacggccctatccgctggagaccatgctgcgtattcactgcatgcagcattggtacaacctgagcgacggtgccatggaagatgccctgtacgaaatcgcctccatgcgcctgtttgcccgattatccctggatagcgccctgccggatcgcaccaccatcatgaatttccgccacctgctcgagcagcatcaactggcccgtcaattgttcaagaccatcaatcgctggctggccgaagcaggcgtcatgatgacccaaggcactttggtggatgccaccatcattgaggcacccagctctaccaagaacaaagagcagcaacgcgatccggagatgcatcagaccaagaaaggcaatcagtggcactttggcatgaaggcccacattggtgtcgatgccaagagtggcctgaccctcagcctggtcaccaccgcggccaccgagcatgacctcaatcagctgggtaatctgcttcatggagagaagcaatttgtctcagccgatgccggctaccaaggagcgccacagcgcgaggagctggccgaggtggatgtggactggctgatcgccgagcgtcccggcaaggtaaaaaccttgaagcagaatccgcgcaagaacaaaacggccatcaacatcgaatacatgaaagccagcatccgtgccagggtggagcacccgtttcgcatcatcaagcggcagttcggcttcgtgaaagccagatacaaggggctgctgaaaaacgatagtgtgtgtcttactggctctaaggataatgtactgctggtgatccatcactacggtgatagtagtgtcgtcatcgtgcgaactgaccatcttgtcatcggcaaggtatttttctttggtatacgggtccgtcacctcctggtattccagtttgatgttatcggcaatacacagcgcattcatcaggggctggacggttttttcctgcatatccacgaggtagtagtaactgccatcctcgcagccatcgggcgactggcggtggaagagaacatggcgctgttgatggaacaggctatcgccaacgaaggcctgttttatcgcctactctacctgcagcgcagtctcaccgccgccagcagtctcgacgatatgctgatgcgctttcaccgctgggcgcgcgatctcggcctggcagagctgctggtggtgctaccggaagcgaaagcggtgggatcggtggcgatgtcgatgctgggaagcgatgctgatttgggtgtcgtgctgtttaccagtcgcgatgccagtcactatcaacaggggcaaggaacgcagttacttcatgaaattgcgctgatgttgccggagcttctggagcgttgtattgaacgcgtatga

SEQ ID NO: 9176 - DNA, 1656 bp, Homo sapiens
  SIMILAR (424)..(948): 991254mologous to Escherichia coli K12 IS5 transposase,accession number AE000234,Smith-Waterman Score=903.
atgtgtagcttcaggtcgcagacgttttgcagcagcagtcgcttcacgttcgctcgcgtatcggtgattcattctgctaaccaccgggtcctcaacgacaggagcacgatcatgcgcacccgtggccaggacccaacgctgcccgagatgcgccgcgtgcggctgctggagatggcggacgcgatggatatgttctgccaagggttgcggtacggcccgttgccagcgcctgtgcgccaacaagctgctatcataataccctgtcatcgggtggtccgtggtgatggcacactttccggttaccgctggggcgtgtcgcgtaaagcgcaactcgtgcgccgcgaagctgaaaatgaggagaggccaatcaatcgtggctggccgaaacagccgtctgatgacccaaagcactttgtgatgcccaccatcattgaggcacccagctctaccaagaacaaagagcagcaacgcgatccggagatgcatcagaccaagaaaggcaatcagtggcactttggcatgaaggcccacattggtgtcgatgccaagagtggcctgacccacagcctggtcaccaccgcggccaacgagcatgacctcaatcagctgggtaatctgcttcatggagagaagcaatttgtctcagccgatgccggctaccaaggagcgccacagcgcgaggagctggccgaggtggatgtggactggctgatcgccgagcgtcccggcaaggtaaaaaccttgaagcagaatccgcgcaagaacaaaacggccatcaacatcgaatacatgaaagccagcatccgtgccagggtggagcacccgtttcgcatcatcaagcggcagttcggcttcgtgaaagccagatacaaggggctgctgaaaaacgataaccaactggcgatgttattcaccctggccaacctgtttcgggtggaccaaatgatacccgtctataccgacctgcttgttaactacacgtaccgcatcgcttttgaagccgccgggggtcaggacttcggtctgctggcagcaattgccacgctgatcttcctgctggtggcgattatgttcccgctgctgatggtcgtcgctatctcgctgcgtcagggaaactttgcgaccggcagcctgatcccggagcaaatctcctgggatcactggacactggcgttaggttttagcgttgaacaggctgatggtcgcattacgccaccgccattcccggtactgctgtggctgtggaactcggtaaaggtcgccgggatttccgcgattggcattgtggcgctctccaccacctgcgcctacgctgtcgcccgtatgcgcttcccaggcaaagcgacgctgctgaaaggaatgctgatttcccagatgtccccggcagcactctcactggtcgcgtcgtatgcgttgtttgatcgtctggcgcgcgtggtgtccatgccgtctaccgacgcatttgacaagcaggatgctgcttaccgtgaatccgtactgccgaaagcggttactgcacgcgttgctgtagaagcgggtattgctgactactggtacaagtatgttggcctgaacggtgctatcgtcgagctgctgtttgaagagttcggcttcactgttgataacgttgttgcgaaagcaaaagaactgctgtaa

SEQ ID NO: 9177 - DNA, 2496 bp, Homo sapiens
  SIMILAR (1177)..(1935): 991254mologous to Escherichia coli IS5 39.3kDa protein,accession number U70214,Smith-Waterman Score=1306.
atgacgcagattttcacgggtacattagtggaagccgatcctttccacgccgtgacgctcgttgccaatcacgacacccaaccgttgcaagccctcgaagcgccggtcgaaccgtggtttaaaccgctggcgtatgccttaattttgttgcgggaaaatggcgttccttcggtattctatccggacctctacggtgcgcattacgaagatgtcggtggtgccgggcaaacctatccgatagatatgccaataatcgaacagcttgatgagttaattctcgcccgtcagcgtttcgcccacggtgtacagacgttatttttcgaccatccgaactgcattgcctttagccgcagtggcaccgacgaatttcccggctgcgtggtggtcatgtcgaacggggatgatggcgaaaaaaccattcatctgggagagaattacggcaataaaacctggcgtgattttctggggaaccggcaagagagagtagtgaccgacgaaaacggcgaagcaaccttcttttgcaacggcggcagcgtcagcgtgtgggttatcgaagaggccgccaacaatcgtcagtacgactacggagctggccataaaataccagttatcaattacactgacgtgcatttgcggattgaacgcagctgccgcttccgtgctgatccccgacagcaacacgagctgcaactctccagcaaactggcagttcatgatgtgctgaccaatatttataatcggcgctactttttcaacagcgtagagtcattattgtcgcgacctgttgttaaggacttctgtgtcatgctggttgatattaatcagttcaaacgcatcaatgcccaatggggacatcgtgtgggtgataaagtgctggtttcaattgtcgatattatccagcaaagcatccgccccgatgatattttagcgcgactggagggtgaggtgtttggcttgctatttaccgaactcaatagtgcccaggcaaaaatcattgcggaacgtatgcgtaaaaatgtcgaactcctgaccggctttagtaacagatatgatgttcctgaacaaatgaccatcagtattggcacggttttttcaacgggtgacacgcgtaatatctcgcttgtcatgacggaagcagataaagccttacgcgaagcgaaaagcgaggggggcaacaaacattggtacaacttgagcgatggcgcgatggaagatgctctgtacgaaatcgcctccatgcgtctgtttgcccggttatccctggatagcgctttgccggaccgcaccaccatcatgaatttccgccacctgctggagcagcatcaactggcccgccaattgttcaagaccatcaatcgctggctggccgaagcaggcgtcatgatgactcaaggcaccttggtcgatgccaccatcattgaggcacccagctcgaccaagaacaaagagcagcaacgcgatccggagatgcatcagaccaagaaaggcaatcagtggcactttggcatgaaggcccacattggtgtcgatgccaagagtggcctgacccacagcctggtcaccaccgcggccaacgagcatgacctcaatcagctgggtaatctgctgcatggagaggagcaatttgtctcagccgatgccggctaccaaggggcgccacagcgcgaggagctggccgaggtggatgtggactggctgatcgccgagcgccccggcaaggtaagaaccttgaaacagcatccacgcaagaacaaaacggccatcaacatcgaatacatgaaagccagcatccgggccagggtggagcacccatttcgcatcatcaagcgacagttcggcttcgtgaaagccagatacaaggggttgctgaaaaacgataaccaactggcgatgttattcacgctggccaacctgtttcgggcggaccaaatgatactttgtccagtctttgtccaccacataccacggttcttcggtaccttctttggtgccaccgatacccagacctttacgctgaccgagagtgtgatacatcagcccctggtgctcaccaatttcatcgccatcgacggtaatgattttgcccggttgcgccgggagataacggcccaggaactcgcggaatttacgttcgccaatgaagcaaatgccgaccaagatcttcagcaatcttacgcactgcggtttttccagttcgccgaccgggaacaggctttgcgcaatctgctcatggctgagcgtataaaggaagtagctctggtctttattgctgtccagaccacgcagcaggcggctcttgccatcgacatcggcccgacgtacgtaatgaccggtagcgatataatcggcacctacaaagaggggttctacacggattgggttaaaatgatacctggtcacacgtttttatctgaaggaagaatatttcaaggtgatataccctacaagcccttgacgcggaggaatgaatgtgatgggagtgatgtatctgaatag

SEQ ID NO: 9178 - DNA, 3148 bp, Homo sapiens
  SIMILAR (2204)..(2281): 611254mologous to Escherichia coli IS5 39.3kDa protein,accession number U70214,Smith-Waterman Score=73.
atgcagtattggggaaaaatcattggcgtggccgtggccttactgatgggcggcggcttttggggcgtagtgttaggcctgttaattggccatatgtttgataaagcccgtagccgtaaaatggcgtggttcgccaaccagcgtgagcgtcaggcgctgttttttgccaccacttttgaagtgatggggcatttaaccaaatccaaaggtcgcgtcacggaggctgatattcatatcgccagccagttgatggaccgaatgaatcttcatggcgcttcccgtactgcggcgcaaaatgcgttccgggtgggaaaatcagacaattacccgctgcgcgaaaagatgcgccagtttcgcagtgtctgctttggtcgttttgacttaattcgtatgtttctggagatccagattcaggcggcgtttgctgatggttcactgcacccgaatgaacgggcggtgctgtatgtcattgcagaagaattagggatctcccgcgctcagtttgaccagtttttgcgcatgatgcagggcggtgcacagtttggcggcggttatcagcagcaaactggcggtgctgcgtggccgctctccatccttgttattgacaaattaatatatcgtcgcccttgctgtggaacactgcagccagatgtgattattacaccggttctgccggtggcctgcattagcacctggcgccatactgaggcagatcccaaagaaacagcaaagggttggcctccactactctccgatgtcctatgtgtcttggagataccgcgtctgccactggacgataacggtattctgtttatcgaaaacgttggcaacctcgtatgcccggccagcttcgatctcggtgaaaaacacaaagtggcggtgctttccgttaccgaaggtgaagacaaaccactgaaatatccgcatatgtttgccgccgcctcgctgatgctgctcaacaaagttgacctgttgccgtatctcaactttgacgttgaaaagtgcatcgcctgcgcccgcgaacggcgaagggatggaccagtggctgaactggctggagacacagcgatgtgcataggcgttcccggccagatccgcaccattgacggcaaccaggcgaaagtcgacgtctgcggcattcagcgcgatgtcgatttaacgttagtcggcagctgcgatgaaaacggtcagccgcgcgtgggccagtgggtactggtacacgttggctttgccatgagcgtaattaatgaagccgaagcacgcgacactctcgacgccttacaaaacatgtttgacgttgagccggatgtcggcgcgctgttcgccctggcgcagacccgcgagcaaggctacgccctggacagcgaagagaacgagcagggcgtgcgctgcgtggcggtgccggtgtggaaccacgagtcccgcgtcatcgacgacctgagcctgtcgacgctgacctcccgcgctggtaatggccggcgaccttatccgctggaaaccatgctacgcattcactgcatgcagcattggtacaacctgagcgatggcgcgatggaagatgctctgtacgaaatcgcctccatgcgtctgtttgcccggttatccctggatagcgccttgccggaccgcaccaccatcatgaatttccgccacctgctggagcagcatcaactggcccgccaattgttcaagaccatcaatcgctggctggccgaagcaggcgtcatgatgactcaaggcaccttggtcgatgccaccatcattgaggcacccagctcgaccaagaacaaagagcagcaacgcgatccggagatgcatcagaccaagaaaggcaatcagtggcactttggcatgaaggcccacattggtgtcgatgccaagagtggcctgacccacagcctggtcaccaccgcggccaacgagcatgacctcaatcagctgggtaatctgctgcatggagaggagcaatttgtctcagccgatgccggctaccaaggggcgccacagcgcgaggagctggccgaggtggatgtggactggctgatcgccgagcgccccggcaaggtaagaaccttgaaacagcatccacgcaagaacaaaacgggcatcaacatcgaatacatgaaagccagcatccgggcccaggtggagcacccatttcgcatcatcaagcgacagttcggcttcgtgaaagccagattcaaggggttgctgaaaaacgataaccaaatgggcgatgtttttcacgctgggcaacctgtttcgggcggaccaaatgatacacagtcaatattccgcgttgaggagacatcaagatggatcagtctcgtttaagccggagacacacacctgcgatgctcatcgccctgctctaaagccggcgaatgattatgtccgtaccttcttccgtggcgttgatattagtcaggtattcagtgcgaaagatattgcccgccggacaccgaatggcttaattcgtaaaacccctggcttcggcccacgttcggcactgaaattattgcaggatgaagatcgcgaatatggctacgttatcgaacgcggtaataagtttgtcggcgcagtctccatcgattcgcttaaaaccgcggctgtccctcctgttcagctactgacggggtggtgcgtaacggcaaaagcaccgccggacatcagcgctatctctgctctcactgccgtaaaacatggcaactgcagttcacttacaccgcttctcaacccgccgggcagtgacgtcatcgtctgcgcggaaatggacgaacagtggggatacgtcggggctaaatcgcgccagcgctggctgttttacgcgtatgacagtctccggaagacggttgttgcgcacgtattcggtgaacgcactatggcgacgctggggcgtcttatgagcctgctgtcaccctttgacgtggtgatatggatgacggatggctggccgctgtatgaatcccgcctgaagggaaagctgcacgtaatcagcaagcgatatacgcagcgaattgagcggcataacctgaatctgaggcagcacctggcacggctgggacggaagtcgctgtcgttctcaaaatcggtggagctgcatgacaaagtcatcgggcattatctgaacataaaacactatcaataa

SEQ ID NO: 9179 - DNA, 1680 bp, Homo sapiens
  SIMILAR (1)..(960): 981254mologous to Escherichia coli IS5 39.3kDa protein,accession number U70214,Smith-Waterman Score=1644.
atgagtcatcaacttaccttcgccgacagtgaattcagcagtaagcgccgtcagaccagaaaagagattttcttgtcccgcatggagcagattctgccatggcaaaacatggtggaagtcatcgagccgttttaccccaaggctggtaatggccggcgaccttatccgctggaaaccatgctacgcattcactgcatgcagcattggtacaacctgagcgatggcgcgatggaagatgctctgtacgaaatcgcctccatgcgtctgtttgcccggttatccctggatagcgccttgccggaccgcaccaccatcatgaatttccgccacctgctggagcagcatcaactggcccgccaattgttcaagaccatcaatcgctggctggccgaagcaggcgtcatgatgacccaaggcactttggtggatgccaccatcattgaggcacccagctctaccaagaacaaagagcagcaacgcgatccggagatgcatcagaccaagaaaggcaatcagtggcactttggcatgaaggcccacattggtgtcgatgccaagagtggcctgacccacagcctggtcaccaccgcggccaacgagcatgacctcaatcagctgggtaatctgcttcatggagagaagcaatttgtctcagccgatgccggctaccaaggagcgccacagcgcgaggagctggccgaggtggatgtggactggctgatcgccgagcgtcccggcaaggtaaaaaccttgaagcagaatccgcgcaagaacaaaacggccatcaacatcgaatacatgaaagccagcatccgtgccagggtggagcacccgtttcgcatcatcaagcggcagttcggcttcgtgaaagccagatacaaggggctgctgaaaaacgataaccaactggcgatgttattcaccctggccaacctgtttcgggtggaccaaatgatacagctgccaacgtatgagttatcgtcgggtataggcgctgttcgcagacaggcagaacttgatggtacgcctgcgatcaattccaaacgtgtttaccggatcatgcgccagaatgcgctgttgcttgagcgaaaacctgctgtaccgccatcgaaacgggcacatacaggcagagtggccgtgaaagaaagcaatcagcgatggtgctctgacgggttcgagttctgctgtgataacggagagagactgcgtgtcacgttcgcgctggactgctgtgatcgtgaggcactgcactgggcggtcactaccggcggcttcaacagtgaaacagtacaggacgtcatgctgggagcggtggaacgccgcttcggcaacgatcttccgtcgtctccagtggagtggctgacggataatggttcatgctaccgggctaatgaaacacgccagttcgcccggatgttgggacttgaaccgaagaacacggcggtgcggagtccggagagtaacggaatagcagagagcttcgtgaaaacgataaagcgtgactacatcagtatcatgcccaaaccagacgggttaacggcagcaaagaaccttgcagaggcgttcgagcattataacgaatggcatccgcatagtgcgctgggttatcgctcgccacgggaatatctgcggcagcgggcttgtaatgggttaagtgataacagatgtctggaaatatag

SEQ ID NO: 9180 - DNA, 1183 bp, Homo sapiens
  SIMILAR (591)..(271): 781254mologous to Escherichia coli K12 IS5 transposase,accession number AE000291,Smith-Waterman Score=398.
tcagagggagaggagtccagtagcagggcctgcagcagcaggcttcgtgtcacaggtctcttctgaactgggtctggaaaatccagggaactctgagaggtctgatgtagcagtcaggctggggtcctggacaccaagctcagggaggggtactgaggctactccttccttgaaagtaggactggggtaagggtggcagactaggtcagactggccacactgcggggccggttcctgtagcaggaggctgctgtctgtgcctcggaggccgaagccgaactgtcgcttgatgatgcgaaatgggtgctccaccgtggcccggatgctggctttcatgtattcgatgttgatggccgttttgttcttgcgtggatgctgtttcaaggttcttaccttgccgggggcgctcggcgatcagccagtccacatccaccttgggccagctcctcggcggtgtgacgccccttggtagccggcatagggtgagacaaattgctactctccatgcagcagattacccaactgattgaggccatgctcgttggccgcggtggtgaccaagctgtgggtcaggccactcttggcatcgaccaccaatgtgggccttcatgccaaagtgccactgattgcctttcttggtctgatgcatctccggatcgcggtgatagctctttgttcttggtcgagctgggtgcctcaatgatggtggcatcgaccaaggtgccttgagtcatcatgacgcctgcttcggccagccagcgattgatggtcttgaacaattggcgggccagttgatgctgctccagcaggtggcggaaattcatgatggtggtgcggtccggcaaggcgctatccagggataaccgggcaaacagacgcatggaggcgatttcgtacagagcatcttccatcgcgccatcgctcaggttgtaccaatgctgcatgcagtgaatgcgtagcatggtttccagcggataaggtcgccggccattaccagccttgggggtaaaacggctcgatgacttcccaccatggttttgccatgggcaggaatctgcttccatggcggggacaagaaaatctcttttctggtctgacggcgcttactgctgaattcactgtcggcgaaggtaagttgatgactcatgatgaaccctgttccatggctccagatgacaaacat

SEQ ID NO: 9181 - DNA, 3488 bp, Homo sapiens
  SIMILAR (160)..(1437): 991254mologous to Escherichia coli No definition line found,accession number U00039,Smith-Waterman Score=2167.
atgttcgcaagggtctcgactacacccgtcactcgatacgagatgtataggaaaacgcggtctactcgtctagaggacaacaacgcactaagtcaatcatgcaagccgctgccgttcagcgaagttactggatcgaaaggtaaagcggataaagaaaaggtgggcgattacgttttttgcctgaaggcgcagggacgatataacggtgaaccgctcacgggtacgggaaaaataggcggtatgctggcgctgcgtggcgaagggacgccgtttccggtacaggctgatttccgctctggtaacacccgtgttgcttttgatggcgtcgtgaatgacccaatgaagatgggcggtgtcgatttacggcttaaattttctggcgattcactgggtgatctctatgaactgacgggcgttctgctgcccgataccccgccgtttgaaacggatggtcggctggtagcgaaaatcgacactgaaaaatcgtcggtctttgattatcgcggttttaatgggcgaattggtgatagcgatatccacggttctctggtctacaccaccggaaagccacgaccaaaactggaaggtgatgtcgagtcgcggcaattgcggctggcggacctgggaccgttgattggcgttgattccgggaaaggggcagaaaagtcgaaacggtctgaacagaagaagggcgaaaaaagcgttcagcctgcgggcaaagtgctgccttatgaccgcttcgaaaccgataaatgggacgttatggatgccgatgttcgcttcaaagggcggcgcattgagcatggcagtagcctgccgattagcgatctttctactcatatcatcctcaaaaatgctgacctgcgcctgcaaccgctgaaatttggcatggcgggcggcagcattgcggcgaatattcatctggaaggcgataaaaagccgatgcaggggcgggcagatattcaggctcgtcgactgaaactgaaagaactgatgcccgatgtggaactgatgcagaagacgctgggggaaatgaacggtgacgcggaactacgcggtagcggtaactcggtggcggcacttttaggcaacagtaacggcaacctgaaactgttgatgaatgacgggctggtgagccgcaacctgatggagattgttgggctgaatgtcggcaactacattgtcggtgcgatatttggtgatgatgaggtgcgggtgaactgcgcggcggcgaatctgaatattgccaacggcgtggcgcgcccgcagatttttgctttcgatactgagaacgcgttgattaatgttaccggcacggcaagttttgcttcggaacagctggatttgactattgatccggagagtaaaggaattcggattatcacactgcgttcgccgctgtatgtgcgggggacgtttaaaaatccgcagtctggttgatggtctgaactttgctgctcagtaccaaggcaaaaacgatcgtagcgatttcgataactacactgaaggtaacggtgatggcttcggtttctctgctacctatgaatacgaaggattcggtatcggtgcaacttatgcgaaatctgatcgtaccgacactcaagttaatgcagggaaagttcttcctgaagtatttgcttccggtaaaaatgcagaagtttgggccgcaggtctgaaatatgacgctaacaacatttacctggccactacctattctgaaacccagaatatgactgtatttgctgatcacttcgttgctaataaagcccaaaacttcgaagctgttgcacaatatcagttcgatttcggtctgcgtccgtccgttgcttacctgcaatctaaaggtaaggatcttggagtatggggcgatcaggacttagtcaaatatgttgatgtaggtgcaacctattacttcaacaaaaatatgtctactttcgttgattacaaaatcaacctgcttgacaaaaatgacttcactaaggaagggttcatcatgagtcatcaacttaacttcgccgacagtgaattcagcagtaagcgccgtcagaccagaaaagagattttcttgtcccgcatggagcagattctgccatggcaaaacatggtggaagtcatcgagccgttttaccccaaggctggtaatggccggcgaccttatgcgctggaaacccatgctacgcattcactgcatgcagcattggtacaacctgagcgatggcgcgatggaagatgctctgtacgaaatcgcctccatgcgtctgtttgcccggttatccctggatagcgccttgccggaccgcaccaccatcatgaatttccgccacctgctggagcagcatcaactggcccgccaattgttcaagaccatcaatcgctggctggccgaagcaggcgtcatgatgactcaaggcaccttggtcgatgccaccatcattgaggcacccagctcgaccaagaacaaagagcagcaacgcgatccggagatgcatcagaccaagaaaggcaatcagtggcactttggcatgaaggcccacattggtgtcgatgccaagagtggcctgacccacagcctggtcaccaccgcggccaacgagcatgacctcaatcagctgggtaatctgctgcatggagaggagcaatttgtctcagccgatgccggctaccaaggggcgccacagcgcgaggagctggccgaggtggatgtggactggctgatcgccgagcgccccggcaaggtaagaaccttgaaacagcatccacgcaagaacaaaacggccatcaacatcgaatacatgaaagccagcatccgggccagggtggagcacccatttcgcatcatcaagcgacagttcggcttcgtgaaagccagatacaaggggttgctgaaaaacgataaccaactggcgatgttattcacgctggccaacctgtttcgggcggaccaaatgatactttcaccttccatgatacacagatcaaaagctgtaccctgcttgatggctcaagattcctatatagtcttctttgtccgcagattattaattaacactttactatgccaaacacatgcattacagatcccaccgacagtcagagaagggtgtgaacagaacacagcagaaatgtcattgttgcaccagctccatgccaggcgctgggggagattcaatggtgtacaagacctagccctgattcacaaggcccctgacctaatggtgagctggagctacgcgtacaaggcaagagccttaaccttcatcacccccaagtggatggtctccattttccaagctggcagctcaccccctctctctgtgcctctgctgctgcggtccacacacctggaatgccctctgcaccctgcacacggcatcccccctccttcaagcatcgctgctcatctgaaatatggagacaaaaatgccttcctatccacctcacagcgcaggaataagccccaaatagaaaaggtggatgggaaagattga

SEQ ID NO: 9182 - DNA, 876 bp, Homo sapiens
  SIMILAR (1)..(729): 981254mologous to Homo sapiens Human 68772 protein, a homologue of Drosophila Pelota protein,accession number W78473,Smith-Waterman Score=1246.
atgaagctcgtgaggaagaacatcgagaaggacaatgcgggccaggtgaccctggtccccgaggagcctgaggacatgtggcacacttacaacctcgtgcaggtgggcgacagcctgcgcgcctccaccatccgcaaggtacagacagagtcctccacgggcagcgtgggcagcaaccgggtccgcactaccctcactctctgcgtggaggccatcgacttcgactctcaagcctgccagctgcgggttaaggggaccaacatccaagagaatgagtatgtcaagatgggggcttaccacaccatcgagctggagcccaaccgccagttcaccctggccaagaagcagtgggatagtgtggtactggagcgcatcgagcaggcctgtgacccagcctggagcgctgatgtggcggctgtggtcatgcaggaaggcctcgcccatatctgcttagtcactcccagcatgaccctcactcgggccaaggtggaggtgaacatccctaggaaaaggaaaggcaattgctctcagcatgaccgggccttggagcggttctatgaacaggtggtccaggctatccagcgccacatacactttgatgttgtaaagtgcatcctggtggccagcccaggatttgtgagggagcagttgtgcgactacctgtttcaacaagcagtgaagaccgacaacaaactgctcctggaaaaccggtccaaatttcttcagattgttgatactgaatacgtgctgaagcgacttcggcactgtattgtttatcctcacaacatcgcaaccgtgctggtccccggcggcgcgacgctgcccgcaaaggatggagaagacaacggcatagatatctggcaatgtatccagtga

SEQ ID NO: 9183 - DNA, 450 bp, Homo sapiens
  SIMILAR (214)..(366): 1001254mologous to Escherichia coli RhsE protein,accession number X60998,Smith-Waterman Score=274.
atgaccaagaataaccggacattccgcaatgatagtaagataccgatctgtacggtggttctcaaacttaaacatgcatcaggatcacctggaggaccagctacaagaaggttcctgggctacaccccaaccccagagtttcttattgaggagcctgaagtgggcctggaatgtgcatttataacaagttcccagatgatgctgatgctgctgacgcgggaatacggctacagcgccacgggcaggctggagagtgtgcgcaccctcgcaccagacctggacatccgcatcccgtatgccacggacccggcgggcaaccggctgccggacccggagctgcacccggacagtacactcacagtgtgggatcctatagagtctgcgtgctcacattcttccctttgttttagagtcactccaacttgccacctcctcccagaagccttctga

SEQ ID NO: 9184 - DNA, 1107 bp, Homo sapiens
  SIMILAR (1053)..(517): 981254mologous to Cloning vector pSacBII SacB,accession number U09128,Smith-Waterman Score=938.
ctacacgaaggtttttgcgctggatgtggctgcccggcaccgggtgcagtttgcgatgccggagtctgatgcggttgcgatgctgaaacaattatcctgagaataaatgccttggcctttatatggaaatgtggaactgagtggatatgctgtttttgtcgcctggccctgagagagttgcagcaagcggtccacgctggtttgccccagcaggcgaaaatcctgtttgatggtggttccgaaatcggcaaaatccattaattgcgttgcgctcactgcccgctttccagtcgggaaacctgtcgtgccagctgcattaatgaatcggccaacgcgcggggagaggcggtttgcgtattgggcgccagggtggtttttcttttcaccagtgagacgggcaacagctgattgcccttcaccgcctggccctgagagagttgcagcaagcggtccacgctggtttgccccagcaggcgaaaatcctgtttgatggtggttccgaaatcggcaaaatccctgcgctgttgtcaggctttgtttgccgtaatgtttaccggaatagtcagtgtagaataaacggatttttccgtcagatgtaaaggttgcagaaccggaccattcttgcgtctgatctttcaggatcggatcgttggcgtcgaacttatcgctgtctttaaagacacggcccgcgtttttccagctgtcgattgagttgtcgccgaccttttgataaaacatgtagattgatgtgtcatcagcgtctttcgggcttcccgcaagagcaaacacaacgtgatagccgttgtattcagctactgttccgtcagcgttttgcagcggccagctgtcccacacatcaagtccttttgcagactcaatatttttaatcgttgattgatcgaattgaggcacttggtatttttcgttttgctgctgtttagggatctgcagcatatcatggcgtgtaatatgagagacgccgtacgtttctttgtatgctttttggttattttctttcgcgaaggcttgagtcgctcctcctggcactggcgctggcggcagaaggggcgaaagtcggcattctggacgccgatatctacggcccat

SEQ ID NO: 9185 - DNA, 2964 bp, Homo sapiens
  SIMILAR (1860)..(1723): 821254mologous to Escherichia coli K12 putative isomerase,accession number AE000390,Smith-Waterman Score=224.
ttatccaacagatatccgatcacctgccgctttcaggaaccagtcacgcgcgctatgggcgtaggtcatagtttcctgagtggtgaaggttttagatgctaccaagaacagcgtggtttccgggtttacttttttcagcacttccgcgatgtgagtcccatcgacgttagaaacaaagtgcatgttcaggtggtttttgtacggacgcagagcttcggtcaccatgtatgggccgaggtcagaaccgccgatcccgatgttcactacgtcagtgattgctttgccggtataacctttccactcaccggaaataatcgcttctgagaaggttttcatcttctccagcaccgcgttgacttccggcattacgtctttgccatcaaccaaaatcggggtattgctacggttacgcagcgctacgtgcagcacggcgcggttttcagtgcggttgatcttctcgccagagaacatcgacttaatcgcgcccgccagatcgcactctttcgccagatcctgtaatttcgccagcgtctcttcagtgatgcggtttttggagtaatccaccagcatctgatcgtcgaaggttgcggagaacttagaaaaacgatcgccgtctttagcaaaaagatcggcgatcgtaacgtctttcatttcatcgaagtgtttctgtagtgcctgccaggcagcggtctgcgttggattgatgtttttcattagcaatactcttctgattttgagaattgtgactgcgctagcgcaggccagaagaggcgcgttgcccaagtaacggtgttggaggagccagtcctgtgataacacctgagggggtgcatcgccgaggtgattgaacggctggccacgttcatcatcggctacaggggctgaatcccctgggttgtcaccagaagcgttcgcagtcgggcgtttcgcaagtggtggagcacttgcccaggcctggcagcgtttgtttgtcggcccgtgggcactgccgtctccgccgtgggggtcggtctggctggatcgcgaatctgtgctgtttggcgattcacactgggcctcgtcagtggatgcccgagacaggcttccgttgaattgagccaacgacggagatcttcggtcctgtgtgacgctctcgtgccacatgtcccacgcatcagaagcggctgaccctcccgccaccaccgcatttacagacgaacatatgtcggtcaagctacgccgaacagtcggcgtggcctgttcggtgtgccccggctgggtgacgtccggccatccggtcaatccggctgcttccgtgcaaaggtccttcccggtgataccgacatcgccctgcccggcccgctgccgttcattctctcccgcacagcttcgcgataacacactgatactcagtgataacggcggcctgaatcctgtattttgagctcctgtttcccggtgaggacggttaccgccgctgcgagtctctgtggctggtgcgcggcggtgtggcgaaactggatcaaggtcaccggctggccgcactctggcaggcgctgtcggaagaactccggttaactccgcatcgttatctggcgacaaacagtccgcaggggccgtggtggctgctcggttggtgtgagcgggtgccggaagcggatgaggtgctgcctgcgccgctgccgccgtaccgggtactgaccgggctggtggaccgcatctggcgttcggaagacgtatccgcagcttcagggcttcatcacgataaccgtaacgctccatccctttcagaccaaaccagaactgatccacccatacgcgcccacgccagtagatatcagcgccaaaagccggatggttaacgccgccgttcccagcgggacaaaggtgttgaacgttaaacagcggcgaccagccttccggccctttaccgcgctcaacaatcggtttgcccgcgcagccgttcgccagtggtttatcttcaatacgtacgtcatagtagaactgggtagtcgggtcgaacatacaggtgttgatgtagtccgcgagctgctgtgccaactggcgatagcgtttggcctcttctggcttaccgaggatggttgccatctccgccagataatggttatcgctgtacatatagctggcctgatccaccgactcctgcaatagcgagtagcccagcaacgttccgtcctgactgcggttttcggcgaatttcaccgtccagtcgctacgtttgccgccattagcgacatatttatccaactgttctttgtcgataaacccaaagacggcggcatcatcacgccccgattcccacgatgcagcaacctgtgccggaatttccagactgtcgtactggcctttctccaccacgcgggcgtagttgttcagcccagactgcgtctcttctttatcgccttttttcaccgtaaacagcatctcgccgctctcagtgttgtgggctttgtcgcgggtcgcgccatattccggcacgccgttgccgttgtgatcgcggttacgtaaccaccagtcgtgataggccaccagtttcgggtacatctctgccacccaggttttatcttgggtgacgttatacacttccatcaccgaccaggcggcaaggctgggtttggtattacgttcgttccagttgccgccatcgccaccacgctcggggctaaggttccacgctatcaggtcggggacaaagcccacatcctgcggacgcacgctatcgccaggctggatctgccaggagaagaccgcgcggatattctctttggcgatgtccggattgaaatgcgccatcgcaaacgcctgcttccaggtatcccacgggcaggtctgattggcggagaaccagcgcccggtcaccgacggtgtaacggtgttaaatttcaccgcaccgcccggtgagcgccagtaacggtgaacgtttcgatcgctttcaccgcgacgcgcgtctgttccgggtcgcat

SEQ ID NO: 9186 - DNA, 3294 bp, Homo sapiens
  SIMILAR (862)..(1644): 921254mologous to Escherichia coli o588,accession number L10328,Smith-Waterman Score=1246.
atgtgcggcccgcggcggctcgcagctcccggcagcagcctcggcagcttcggccgcgcctcgagaggcggccgcagaggctccagcggcggccgagcggccgagcccgggctgggagacaccatgcgccgcgtccttcggctgctcctcggttgcttcctcaccgagctgtgcgcccgcgtgtgccgggcgcaggagcgagcgggacacgggcagctggcgcaactgggcggcgtgttgctgctggcggggggcaaccgctccggggccgcctccggagaggccagcgagggcgctgaggcatcggacgcgcccccgacccgggcgcccacgccggacttctgccggggctacttcgatgtcatgggccagtgggacccgccgttcaactgcagctcgggcgacttcatcttctgctgcgggacttgtggcttccggttctgctgcacgtttaagaagcggcgactgaaccaaagcacctgcaccaactacgacacgccgctctggctcaacaccggcaagccccccgcccgcaaggacgaccccttgcacgaccccaccaaggacaagaccaacctgatcgtctacatcatctgcggggtggtggccgtcatggtgctcgtgggcatcttcaccaagctggggctggagaaagcgcaccggccccaaagggagcacatgtccagcctctccgctgggggatgtcaccgggaagccaacttcggcttggaacacggagaaggggcgctgggctcagcacagggggtatccctctcccggtcccgcagccccgcttgttctccgctcttggccaatcccactgtttcggcccccgcctctgttgccactttcctcaccagcatggatcttgccctctcctttgtgtcactcactaaaggctcaaagtctggttcaagcaacgatttgatcaacgaatttaacagcccgcaatgcatgctctgtaccgatgaccgtaacccgtgggagatcgcccatgaaggacacatcgatgccttaattcgccgcctgatcgaacaacacaatgtgccgctgcatgtggcatatcgcgtcgccagctggtcgacggcgcgccactttggtctgaatcacctcggcttactggcacccggcaagcaggccgatatcgtcctgttgagcgatgcgcgtaaggtcacggtgcagcaggtactggtgaaaggcgagccgattgatgcgcaaaccttacaggcggaagagtcggcgagactggcacaatccgctccgccatatggcaacaccattgcccgccagccagtttccgccagcgactttgccctgcaatttacgcccggaaaacgctatcgggtcattgacgtcatccataacgaattgattacgcactcccactccagcgtctacagcgaaaatggttttgatcgcgatgatgtgagctttattgccgtacttgagcgttacgggcaacggctggctccggcttgtggtttgcttggcggctttggactgaatgaaggtgcgctggctgcgacggtcagccatgacagccataatattgtggtgatcggtcgcagtgccgaagagatggcgctggcggtcaatcaggtgattcaggatggcggcgggctgtgcgtggtacgtaacggccagaaattactcttcagaatccccagcttcagcatcatcagcggtttcgtttgcgaaatcatcgcgacgctcacggcgctcgtctttcgctttaaccatcggagatgcttcggtaacagcgtgcttggtacgcataaccatgctgcggataacggcatcgttgaagcggaaggtagtttccagctcatcgatcacttcctgcggagcttcaacattcatcagaacgtagtgtgctttgtgcagtttgttgatcgggtaagccagctgacggcggccccagtcttccagacggtggatcttgccttctgcaccagtgatggcagcagtgtagcgctcgatcatgcccggaacctgttcgctctgacagaagggaataaaataaaaaatcgtcgcgaggaaaaacatcggtgccgaggccagtccaagctcaatattattattgataacgttgttaaagctgtaaacggcggcaaaagtcagcgagagcaagccgaatttgccgattgtattacgtttggtatcagacataacacatctccgaaaatgagtaggttgttatttgttatggaaataaccatcttcgatggtgactttgagaaccacttttttgaccgcgttattgcagataaaccgatacgcttcatggatatcgcaaataacgatttgcccttcgtggacctcaacgaacagttggataaatatgtcgctaatggcggcaaacgtagcgactggacggtgaaattcgccgaaaaccgcagtcaggacggaacgttgctgggctactcgctattgcaggagtcggtggatcaggccagctatatgtacagcgataaccattatctggcggagatggcaaccatcctcggtaagccagaagaggccaaacgctatcgccagttggcacagcagctcgcggactacatcaacacctgtatgttcgacccgactacccagttctactatgacgtacgtattgaagataaaccactggcgaacggctgcgcgggcaaaccgattgttgagcgcggtaaagggccggaaggctggtcgccgctgtttaacggtgcggcaacgcaggccaatgccgacgcggtggtgaaggtgatgctcgatcctaaagagttcaacacctttgtcccgctgggaacggcggcgttaaccaatccggcttttggcgctgatatctactggcgtgggcgcgtatgggtggatcagttctggtttggtctgaaagggatggagcgttacggttatcgtgatgatgccctgaagctggcggatacgttcttccggcacgccaaagggttaaccgccgatggaccaattcaggaaaattacaacccgctgacaggcgcacagcaagcacaccagatgtcagtgcgcgagttgtacaccgatgtcatcgaagagttttactgggttgcgctcccgcttacgacgcaaaattccctttcacaataccaacccgaatggcagtgctgggaacctgatgtcgaatggccaggcatgaccttcgaacaatttgtacgtgagtttgccgaatggatcagcctatcgattcattactgttacccggagtatgctcataaggtgtttcacagacagtactggcgtaataaatgggcaacttcatctgacctagcaatcccatga

SEQ ID NO: 9187 - DNA, 1575 bp, Homo sapiens
  SIMILAR (958)..(1572): 981254mologous to Escherichia coli RhsD protein,accession number X60999,Smith-Waterman Score=1102.
atgggcaaagacttcctgtctaatacaccaaaagcaatggcaacaaaagccaaaattgacaaatgggatctaattaaactaaagaacttctgctcagcaaaagaaaccaccatcagagtgaaaagacaacctacagaatgggagaaaattttcacaacctactcatctgacaaagggctaatatccagaatctacaatgaactcaaacaaatttacaagaaaaaaacaaacaaccccatcaaaaagtgggtgaaggacgtgaacagacacttctcaaaagaagacatttatgcagccaaaaatcacatgaaaaaatgctcaccatcactggccatcggggaaatgcaaatcaaaaccacaatcaccaaaattgacagaccgctagcaagactaataaagaagaaactagagaagaatcaaatagacgcaataaataatgacaaaggggatattaccactgatcccacagaaatacaaactaccatcagagaatattataaacacctctacacaaataaaccagaaaatctagaagaaatggataaattcctcgacacatacaccctcccaagactaaaccaggaagaagttgaatctctgaatagaccaataaaaggctctgaaattgaggcaataattaatagcttactaaccaaaaaaagtccagggccagatggattcacagccaaattctaccagaggtacaaggaggagctggtaccattccttctgaaactattccaatcaatagaaaaagagggaatcctccctaactcattttatgaggccagcatcatcctgatactaaagcctggcagagacacaaccaaaaaagagaattttagaccaatatccttgatgaacattgatgcaaaaagcctcaataaatactggccaaccgaatctagcaactcatcaaaagcttatccacatgatcaagtgggcttcatccctgggatgcagacggtatacgagccgggaagcttcacgccgctcatccgggtcgagacagagaacggcgagcgggaaaaagcgcagcggcgcagcctggcagagacgctccagcaggaagggagtgagaacggccacggcgtggtgttcccggctgaactggtgcggctgctggacaggctggaggaagaaatccgggcagaccgcgtgagcagtgaaagccgggcgtggcttgcgcagtgcgggctgacggtggagcaactggccagacaggtggagccggaatacacaccggcgcgaaaagctcatctttatcactgcgaccaccggggactgccgctggcgcttatcagcgaagacggcaatacggcgtggagcgcggaatatgatgaatggggcaaccagcttaatgaggagaacccgcatcatgtgtatcagccgtaccgtctgccagggcagcagcatgatgaggaatcagggctgtactataaccgtcaccggtactacgatccgttgcagggtcggtatattactcaggacccgatggggttgaaagggggatggaatttatatcagtatcctttaaatccactacaacaaattgaccctatagggatcctgtag

SEQ ID NO: 9188 - DNA, 2505 bp, Homo sapiens
  SIMILAR (1498)..(2319): 741254mologous to Escherichia coli RhsD protein,accession number X60999,Smith-Waterman Score=1033.
atggcttggagaaacagtgtaaactggcagtgtaaacaagagccgggctttctacatcgtcggcatggtcgaaggaaattgactaacggcacaactcggagaagtttacaaaacaaggaggaagacttctacacctcacagccaggattccctgctctggctctcggctgctgcctcagggtgaatctgttgctaggtcatcgtggcatctctgcagggagctcatacagacccatcacatccaccccctgccacctctgcaagcttggacaggaggtgtttgccaaacctttaaatcttcaggatcaatgtcagcaaaatctggtaatgcaggtcttgaaactggtccttaactgccttaactttgacttcattggcagttcagcagatgaatctgcagatgatctttgcacggtgcagattccaacaacttggagaacaatgggtctggtcggatgtgatggcgtgtgttgtcgaacccgctggtgtcagtgtctcgcgaccgcggtggtctctggtgttggcggtggcccctggttgcttccggcctgttcttctggaccgtcgatgatttccaagagaaagaaatttgtacacaaatgggctaaagacttggtggaacctagacacgggcttgaaaacgtatgggacctgcccagggccatggctggaagctacttgatgtacaagcaaagaaagtggaagataatggaatttgggaaatgggcacttcaacacaagatgacagtgaaagacatagaaaggctacagttgtataacaaagttaaggagcaaccagttcaagttgaaggctctgggagggctagcacgattttttgggtgttgaaaacgtttaaggggggaaaaagcccctgtggtgcccccggcgagtgtgtggcgtggacgcaatgcagaattttaggttgggtacaaattcatttcaaagagcatcccgcagatcgcgttgtgggtttaattaagatgcctggcctggatttttattttgccgctgatgtttgttacgccgagaaagttgcgcaagaaaaaggttttttatatcgtttaacatcacgatatcgccattatgccgcatttgagcgagcgactttcgagcagggtaaatcgacgaaacttatgatgctgaccgataagcaaatcgccgatttccagaagcattatcaaactgaacctgaacgttttcaaattcttcctcccggtatttatccggacagaaaatacagtgagcaaatcccaaacagccgtgaaatttatcgccagaaaaatggcataaaagagcaacaaaacttattactgcaggttggatcagattttggccgtaaaggtgtagatcgctcaattgaagctttggcatcgttaccggaatcattacgtcacaatacgcttttatttgttgttggtcaggataagccgcgaaaatttgaagcgctggcagaaaaactcggcagtgaacgtgcatccatggagttcaagcggtatgaatacaacgccgcaggcgacctgactgccgttatcaccccggacggcaaccggagcgagacacagtacgatgcgtggcggaaaggcggtcagcaccacgcagggcgggctgacgcgcagtatggagtacgatgctgccggacgtgtcatcagcctgaccaacgagaacggcagccacagcgtcttcagttacgatgcgctggaccggctgtgaggatgagggacttgtcatcctctgggtactacgatgaatcggaccgtatcactcaccgcacggtgaacggcgaaccggcagagcagtgccagtatgatggccacggctggctgacagacatcagccacctgagcgaaggccaccgtgttgccgtccacgatggctatgacgataaaggccgcctgaccggcgaatgccagacggtggagaacccggagacgggggaactgctgtggcagcatgagacgaaacacgcatacaacgagcaggggctggcaaaccgcgtcacgccggacagcctgccgccggtggagtggctgacgtatggcagcggttacctggcgggaatgaagctgggcggaacgccgctggtcgagtatacgcgggacaggctgcaccgtgagacggtgcgcagcttcggcagcatggcaggcagtaatgccgcatacgaactgaccagcacatacacccccgcaggccagttacagagccagcacctgaacagcctggtatatgaccgtgactacgggtggagtgacaacggcgacctggtgcgcatcagcggcccgcgacagacgcgggaatacggctacagcgcctacgggcaggctggagagtgtgcgcaccctcgcaccagacctgtacatccgcatcccgtatgccacggacccggcgggcaaccggctgccggacaaggagctgcatcccggactagtacactcactaatgtgggggggtaccacctatttttgcaccgagccggtaccatctatctgtttgatatccttacttaa

SEQ ID NO: 9189 - DNA, 945 bp, Homo sapiens
  SIMILAR (562)..(362): 971254mologous to Escherichia coli put. ATPase,accession number X55791,Smith-Waterman Score=338.
gccattaatcgctaatgtggcagtctctgaagagaatgcgggagaagccaatccataggcaagaaaaataattcctgacagccaatacttattcattgaacgttatccctgtagtaaaggttatgcctggatagaatgagtgcataacaaactatagctgtacatccactacacagccacgaaggatgataatgaagcattgcctgtatgatcaatcgactttgtagagtttcggacgaaggtccgcagaatattcgcagtattaaataagtgttcattaatgcggcaaaaactaatacaccgcatcaatgtaacatctctgcggtgtatgaagaataaccagaatggttaataggcgttagaccgcgcggaaggaaatctcgcctggaatgacttcaccctgccagtagagctgagctgcaacgcggtcagccagctggcggtagatagcggtaaattcgctctccggacggctgataaccgttggcgtacctttatcgagatcctcacgtaaggagatgtgtaacggcatctggcccagcacctgtgtatggaatttttcaacccggtttctctgcacccaccggtaccgaaaatcggttcatggtgaccacagttactgcaaatatgcacactcatgttctcgacaataccgagcaccggaacctcgactttctcgaacatcacaatgccttttttcgcatcgatcagcgcgatgtccattgttggatttgatgggccgtagatatcggcgtccagaatgccgactttcgccccttctgccggcagcgccagtgccaggtttaccgccgtggacgatttacccacgccgcctttaccggaactcaccgcgataatgttcttcacaccgttaattcccggctgattcttcacgcgtttcagagtggctatgttatgcgacagtttccagtcgatagctttcgc

SEQ ID NO: 9190 - DNA, 1857 bp, Homo sapiens
  SIMILAR (675)..(16): 991254mologous to Escherichia coli K12 putative dehydratase,accession number AE000500,Smith-Waterman Score=1113.
ttaggcagtccgctcaacagtcgggggcacgcgcttgttgatgcggatccagtcatcaacggtcgggatatggcaacctgcctggtgagcaattgccggaatgtgtaacagcaggtttgttgaaccaccgaacgcggcatggaccgtcatcgcattctctatcgctttatcggtgagaatttcccgggtggtgatgcctttttgactcaggttcagcgcagctcgcgcggaagctctggcgatctcccgccacacaggctcaccggaaggggccagggctgaatgtgggattgccagtcccaatccttcggccaccacctgagatgtcccggcagtgcccaaaaattgacagccgccgccggaagaggcacaggctttacagcccgcacggcgtgcgtcctgtagagataattcgccattggcgaagcgtgcgccaatggtttgcaccttgccgttgtcttctccatcctttgcgggcagcgtcgcgccgccggggaccagcacggttgcgatgttgtgctgcgcggcgagtgccatcatggtggccggaagccccttatcgcaactcgccacaccaataactgctttcgcgtcgggcagagagcgaataaggcggcgcattaccatcgatgcgtcatttcggtatggtagcgaatcaaacatccccgttgtaccattgtcggcctgcaaccggaagagggcagcagcattcccggcattcgccgctggcctacggaatatctgccggggattttcaacgcttctctggtggatgaggtgctggatattcatcagcgcgatgcggaaaacaccatgcgcgaactggcggtgcgggaaggaatattctgtggcgtcagctccggcggcgcggttgccggagcacggtcgaccggtcccatcacaaccagccagggacttggcatcgtcaccagccgggaccacgcggacccgcaaagccggcgcggccttggcgtgcagggacacaccttcccactggaacggcaagcgtgcgtcatccatgtctcggacagccgttgcgtgcagagccgcgtccagcagtgccggatgcaccccgaaaccagaatcttccgttcccggccccgcagactgactcggcactcccgggggctgttcgaggatgacgtgcgcgttagtaccactgatcccgaacgacgacacccccacccgacgaacacgaccactcctgggccagggcgtgttctccgtaaggagttgaaccgtccccgccgaccaatccacctccggcgacggcgattccacgtgcaacgtgcgtggcagctgcccgtgccgcatcgccatcaccatcttgatcacaccagccacacccgccgccgcttgcgtatgaccgatgttcgacttgaccgaccccaaccacaacggccggccaggatcacgatcacggccgtaggtggcgatcagcgcggtacgtaacgcgcgtctaggaagaacttcggccggggcaaaacgctggaagctgatactgcgtggatccagcgcggtatgcagagcggtggtgttaatgagaacgcggtggcttccggcaaagcgcgggggcgtcaggaaaagaatcaccgtgcatgcctgccggataacaaaggtccggtttccggtccgaagatcatcgacggtgcagagcttctgatcccgatggctggcctcatcaacaaagaagatgagctggcgcgtctggcgaaagaagtggcgaagattgaaggtgaaatcagccgtatcgagaacaaactggcgaacgaaggctttgtcgcccgcgcaccggaagcggtcatcgcgaaagagcgtgagaagctggaaggctgggccccctacaagcctggtcat

SEQ ID NO: 9191 - DNA, 2681 bp, Homo sapiens
  SIMILAR (345)..(1277): 941254mologous to Escherichia coli K12 putative dehydratase,accession number AE000500,Smith-Waterman Score=1488.
atgctggtgctgccactcttccagccgtttatgcgcattctcgatcatgacgatagcagcatcgaccatcgccccgacggcaatcgcaatgccacccaacgacataatattggcattcagtccctggaagtgcatgacaataaaagcaatacacaaccccagcggcaacgaaataatcgccaccagcgccgagcgcacatgccagagaaacagcgcacagactaccgccgggatcctctagagtcaccgaaggcagcagctgcctgcctctttcccgctattgctgaccccaatactccccccgtgtttaccccccctgcctccttaccgaccaccgggatgttgattcgccaccattccgaaatgacgcatagatggtaatgcggagccttattcgctctatgaccgtcgcgagagcagttattggtgtggcgatttgcaataaggggcttccggccaccatgatggcactagccgcgcagcacaacatcgcaaccgtgctggtccccggcggcgcgacgctgcccgcaaaggatggagaagtcaacggcaaggtgcaaaccattggcgcacgcttcgccaatggcgaattatctctacaggacgcacgccgtgcgggctgtaaagcctgtgcctcttccgtgcggcgatcatgtcaatttttgggcactgccgggacatctcaggtggtggccgaaggattgggactggcaatcccacattcagccctggcaccttccggtgagcctgtgtggcgggagatcgccagagcttccgcgcgagctgcgctgaacctgagtcaaaaaggcatcaccacccgggaaattctcaccgataaagcgatagagaatgcgatgacggtccatgccgcgttcggtggttccacaaacccgctgttacacatcccggcaattgctcaccaggcaggttgccatatcccgaccgttgatgactggatccgcatcaacaagcgcgtgccccgactggtgagcgtactgcctaatggcccggtttatcatccaacggtcaatgcctttatggcaggtggtgtgccggaagtcatgttgcatctgcgcagcctcggattgttgcatgaagacgttatgacggttaccggcagcacgctgaaagaaaacctcgactggtgggagcactccgaacggcgtcagcggttcaagcaactcctgctcgatcaggaacaaatcaacgctgacgaagtgatcatgtctccgcagcaagcaaaagcgcgcggattaacctcaactatcaccttcccgtggcaatatgcttggattttgcaccctgatttggatcctgagactttgctgaagttgcttatcagcttaaggagattttgggctgagacaccggtcggcaagaaccggattacgcagatgactaacgcccgccaccgcaccggctttcagggtgttaccatccatcacacaggcgtccagttcatgggtttcatcacgcgtaaagacagcgccaattccggcgttaaacagtggacactcttccagcagacgcaccgcttccgtcaccacatccagcgcactttcgcccgcttccagcattttctgcccggtttcaacaatggcagacaacgcctcgatgtagcgagtgttttcatggaatttaccaccggattgatgtcgctcgacaccgcgcttaatgagatgctttctcgcgtcaccccactgaccgcccaggaaacgctgccactggtacagtgttttggtcgtattctggcgagcgatgtcgtttcgccgcttgatgttccggggtttgataactccgcaatggacggctacgcggtgcgtttagccgatattgcctccgggcaaccgctgcccgttgccggtaaatcctttgccggtcagccataccatggtgaatggcctgcgggtacctgcattcgtattatgaccggtgcgccggtgccggaaggctgcgaagcggtggtgatgcaggagcagactgaacaaatggacaatggcgtgcgttttactgctgaagtgcgtagcgggcaaaatattcgccgtcgcggtgaagatatctctgcaggtgcggttgttttcccggcgggaactcgcctgactaccgcagagctgccagtaattgcttcactggggattgccgaagttccggtgattcgtaaagtgcgtgtagcgcttttttctaccggtgatgaactccagttgcccggtcagccgctgggcgacggccaaatctacgataccaaccgtctcgccgtacacctgatgttagaacagttgggatgcgacgtaattaacttagggattatccgcgacgatccccatgccctgcgcgccgcatttattgaagccgacagccaggcggatgtgaactcaggcaacgtatcaaaggcctgtaaattcatgggcgtttcgcgtgatacgttttatcgttaccgcgaactggtcgctgaagccggtgtggatgcgcagattaatcgtagtcgccgcgctcctaaccttaagaaccgtaccgatgaggcaactgaacaggctgttgttgattacgccgtcgctttcccgacacatggtcagcaccgggccagcaacgagctgcgtaaacagggggtttttatctccgacagtggtgtccgttctgtctggttactccataaccttgagaatctcaaaagacgatactga

SEQ ID NO: 9192 - DNA, 3035 bp, Homo sapiens
  SIMILAR (1991)..(1929): 761254mologous to Escherichia coli O157:H7 ferredoxin reductase subunit of phenylpropionate dioxygenase,accession number AE005484,Smith-Waterman Score=102.
atgaccggtcgagagttaccacctaacccctacgtctatgataccttcccattccgcgctttccaagcgatcctccctctccggcgtacctcacggggcgcgcggcctccgcgtggcacccggctgtcccgtcgacgccctggcagtgtgcgaggcaccgctctgccccttcaccctcgaaccctgaggcgcgacgccaccttgccatcacgatgcgctcacggcacccctcggggccgcaagtgctgggctatcgctattgcaggagtcggtggatcaggccagctattgtacagcgataaccattatctggcggagatggcaaccatcctcggtaaccagaagaggccaaacgctatcgccagttggcacagcagctcgcggactcatcaacaccttattgaagataaaccactggcgaacggctgcgcgggcaaaccgattgtgagcgcggtaaagggccggaaggctggtcgccgctgtttaacggtgcggaacgcaggccaatgccgacgcggtggtgaagcaataatttgcaactgctggcggatgcggcgtaaacgcctttccgccctacatgtgcaatcctcctggccggataaaacgcggcaagcgttgcatccggcaactgcaccgcgccactggcggatgcggcgtgaacgccttatccgccctacatgtgtgttcccgtaggtcggataagacgcgacaagcgtagattcgggcatctgcaccgcgcccttggcggatgcgcgtggaagccttaacggcctaatgtgcatccgtaactggataaagcgaaaaggtgatccgggacacggggagacattgaaccacaaaaacccgcgccaatactttaccggagggaaaaaaacaccgagcccttcccgctatccagcggtggtccctggtcggggattgctgtccaatgagtgtctcgtattcacgtcctggtgtggcaaccgcgtatgccggcacctcctgccgtggattggcttacgtatgcagcggtatcctgtcggaaataagctggtcgggacgcctctggtcgagtatacgcgggacagtctgcacctgagacgttgcgcagcttcgctagcatggcaggcagtaatgccgcatactactgaccagcacagacacccccgcaggccagttacagagccagcacctaacagcctggtatatgaccgtgactacggttggagtgacaacggcgaccggtgcgcatcagcggcccgcgacagacgcgggaatacggctacagcgcccgggcaggctggagagtgtgcgcaccctcgcaccagacctggacatccgatcccgtatgccacggacccggcgggcaaccggctgccggacccggagcgcacccggacatgcgggctgacggtggagcaactggccagaaggtggagccggaatacacaccggcgcgaaaagctcatctttatcactggaccaccggggactgccgctggcgcttatcagcgaagacggcaatacgggtggagcgcggaatatgatgaatggggcaaccagcttactgaggagaaccgcatcatgtgtatcagccgcggtaaacctggcactggcgctggcggcagaaggggcgaaagtcggcttctggacgccgatatctacggcccatcaatcccaacaatgttgggcgcgaaaatcagcgtccaacttcgccggacggtacccatatggcaccgattagtctcatggcctggcaaccaattcaattgcgttatcgtggtcacgtacgccaacggttatcagccgtcggagagcgaatttaccgctatctaccgccagctggctgaccgcgttgcgctcagctctactggcaggttaaaaccttatcaatcacaacttatcggtcacacgttacccatgtggaaacgcgtgattaaaccaaatcgccttctgagtttcgggttgccacgacaaagccagtcatcgccacgcatatcgccaataaaccgttttgatggttacaccggaatgcagatgaacattgttttccgccaccagttagcgggtaacacctgctgtaactgcggggaatcttccagcaacatggatttcgagagtggaggtcgttcataaggaagatgtcgctcatcggaaaacagatgcagctcaccgtggaagtggcctccacaacaccggccccaacatttgtcactaacccgccccctggacagacgccgttcacccaagtaggccacttggacgttgacagaaaagtgcagtacaaggaaacctaccaagaggaccccattttgcagttccggaacattcccttgcaaagcacaacatcgcaacgtgctggtccccggcggcgcgacgctgcccgcaaaggatggagaagacacggcaaggtgcaaaccattggcgcacgcttcgccaatggcgaattatcttacaggacgcacgccgtgcgggctgtaaagcctgtgcctcttccggcggggctgtcaatttttgggcactgccgggacatctcaggtggtggccgaagattgggactggcaatcccacattcagccctggccccttccgagcgtgtgctggagattgtcctgcaagcctggacgaaccgccaaagggcgcttatcagtgcctaccgttaccgggaacagctgcttgagaacgctgccggtcaaatggtttgcccattgacattcatcacccgtgcctgctgctttaccccctgcctgaatggaaattatcgagcaaaaattatcgcgtctgtcgagcatgaacccggttggcgccgtgtgcagcgcctactgttaggtcatgccagcgaatgtcagatgatggcgcaggcccaaattgtatcgccgctcgacgtggctttgggattcattcgacaaatcttctacgtttggcacatacgacacgcttggatacaccatcgcgttgccgcctatagcgcccttgcgctccagatacgatggtctttgcgaggcctagtgtcgagtctatcgaagcggttgttagaacggccctatcgttgctaa

SEQ ID NO: 9193 - DNA, 1459 bp, Homo sapiens
  SIMILAR (1)..(378): 921254mologous to Escherichia coli transcriptional activator protein from homology search,accession number D28595,Smith-Waterman Score=600.
atggagtgcgatgcgtctgcgttgctacgttacgattcgcggcagtttattccgcttgccatcgacggtctggcaaaggatgtactcggtagacgctttgcgctggaagggcatccacggctggaagcgattgcccgcgccggggatgtggtgcgctttcccgcagacagcgaattgcccgatccctatgacggtttgattcctgggcaggagagtctgaaggttcacgcctgcgttggtctgccattgtttgccgggcaaaacctgatcggcgcactgacgctcgacgggatgcagcccgatcagttcgatgttttcagcgacgaagagctacggctgattgctgcggctggcggcgggagcgttaagcaatgcgttgctgattgaacaactggaaagccagaatatgctgccaggcgatgccacgccgtttgaagcggtgaaacagacgcagatgattggcttgtcccctggcatgacgcaactgaaaaaagagattgagattgtggcggcgtccgatctcaacgtcctgatcagcggtgagactggaaccggtaaggagctggtggcgaaagcgattcatgaagcctcgccacgggcggtgaatccgctggtctatctcaactgtgctgcactgccggaaagtgtgcggaaaagtgagttgttcgggcatgtgaaaggagcgtttactggcgctatcagtaatcgcagcgggaagtttgaaatggcggataacggcacgctgtttctggatgagatcggcgagttgtcgttggttttgcaggccaagctgctgagggtggggcagtatggcgatattcagcgcgttggcgatgaccgttgtttgcgggtcgatgtgcgcgtgctggcggcgactaaccgcgatttacgcgaagaggtgctggcagggcgattccgcgccgatttgtttcatcgcctgagcgtgtttccactttcggtgccgccgctgcgtgagcggggcgatgatgtcattctgctggcggggtatttctgcgagcagtgtcgtttgcggcaggggctctcccgcgtggtattaagtgccggagcgcgaaatttactgcaacactacagttttccgggaaacgtgcgcgaactggaacatgctattcatcgggcggtagttctggcgagagccacccgcagcggcgatgaagtgattcttgaggcgcaacattttgcttttcctgaggtgacgttgccgacgccagaagtggcggcggtgcccgttgttaaacaaagcctgcgtgaagcgacataagcgttccagcgtgaaactattcgtcaggcactggcgcaaaatcgtcgcaagtggactgcttgcgcgcggatgctggaaaccagcgtcgccaacgtgcatcggctggggaaacgtctggtattgaagaaataaataatcccggcctgatagaaatccagcacgcctatagccccagttatt

SEQ ID NO: 9194 - DNA, 799 bp, Homo sapiens
  SIMILAR (1)..(423): 1001254mologous to Escherichia coli tdh gene,accession number X06690,Smith-Waterman Score=780.
atgaccgacgttcctgtaccggaactcgggcataacgatctgctgattaaaatccgtaaaacagccatctgcgggactgacgttcacatctataactgggatgagtggtcgcaaaaaaccatcccggtgccgatggtcgtgggccatgaatatgtcggtgaagtggtaggtattggtcaggaagtgaaaggcttcaagatcggcgatcgcgtttctggcgaaggccatatcacctgtggtcattgccgcaactgtcgtggtggtcgtacccatttgtgccgcaacacgataggcgttggtgttaatcgcccgggctgctttgccgaatatctggtgatcccggcattcaacgccttcaaaatccccgacaatatttccgatgacttagccgcaatttttgatcccttcggtaacgccgtgcatgtttattcacccgctggatgcgaaacgcgcgatctgcgccgtggcgacaaagtgaaagtggtttctcgccgtggcgaagtgatctcgattgttgaaacgcgcggtcgtaaccgtccgccacagggcctggtgtacatgccgttcttcgacgccgcacagttggttaacaaactgacgctggatgcgaccgatccgctctcgaaagagacggacttcaagaagtgcgcggtcaaactggagaaggcttgcccttacgacaccttaaaactggcgacgctggcctctggtctgtcggcgggcacgccatattttgtcgcacgggatattccttgcgaaatgtgtgaggacattccgtgcgccaaagtgtgcccaagcg

SEQ ID NO: 9195 - DNA, 1500 bp, Homo sapiens
  SIMILAR (768)..(1223): 961254mologous to Escherichia coli yojC,accession number U00008,Smith-Waterman Score=801.
ttaaggagcatgttgtttattctttatcaacttgaggaagttgctctctattcctagtttattgagagtttttatcacaaattggtgttggattttgtcaaatgctttttctgcatctattgatatcatcatgtgaggagtacgttgtttaatttctacctcttgtgaattgggttcagctttgtctgactggctgataacaaacagcatcttatgccggtatgcttcgccaatcaccatttctcggaaagggcatctttccttataattgtctcttctaaaaattttgcccttttgttgttctgttcttgactggtaagaaatgttattacgtttgccgaggtagatgtattgatcaccatgctggcgcgcagtgccgttggtgcacgtttgacgggatacaacacctggctgacaggaccgcgcgaagctgggcacgttgatggtcctgaagagtttcatctggttattgtcgataacgggcgttctgaggtgctggcctctgaatttcgggatgtgctgcgctgtattcgctgcggggcttgtatgaatacttgtccggcatatcgccatattgctcagtatagaggcatccccccattccggcgaaaatcggtctgcacgcggtggcacaagaccgtgcgcaacaacatgcaggccgggccgaacatcaatgaagagcgtatgccgggctggcgcgatccgcgcaacttcatcatcgtctccgatccgtatccgacagtcagtgcgctggccgccgacttgatccggaagtgagcaaattcccgggatccgaactggcggaagatcagctgaacgatgaatcccgcgagctgggcttctatctgcaaaaagggctgttcgaagagtacgcatggtttggtcgcggtcacggtcacgatctggcaccgttcgatgactaccacaaagcgcgcggtctgcgctggccggtggtgaacggtaaagaaacgcagtggcgttacagcgaaggtaacgacccgtacgtgaaagcgggcgaaggctataagttctacggtaaaccggatggcaaagcggtgatcttcgcactgccattcgaaccggcggcggaagcaccggatgaagagtacgacctgtggctctctaccggacgcgttctggagcactggcacaccggcagtatgactctccgtgtaccataactgcaccgggccttcccggatgcgggcctgtttattttacccgctggatgcgaaagcgcgcgatctgcgccgtggcgacaaagtgaaagtggtttctcgccgtggcgaagtgatctcgattgttgaaacgcgcggtcgtaaccgtccgccacagggcctggtgtacatgccgttcttcgacgccgcacagttggttaacaaactgacgctggatgcgaccgatccgctctcgaaagagacggactggcctcacttttcttccacatacaatggacctcttctgcaaggtgccaataagggcatcctggtccagcagcat

SEQ ID NO: 9196 - DNA, 1701 bp, Homo sapiens
  SIMILAR (988)..(1698): 991254mologous to Escherichia coli K12 putative enzyme,accession number AE000182,Smith-Waterman Score=1248.
atggaacgtgagcaggacagcatcattatggatgccgcgacgcgtcgtaatctggaaatcacccagaacctggcgggtggtgcggaaaatacgctggcttctgtgctcgactgcaccgtcacgccgatgggcagccgtatgctgaaacgctggctgcatatgccagtgcgcgatacccgcgtgttgcttgagcgccagcaaactattggcgcattgcaggatttcaccgccgggctacagccggtactgcgtcaggtcggcgacctggaacgtattctggcacgtctggctttacgaactgctcgcccacgcgatctggcccgtatgcgccacgctttccagcaactgccggagctgcgtgcgcagttagaaactgtcgatagtgcaccggtacaggcgctacgtgagaagatgggcgagtttgccgagctgcgcgatctgctggagcgagcaatcatcgacacaccgccggtgctgagctggatgagtggcgcgcgctggctgacggcgcgaccgattatctgtaactacgaagtcgatcgcaccattcgtcataccaaaatgaacgtgggcgatgtgcaacgtctgtcagtcgcggtcgtggtgaattacaaaaccttgccagatggcaaaccgttgcctctcagcaacgaacagatgaagcaaattgaagatctgacccgcgaggcgatgggcttttctgaaaaacgcggtgactcgctcaatgtcgttaactcgccgttcaatagcagtgacgaaagcggcggagaactgccattctggcaacagcaagcgttgttgttcgtctttgctcaggcggacttccaccgcatcttccacttcctcgcgggcctgcgcctgttgctgtacagctttcatcgcctcagcgaccgattacgtcgcctcaatcaacaagagcggctaccgttatcacccgggcgagccaagaaccttcttgctcacagccaatatgcatttctgattcagatgtggggcgcaggccccactttttggagaaattgtatgatgtaccacattcccggcgtgttatcgccacaggacgtcgctcgttttcgcgaacaactggaacaacccgaatgggtggatggacgcatcaccaccggcgcacaaggtgcgcaagttaaaaacaatcaacaggtcgacacccgcagcacgttatacgccgccctgcaaaatgaggtgctgaacgcggttaaccaacatgctttattctttgccgcggccttgccgcgtaccctttccacgccgctgtttaatcgctatcaaaacaatgaaacctatggtttccatgtggatggcgcagtacgcagccatccacaaaacggctggatgcgtactgacctttctgccacgctgtttttaagcgatccacaaagctacgacggcggcgaactggtcgttaatgacaccttcggacaacatcgggtaaaactcccggcaggcgatctcgtgttgtatccctccagcagcctgcattgcgtgacacccgtaacccgcggcgtacgagtggcatcatttatgtggatccagtcgatgatccgcgatgataaaaagcgcgccatgctgtttgaactggacaacaatattcagtcgctgaaaagccgctacggcgaaagtgaagagatcctgtcgctgcttaatctttatcataatctgctgcgggaatggtcggagatctga

SEQ ID NO: 9197 - DNA, 2271 bp, Homo sapiens
  SIMILAR (2271)..(1615): 991254mologous to Escherichia coli DNA mismatch repair protein,accession number M64730,Smith-Waterman Score=1117.
ttaatcgtctttcggtgcgcggttggcgcggcgacgatcgttttccgtcaggtgacgtttacgaatacggatagaggtcggagtcacttctaccagttcgtcatcatcgatgaactccagagcttgttccagagtcatgcggataggcggaaccagaacaacggcttcgtcagtaccggaagcacgcatgttggtcagtttcttcccggtcaagccgtttacagtcacgtcgttaaaccgggttgtgcccggcgaggccgacgtgagtccctgaatttctcgtccaatcgggaaaccgatcagatcgccacttattttgcgggcacgtcccagcggatcggagattcgcatgctggtgacccggaagcggtatgcgttaatgagctgcaggactttaacctgcttcacattggtgtcagggtcggagatcgttgaagagtaacgtgaagcgtctttcgccaggcggcggaaatattcacgcgtttgagagtggaattgatccggtttgactcccgtaccaggtaactgctggaacgtcgaacgccagttagcgtcaaccgagtcaggatcggttaagaagtcttcatagagctgttctatccagctttcgccgtggatactaccacgcacagtgatgtgcgtgccggggttcacttgcgagctcttgtctacgtagtggctcgcgaaggaacctttaaaaactgtctcctggatcacaatccgctctttcaccgccgagacatccacttttggcccgacgatgaccgcatcaatgacctttttaccgacatactgctccataattgccagcttgctttccagcttcaaattagccgcagctatactcaactcactgccccagattggccgatatataaccatcggctctggcgtgcggcgtaatgcctgacgatttcgttcagcagcagattggcataagctgtagtaggtccagggttcacgctcgcggacttccagacgctccagataatcggtcgcgccgtcagccagcgcgcgccactcatccagctcttcgttatagcccgatgcgataacaccaccgtcgcgtaccagcaccggcggtgtgtcgatgattgctcgctccagcagatcgcgcagctcggcaaactcgcccatcttctcacgtagcgcctgtaccggtgcactatcgacagtttctaactgcgcacgcagctccggcagttgctggaaagcgtggcgcatacgggccagatcgcgtgggcgagcagttcgtaaagccagacgtgccagaatacgttccaggtcgccgacctgacgcagtaccggctgtagcccggcggtgaaatcctgcaatgcgccaatagtttgctggcgctcaagcaacacgcgggtatcgcgcactggcatatgcagccagcgtttcagcatacggctgcccatcggcgtgacggtgcagtcgagcacagaagccagcgtattttccgcaccacccgccaggttctgggtgatttccagattacgacgcgtcgcggcatccataatgatgctgtcctgctcacgttccatggtgatggaacgaatatgcggcagagtcgtacgttgggtatctttcgcatacggaccagatcgcggggtcccaaatcgcagattcaactgctggcgcgcggtgtcgatttcaaactcccacagcgggcgacggcgcaggccgcgacggccttcaattaacgacatttcagcaaaatcttctgcatacagcagttccgcaggattagtgcgttgcagttctgccgccatcgtttcgcggtcagccggttcgctcaggcgaaaacgcccggaactgatatccagcgtcgcgtagccgaaacctttgctgtcctgccagatagccgccagcaggttgtcctgacgctcctgcaacagggcttcatcgctgatggtgcctggcgtaacgatacgcacaactttgcgctcaaccggacctttgctggtcgccggatcgccaatttgttcgcagatggcaacggactctccctgattcaccagtttggcgagatagttttccaccgcatggtagggaatccccgccatcgggatcggctctcccgccgaagcaccgcgtttggtcagtgaaatatccagcagttgcgacgcgcgttttgcgtcgtcataaaacagttcataaaaatcacccatccggtaaaacagcaggatctcgggatgctgggctttcagcctgagatactgctgcatcatgggcgtatgggcgtcgaaattttctattgcactcat

SEQ ID NO: 9198 - DNA, 1545 bp, Homo sapiens
  SIMILAR (235)..(948): 981254mologous to Escherichia coli DNA mismatch repair protein,accession number M64730,Smith-Waterman Score=1186.
atggctaacagaatgattctgaacgaaacggcatggtttggtcggggtgctgttggggctttaaccgatgaggtgaaacgccgtggttatcagaaggcgctgatcgtcaccgataaaacgctggtgcaatgcggcgtggtggcgaaagtgaccgataagatggatgctgcagggctggcatttgcgatttacgacggcgtagttgccaaccaacattactgtcgtcaagacagctcggaagattttgctgaaatgtcgttaattgaaggccgtcgcggcctgcgccgtcgcccgctgtgggagtttgaaatcgacaccgcgcgccagcagttgaatctgcaatttgggacccgcgatctggtcggttttggcgtcgagaacgcgccgcgcggactttgtgctgccggttgtctgttgcagtatgcgaaagatacccaacgtacgactctgccgcatattcgttccatcaccatggaacgtgagcaggacagcatcattatggatgccgcgacgcgtcgtaatctggaaatcacccagaacctggcgggtggtgcggaaaatacgctggcttctgtgctcgactgcaccgtcacgccgatgggcagccgtatgctgaaacgctggctgcatatgccagtgcgcgatacccgcgtgttgcttgagcgccagcaaactattggcgcattgcaggatttcaccgccgggctacagccggtactgcgtcaggtcggcgacctggaacgtattctggcacgtctggctttacgaactgctcgcccacgcgatctggcccgtatgcgccacgctttccagcaactgccggagctgcgtgcgcagttagaaactgtcgatagtgcaccggtacaggcgctacgtgagaagatgggcgagtttgccgagctgcgcgatctgctggagcgagcaatcatcgagacaccggcggtgctgaaatgttcccagaaaacggggctgggtgagctgaagcgcaatgcccagcctattatgtttgccccgtcgttggttaatgaaggccagatcccgttcatcaagatgaaaatagcgcgccagttgcacgtcattaggttctgcagcataacaaccgtaattctgtttttggtcagagacactgcttgtccgatatttgatttaggatacgatttttatgcgacttttggttacgcacgggtatcaaccagccagcaatctctcgatattcaggttcgggcactcaaagacgcaggcgtgaaagcaaatcgcatctttactgacaaggcatcgggcagttcaagcgatcggaaagggctggacttgctgaggatgaaggtggaggaaggtgacgtcatcttggtgaagaaacttgaccgacttgggcgcgatactgctgacatgatccagttgataaaagagtttgacgcccaatgtgtatccattcggtttattgatgacggaatcagtaccgatggggagatgggtacaatggttgtcactattctatctgcagtgtgccaggacgaacgacagagaaatactagagcgtaccaatga

SEQ ID NO: 9199 - DNA, 889 bp, Homo sapiens
  SIMILAR (40)..(549): 591254mologous to Homo sapiens alanyl-tRNA synthetase,accession number D32050,Smith-Waterman Score=428.
caagttgtggcccagattgagatggtcgtctattggttccaggccctggccactgcagtcatcccccagtggcagaaggatgaattgcgggagactctcaaatccctaaagaaggtcatggatgacgttggaccgagccagcaaagccgatgtccagaaacgagtgttagagaagacgaagcagttcatcgacagcaaccccaaccagcctcttgtcatcctggagatggagagcggcgcctcagccaaggccctgaatgaagccttgaagctcttcaagatgcactcccctcagacttctgccattgctcttcacggtggacaatgaggctggcaagatcacgtgcctgtgtcaagttccccagaaatgcagccaatcggggctttaaagccagcgagtgggtgcagcaggtgtcaggcttgatggacggtaaaggtggtggcaaggatgtgtctgcacaggccacaggcaagaacgttggctgcctgcaggaggcgctgcagctggccacttccttcgcccagctgcgcctcggggatgtaaagaactgagtggggaaggaggaggctcccactggttccatccgtccagccaagagctcttcatctgctacaagaacatttgaatcttgggacctttaaagagcccctcctaacccagcagtaactgggaacacacttgggagcagtcctatgtctcagtgccccttaaatttctgccctgagccctccacgtcagtgccatcggtctagaaccactaaccccgcattgctgttgatcgtcacgctcgcatctatagataacggctctccagacctgagctttccgcgtcagcaagtaggaatcgtttttgctgcagagaataaaaggaccacgtgcaatacttaa

SEQ ID NO: 9200 - DNA, 3155 bp, Homo sapiens
  SIMILAR (213)..(64): 601254mologous to Escherichia coli DNA mismatch repair protein,accession number M64730,Smith-Waterman Score=125.
tcacctttttgtactttcatactgctttccgttactcacaatgatatacgtagcaacgacaaataccagcacgtcgagttccgccagcgcgctcccgactgggtgcaacgcttccagatgcggcaacagcaggtcgaacagctcttcataaagcgtgtttttccagtgccagtgctttgccttttgaggtgagaactttatcttcgtactcttttagctctggaatgatgtagcgctcggcgtttttcagcgtctggcgacgcatgtagttgatgggtgccagatggctttgcccacggctgatttgaatgtagtagccgtgcaccgcattaaagccaactttcagcgtgtccaggccggtacgttcacgctcgcggacttccagacgctccagataatcggtcgcgccgtcagccagcgcgcgccactcatccagctcttcgttatagcccgatgcgataacaccaccgtcgcgtaccagcaccggcggtgtgtcgatgattgctcgctccagcagatcgcgcagctcggcaaactcgcccatcttctcacgtagcgcctgtaccggtgcactatcgacagtttctaactgcgcacgcagctccggcagttgctggaaagcgtggcgcatacgggccagatcgcgtgggcgagcagttcgtaaagccagacgtgccagaatacgttccaggtcgccgacctgacgcagtaccggctgtagcccggcggtgaaatcctgcaatgcgccaatagtttgctggcgctcaagcaacacgcgggtatcgcgcactggcatatgcagccagcgtttcagcatacggctgcccatcggcgtgacggtgcagtcgagcacagaagccagcgtattttccgcaccacccgccaggttctgggtgatttccagattacgacgcgtcgcggcatccataatgatgctgtcctgctcacgttccatggtgatggaacgaatatgcggcagagcagccatcgtatagcgccgattttggtgcctgacatagctaccactggagtccaaatggtaattgtactttggggaatcatctgtgacctccagaccccgtgcccggagctcttcgatagcgtaaatgtccagcataatgaggtcttccccaccagctcccttgccctgtgatttcagatccccgaggcgcagctgggcgaaggaagtggccagctgcagcgcctcctgcaggcagccaacgttcttgcctgtggcctgtgcagacacatccttgccaccacctttaccgtccatcaagcctgacacctgctgcacccactcgctggcttttaagccccgattggctgcatttcgtttctggacatcggctttgctggctcggtccaagtcatccatgaccttctttagggatttgagagtctcccgcaattcatccttctgccactgggggatgactgcagtggccagggcctggaaccaatagacgaccatctcaatctgggccacaacttgctgggatgtcagggtccagcccaccccacccgaacccaagtcctccctgactagtgtctgaagtgcctcggatgtcttcagggccagattgtaactacacagaacccagggaaggggtaagctgaactgcacattgacaaacacaaacgatgagtcacaggactctacagtagttacaatggcatttttatatgtcccaagtgttgactggagagtaaagtgttaactgagcttgctagaacaccctttcactgaaagagctttctaccccacgcccattgttccgaagaaggagaggcttatgtggggcgggatgggaacccacacaccgagaatggatcttttatctttctaccaaatctgcacccaccatctgacattctggagtgtaaggcactagaacctggcttagagaatagtggggctctaagctccagttcttggtgtgcaaaggaaattctgacatacatcttttgaaagagatgctaaaaaaccctccctatctcctgtaattttctgtctttgaacagacaggaaaaataagaaggccagaagatggtctgcaaaggataaaaacaggtgcatctaagaatgagaaaaatggctcatgaaagaaatgtgtaactctcccaagagatgcagacactctgctccagagaagtcaagaaccataaacaacgtcttcatgtttcatggacaaagggaaggcaaaggcatacaaaaatactcagttgtcttgaaaagtgtactggtagtgatcagggctacaaaggcgagccctgtactgacaatggagggagccttacaactcagcaccttaaattgttggcctgaagtggtggcggggagggaggcgctgacggagagacccatggctcaccacttattgcgtgtacacaaggcctggggcaagcctcacaagtctaccatttcttccactcaactgtgcttctcctgaatccatgtgcctgaaatgactatatgcaaggtgaacattctttatactgtgttaatactgcttatatcaatgttccgtgaggggtgtgtgggggatggggtgcagcaggaaaattagaatggcaagaggttcttatttattattaagcactgttgaccaaacctctatcttagattttttttttttttttttttgagacaagagtctcactctgttacccaggctggagtgcagtggtgcaatctcagctcactgcaacctctgcctcctgggttcaagcaattctcccacctcactgggcctcccaaagtgctgggattacaggagtaagcgaccacgcccggccaaccaaacctctatcttagatgttaaagaagacccttattgactacactggccaagaagcaacagagatataaagctgaatcttgtagctaacccctgaaagcaagccaacgcaaattcctccgccaggccagtcttctagggccaatatggagactgtgggccacagaagattcccttctatttcaggttctcaaaaagtggtgtagactcaggcaaatgccaggaaatgtgtccatatgccagaggagacacagagccagaaatgaaggctatgggtcctgtcttcagtgaaacactgaacgctctcggaaagctcccatcattcttgcatcgctactgccacaaagacggtgg

SEQ ID NO: 9201 - DNA, 3372 bp, Homo sapiens
  SIMILAR (811)..(1989): 981254mologous to Escherichia coli 46 KD MEMBRANE PROTEIN,accession number D90860,Smith-Waterman Score=1911.
atgatcgctattactggtgccactggccaacttggtcatctgtttattgaatccttgatgaaaacggttcctgccagccaaatagtggctatcgttcgtaatccggcaaaagcccaagccctggcagcacaaggcattaccgtgcgtcaggctgactacggcgatgaagccgcactgacatctgcacttcagggagtggaaaaactactgctgatctcttccagcgaagtgggtcaacgtgccccgcagcatcgtaatgttattaatgccgcaaaggcggctggcgtgaaatttatcgcttataccagcctgctacatgcagatacctccccgctcggcctcgccgatgagcacatcgagacggagaaaatgctggctgattctggcatcgtttacaccctgctgcgcaacggctggtacagcgaaaactacctcgccagcgccccggcagcactggaacacggcgtatttatcggtgcggcgggcgatggcaaaatcgcctcagcaacgcgggcagattatgcggcagctgcggcacgcgtgattagcgaacgcggtcacgaaggcaaggtttacgaactggcgggcgatagtgcttggacgttgacacagttagcggcagagctgaccaaacagagcggcaaacaggttacctatcaaaatctgagcgaacgcgatttcgccgcggcactgaaaagcgtcggactgcccgacggactggcggatatgctggcggattctgacgttggcgcatcgaaaggcggtctgtttgatgacagcaaaacacttagcacattgattggcccaccaacgacaacagtgcgtatggatgcggtcgctttgtttgttattgtcgcgtttgcattaagcggaacgctgacagtcccagaagtattttccggcttttctgatcctaacgttgtcctgattgccgccttgtttattattggcgatggtttggtccgtaccggtgttgccaccgtaatgggaacatggctggtcaaagttgcgggcaatagtgaaatcaaaatgttggttttgttgatgctgaccgtcgcggggcttggcgcgtttatgagttcaaccggcgttgtcgctatctttattcccgtggtgttaagcgttgccatgcgtatgcaaacgtcgccgtcacgtctgatgatgccgttaagttttgccgggctgattagcggcatgatgacgctggtggcgacgccgccgaacctggtagtcaacagtgaattgctgcgtgaaggctatcacggcttcagtttctttagcgtaacacctattggcctggtcgtgctggtgctgggtattttgtatatgttagtgatgcgtttcatgctgaaaggggatacccagaccccgcagcgcgaaggctggacgcgtcgaacctttcgcgatcttatccgtgaatatcgactgaccgggcgtgcgcgacgtctggctattcgccccggatcgccaatgattggtcaacggctggatgatctcaaattacgtgagcgttatggcgctaacgtcatcggtgttgaacgctggcggcgttttcgtcgcgttatcgtgaacgttaatggggtttctgaatttcgcgcgcgtgacgttttgcttattgatatgtctgcggctgatgtcgatctccggcaattttgtagtgagcaattgctggagccgatggtattgcgcggcgagtatttttctgaccaggcccttgatgtgggcatggcagagatttcattaattcctgagtcagaactgattggtaaatcggtgcgcgaaattggttttcgtacccgctacggactgaatgtggtggggctaaagcgcaatggcgtggcgctggaaggttcgctggcggatgagcctctgctgctgggcgatatcatcctggttgtgggtaactggaaactgatcggtatgctggccaaacagggccgcgacttcgtagcgctgaacttaccggaagagctggccagcgagccgtcaggccaggaatttctggtatttacccttggtgatgaagagtacggtattgatatcctgaaagtgcaggagatccgtggctacgatcaggtaacacggattgcgaacacgccagcgtttatcaaaggcgtcacgaatctgcgcggcgttattgtgccgattgttgacttacgaattaagttcagccaggtggatgtggactataacgacaacacggtagttatcgtcctgaatctcggacagcgggtggtcggcatcgtggttgacggcgtctcagacgtgctttcattgacggcggagcaaattcgtccggcaccggaatttgccgtgacgctttcaacagaatatctcactggactgggcgcactgggcgaccggatgttgattctggtgaacatcgaaaaactgctgaacagcgaagagatggcgctgttagatagcgcggcgtcagaagtggcccagaagagctttgtggtttccaatcaattacgggaacagcagggcgagctgacgtcaacctgggatttaatgctgcaaacgcgcattaacctgagtcgttcagcggtacggatgatgatggattcctccaatcaacaaagtaacgccaaagttgaattgctcgatagcgccaggaaaacattggcgcaagcagcgacgcattataaaaaattcaaaagcatggcaccgttacctgaaatggtcgctaccagtcgtaatattgatgacaaatataaaaactattacacagcgttaactgaactgattgacctggcagatggaaggtgccgacaactatgtaactccctgatggataacttcattatggatgtgcagggtagtgggtatatcgactttggtgatggcagtccgcttaactttttcagctatgcagggaaaaacggtcatgcctatcgcagcattggtaaggtgctgatcgaccgtggcgaagtgaaaaaagaagatatgtcgatgcaggcgattcgtcactggggcgaaacacacagtgaagccgaggttcgcgagctgctggaacagaacccgtctttcgtcttctttaaaccgcaatcttttgctccggtgaaaggggcaagtgcggtgccgctggttggtcgcgcgtcagttgcctctgatcgttccattattccgccaggtactaccttgctggcagaagtgccgttgctggataataacggcaaatttaatggtcagtacgaactgcgtctgatggtggcgctggatgtcggtggtgcaatcaaaggccaacacttcgatatctatcaagggatcgggccggaagccggacaccgcgcaggttggtacaaccactatggacgtgtctgggtgctgaaaaccgccccgggcgcaggtaacgtctttagcggctga

SEQ ID NO: 9202 - DNA, 2367 bp, Homo sapiens
  SIMILAR (2334)..(1603): 971254mologous to Escherichia coli DNA polymerase III alpha chain,accession number U70214,Smith-Waterman Score=1231.
ttaccggttgattaataaccaatatagggaagcgatgccccaattggacagcgacataccgcgactaattccgcaaaacttaccacataggcaaatccgggagggtcttagaaacacaccatcgcaagattgctccccacaacgtgcttcggcccgacatgtcgggccttccccttgccattcaatggtgaaggtttcattgcgtaacgccagccagaaatggtgctcggtaaaggcgttcagttcatccgcgccaaagtttgctaccagcatggggccgctaaaggtgatgacattgccatgcgccagaagaccgcactgaatggcggtaaaatcgctatgtccgcaaatgagcaacgggtcatgttgttggcgagccaccagtgcctgccagtcaatatctgccagtaaacgactggcaccgtaaccgccgcgtacagccagcacgatggtgttgggggtagtcagtctggcaagggaattgagatcttccagacgctctgtttccgtacccgcaaaacgctcacaacgacgggcaataacctcgacgttattgacttgatgccccgcgtcggtaaggcgctggataccacgcagcgcggcgtgctgtttaatgcagtaacccgatggggcaattaagtgaaacagagacatggcaattccttgctgtttgccgctctgtttggtcagctctgccgctaactgtgtcaacgtccaggcactatcgcccgccagttcgtaaaccttgccttcgtgaccggcttcgctaatcacgcgtgccgcagctgccgcataatctgcccgcgttgctgaggcgattttgccatcgcccgccgcaccgataaatacgccgtgttccagtgctgccggggcgctggcgaggtagttttcgctgtaccagccgttgcgcagcagggtgtaaacgatgccagaatcagccagcattttctccgtctcgatgtgctcatcggcgaggccgagcggggaggtatctgcatgtagcaggctggtataagcgataaatttcacgccagccgcctttgcggcattaataacattacgatgctgcggggcacgttgacccacttcgctggaagagatcagcagtagtttttccactccctgaagtgcagatgtcagtgcggcttcatcgccgtagtcagcctgacgcacggtaatgccttgtgctgccagggcttgggcttttgccggattacgaacgatagccactatttggctggcaggaaccgttttcatcaaggattcactaacatagtgaccaagttggccagtggcaccagtaatagcgatcatgggaagtctccatcgtagagttttacgtagtacgtccaacagggcacgtttgacatgcgtccggtaacctgtcgcaccaccgaaagcggcacccccttgcggaccaggccgcccgcaagggggaaaccgtaccaccccgcgggcgcagatctgtggcgcacccaggcccacccctaacacctgcggcaacaccggggccaacaccctgcctctctccctacacgcacgggcaccccacagcccggccgccgcgcaatctacaggatccccgttcgaacagcaggtcaattccagcggatcgaggtcggtgattttcagcgcgtaggccaccagtgaacccgcaccggagccacggcctggccctaccggtacgccgttatctttcgaccactggataaattccataacgatgaggaagtagcccgggaagcccatctggttgataacctgaagttcagtctccagacgttcgtcatattccgggcggcgcttaagacgttcttcctcatcagggaataaaaaggccagacgctcttccaggccctcttttgcacgcttgaccagataatcttcggtgctcatgtccccggtcgggaactgcggcaggaagtattcaccaagacgcacggttacgttacagcgtttggcgatctcaacggtgttggcaagggcttcggggatgtcggcaaacagctcacacatctcctcttcgctacgcatatattgctgcggcgaatagttacgcgggcgtttaggatcgtcgagggtaaagccgtcgtggatcgcgacgcggatttcgtgtgcgtcaaagtcgctgctgtcgataaagcgcacgtcgttggtcgccacgacgggcaaaccgcgcgcttccgccagttccaccgccgcgtgcagatagctttcttcatccggcctgccggtgcggatcagctcgagaaaatagcgatccgggaagtgttcttcataaaacgcgacacactcatctaccagcggcctggtaacagacaaaagaaggctccgaagtggccaggggtcgcggcagaaggttaacat

SEQ ID NO: 9203 - DNA, 2480 bp, Homo sapiens
  SIMILAR (2436)..(1726): 851254mologous to Escherichia coli Initiation factor IF2- alpha,accession number AJ002540,Smith-Waterman Score=944.
atgaatgcgttaagcaaagcgcgccagtatgtcgaagagtttgacggcaacatcgccagcttcatcttttctggtaagccaggaaccggcaaaaaccatctggcggcggcaatctgcaacgagctgctgctacgcgaacgaaatcttggagaatcagaaatccatacgaccagtgatcatatggtgacggcgacgctgccaggagagacgcaaacgtggccagaggattttcgggatgtcgaacagcgccagcaggttgtcatctttcagcaccttgtcggttgcgtgaaagtggacggtaaatacattcaggtatgtaccttcaccgttggcggcaactacggtgggacgtgtttgcgcggtgatgaatcactggtcatcaaaaaagagagtgatattgaaccgttaattgtggttaccgttgtccagcagttccatatcggcaatggttacgtggtgatcaccattaccccgagcgaaggcgaacgctatcagggcgtagttggtctggaaggccggataaggcgtacacgccgcatccggcataaacaaagcgcacgttgttacaatttacgttttaaacctacgtgcgcaataacccagactacgccaacagaagtcagtccagtcctaaagaagcaattagttctggtgccaaatccgcattacccaggcaataaaccgaacttcaaacgggtatcggtaaaaattattggtgaaagtgcctcccgtcgcctgcagctctcccgtggcgacattgacattgccgatgcgctgtccgatcgcttcgtcagtgaagcgattaccgccaaagttgaagcggcgattaagaactcaattcacatttgcgccgaacaccgggtgcaaggtatgatcgccagcgggctgttgatcttgttgttcggtggtcgggatggcttagtccgatgttccacggtatggcgttaccatcgtattacgccattcgccatacgaggcatatcccgtcactacgccgttttcctcgctcaccagcactggataacctgctatagtccgcgcttcgaaccaggcaatgcggttatcagcagccaccgtttggtcattccagatagccgccaatatcaacaggcggtgaataagatggctcatcgctcatacgtccacgcatatacgggtccagggacaaataaactgtgcgcagtaacacctgtccttcacccggtgtggcgacatcatcttcttcaagacggaaattctccggaacaggatggagtccacttctcggtggacgaaaaatctcgccaggtgaacctgaccgaacgtggtctggtgctgattgaagaactgctggtgaaagagggcatcatggatgaaggggagtctctgtactctccggccaacatcatgctgatgcaccacttgtgtgagcaaccagtccagctcgtgatctttcgccatcagcggatcgccgccggagaaaatcatctcgtccagttccggatgcgcagcaacatactcaagtgcagtttgccagttacgcttgttgccctgattttcggcataggggaagtgacgacggaagcaatagcggcaatttaccgcgcagccgcctttgaccagcaaaagcgcccggttgtggtatttatgcaacaaaccagacactacgctgtgctgttcttccagtgggtcggtggagaatccgggcgcgatgacaaactcatcttgcgaggtcaacgtgaacagcccttccaggatggcgttggacgccgcagccagtgtggcgtcggtttcggtgataccacctacgccagaaccgatgatcttcactttaacttcgtcagtagacagtttcagcaaggagtcggagatcgcttcgacagaaccctgtacgtctgccttcaggacgatattcacttcgtgaacttcgccttcggtcatgttggcgaacatgttctcgagtttagatttctgctgacgcgccagtttaacttcgcggaatttaccctgacgatagagtgcaacttcacgcgctttcttctcgtcacgtacaacggtaacttcatcacccgcagccggtacgccggacaggccgaggatttccaccggaatggacggacccgcttccagcacttcctgacccagttcgttacgcatcgcacgaacacgaccgtattcgaagccacacagaacgatatcgcccttgtgcagagtaccttcacgtaccagaacggtaacaaccgggaccacggacctttatcgagggaagggaattcgataaccgcaccgctcgccatacctttacgtaccgctttcagctccagaacttccgcctgcagcaggatagcgtccaagcagttcatcgataccggtacccgctttcgcagatacgtgtacgaactggctttcaccgccccactcttccggcaggatgccgtactgggagagttaattcttattttgtaatagaggatacgtggaagcaagttaaatgtcagtag

SEQ ID NO: 9204 - DNA, 3039 bp, Homo sapiens
  SIMILAR (1041)..(1958): 771254mologous to Escherichia coli Initiation factor IF2- alpha,accession number AJ002542,Smith-Waterman Score=1124.
atgatcgctattactggtgccactggccaacttggtcactatgttattgaatccttgatgaaaacggttcctgccagccaaatagtggctatcgttcgtaatccggcaaaagcccaagccctggcagcacaaggcattaccgtgcgtcaggctgactacggcgatgaagccgcactgacatctgcacttcagggagtggaaaaactactgctgatctcttccagcgaagtgggtcaacgtgccccgcagcatcgtaatgttattaatgccgcaaaggcggctggcgtgaaatttatcgcttataccagcctgctacatgcagatacctccccgctcggcctcgccgatgagcacatcgagacggagaaaatgctggctgattctggcatcgtttacaccctgctgcgcaacggctggtacagcgaaaactacctcgccagcgcccggcacgggggtctctcaatggactgccgatgcagtcactcaaaaagtattcttcgcggatcattgtcttctgaatttttttgtagggaaaaaatggttttcggttccgactctgccattaatatggcaagtcaacacattaatatccatacaaccggtgtgatgtcggaaaatgtcaccactgcaggggggaaaccggggaatgtactgactcgttaacggcaactataccggaaacaatggcctgatgacgttcaacgcgacgctgggcggcgataattcgcccaccgataagatgaacgtgaaaggcgatacccaagggcacgcctcgcgttcgggttgataacattggcggcgtcggtgcacaaacggtcaacggtattgaactcattgaggttggcggtaattctgcaggtaacttcgcgctgacccaccggaactgtcgaagctggggcttacgtctacacgctggcttaagggaaggggaatgacgagaaaaaactggtatctgaccagtaaatgggaacggcgtaacgccagcggatacacccgatcccatcaataatccccctgttgtggatccggaaggcccatcagtttcccgcccggaggccgggggatacaattccttattaatggttacccatggaaaagttataaacggcgggagggggatcctcatagagtccgatggaacccggggacgcgcgttagtcaagcggctcgtgtgccaggcacggactcgtattctggttgtgctcttgtcgccggtgtatgccgcagaccatcgaagcaatccagcacccgaatgcggcgcagtgaacaagatcgatagaccagaagctgatccggatcgcgttaagtacgtactctcccagtacggcatcctgccggaagagtgggtcggtgaaagccagttcgtacacggatctgcgaaagcgggtaccggtatcgatgaactgctggacgctatcctgctgcaggcggaagttctggagctgaaagcggtacgtaaaggtatggcgagcggtgcggttatcgaatccttcctcgataaaggtcgtggtccggttgctaccgttctggtacgtgaaggtactctgcacaagggcgatatcgttctgtgtggcttcgaatacggtcgtgttcgtgcgatgcgtaacgaactgggtcaggaagtgctggaagcgggtccgtccattccggtggaaatcctcggcctgtccggcgtaccggctgcgggtgatgaagttaccgttgtacgtgacgagaagaaagcgcgtgaagttgcactctatcgtcagggtaaattccgcgaagttaaactggcgcgtcagcagaaatctaaactcgagaacatgttcgccaacatgaccgaaggcgaagttcacgaagtgaatatcgtcctgaaggcagacgtacagggttctgtcgaagcgatctccgactccttgctgaaactgtctactgacgaagttaaagtgaagatcatcggttctggcgtaggtgtgattgaagcggaaagcctggatctgcgttactactccgtcatctataacctgattgacgaagtgaaagcggcgatgagcggtatgctgtctccggaactgaaacagcagattatcggtctggcggaagttcgtgacgtgttcaaatcgccgaaatttggtgccatcgcaggctgtatggttaccgaaggtgtggttaaacgtcacaacccgatccgcgttctgcgtgacaacgtggttatctacgaaggcgagctggagtccctgcgccgcttcaaagatgacgttaacgaagtccgtaacggtatggaatgtggtatcggcgttaagaactacaacgacgtccgcactggcgatgtgatcgaagtattcgaaatcatcgagatccaacgtaccattgcttaaggtttttagggttccatgcgggataaggcgtttacgctgcatccggcatggattgcctgatgtgacgctggcgcgtcttatcaggtcaacgtgaacagcccttccaccaccgtttccggtgtcgaaatgtctcgcgacctggcgtatgccaaagtatatgtgacgttcctcaacgacaaagatgaagacgcggttaaagcgggcatcaaagcgttgcaagaagcttctggtttcatccgcagcctgctggggaaagcgatgcgcctgcgtatcgtgccggaactgaccttcttctacgacaactctctggttgaagggatgcgcatgtcaaacctggtgaccagcgtggtcaaacatgacgaagaacgtcgtgttaacccggacgacagcaaggaggactaatgagtcgtcctcgtcgtcgcggtcgcgacattaacggcgttttgttgctggataaacctcagggtatgtccagcaacgatgcgctgcaaaaagtgaaacgtatatataacgccaaccgtgccgggcataccggtgcgctggacccgctggcgaccggcatgttgccgatttgcctcggggaagcgacgaagttttcccagtatctgctggactccgacaaacgctatcgggtcattgcgcgtcttggacagcgtaccgatacttctgatgccgacggaca

SEQ ID NO: 9205 - DNA, 748 bp, Homo sapiens
  SIMILAR (13)..(684): 801254mologous to Escherichia coli HyfC,accession number M63654,Smith-Waterman Score=843.
atgaccgacctctatgcgtgcggcggcgatctgatcacccttatctatcttcttgccctgtttcgttttttctttgctctttccgggctggataccggaagtccgtttgcgggagtcggtgccagtcgcgagttgacgctcggcattctggtcgaaccaatgcttattctctcactgctggtattggcgctgatagcaggttccacgcatatcgagatgatcagcaatacgctggcgatgggctggaactcgccgctaaccaccgtactggcgttactggcctgtggttttgcgtgcttcattgagatgggaaaaattccctttgatgttgctgaagcagaacaggaattacaggaaggcccgctgaccgaatattccggtgccgggctggcgctagcgaaatgggggctggggctgaaacaggtcgtgatggcatcactgtttgtggccctgtttctgccctttgggcgcgcgcaagaactttctctcgcctgcctgctgacttcacttgtcgttacgctgctcaaggccgataaagttgccgtcacgttgacgttggtcaacgtgggggatgtggcgttgtttggcctggtcattgatcgcgtgagtacgctgattctgtttgtggtggtgtttctcggtttgctggtcacgatctactccacgggttatctgacggctctagagatccccgggtaccggctgagttcaatacccgcttcagccatcgcgatatctcgtttcaccc

SEQ ID NO: 9206 - DNA, 1785 bp, Homo sapiens
  SIMILAR (241)..(2): 381254mologous to Shigella flexneri reverse transcriptase- like protein,accession number U97489,Smith-Waterman Score=91.
tcaccatgatgttcgataataggggcgatataacaccgccctgtggcaccctttcctggccgcccgaaagagaccgacatcgatatgtcccgccttgatggttttccacagcagagtcatgaaacgtgcgtcactgatcctgcggcgtacagctttcatcagcagtcgatgatgtacggtgtcgaagtaactggacaggtcgccttcaatcacccagcgtcccccgggtttcaccacagtcgtgcggatcgcgtggtggacactgcgctcaggccggaagccatatgagagcgtatgaaaatcactctcccatatcggctccatcgccatcagcatggcccgctgaacaatacgatcccgcaacgcggggatacccagtggtcgcagtttgccgttgcttttagggatgtaaacccgtctggcgggcaagggctggtagtggcctgagagtaattcatccctgaggatttgcagctcaacagccagtctggcctgtagcattgttttgttcacgccatcaacgccgggggtatgggccccctttgatgaaagcgtgatccgcgccgcttcagccagccattctggttgtgttatcagacgcagcagccgttgaatccgtagggacggatcggtggccttctcggcggtagtggtctggcaagggcgtttctggttactgtcctttattcccggtggctttctcggcatgacgctgttttttgccagcgggatgaactggacggtgacgttactgggttttgacaacatctgcaggaagtgttttgggcgtgtcatggtcttgtacagcaacatggcaccctcatccaggagcacattggctgagagacgcaggtgcttcagggactggttggctttgaggacatagaagaattcagcccactgctccggggtggcacagtgacctcccaaccttgcgcgctgcagccccagcgccatggctcgccagtcgccgatccggagccctcggaggcccctagccccctccccggccttgcgagccccctccccagctcctccccacgccgcgcggttggctgtgccacgccaggcctgaggcttgctgctattggcgctgatagcagtttccacgcatatcgagatgatcagcaatacgctggcgatgggctggaactcgccgctaaccaccgtactggcgttactggcctgtggttttgcctgcttcattgagatgggaaaaattccctttgatgttgcggcatcgtggatcatcatgatctggtcgcagtcatctacctgtaccgcgccaacacttaaaccgttacgttcggtaaccttgatgagattaacccctgtctctgcacgcgacttggttgggtatttcgcaactgcggtacgtttaccgtaaccgttttccgttgcggtaaggattgcgccatcgccacgaggcacgatcagagagacgactttatcgccttcacctaagcgaataccgcgaacaccggtggtgttgcagcccatcgcacggacagaagactctttaaagcgcaccactttaccggcggtacgcagacggttgaactcggtgaggacagttttcttcacggtaccgttagcggtcgccatgaagactttcacgccttcttcaaactcggtcactggcaggatcgcagtgatacgttcgtcctgctccagcggcagcaggttgacgatcggacgaccgcgctgcgcacgagtggcttccggcaactgataaactgaggtcgtgggttcaagaccagcctcaacaacttggagaaaccccat

SEQ ID NO: 9207 - DNA, 1369 bp, Homo sapiens
  SIMILAR (674)..(1294): 991254mologous to Escherichia coli FixB protein,accession number D90812,Smith-Waterman Score=1051.
gttaatgaccatcatttttgtaccggtgagaatcgggttaatacataacttattgaatatattgagttaatcagaatggcatcctttatgcaatatgaaatgcaatgtttcatatcattttcaaggagccgacatgaaccgctttgtggtggccgaaccactgtggtgtacaggatgtaatacctgtctcgctgcctgttcggacgtgcataaaacgcaaggtttacagcaacacccgcgcctggccctggcgaagacgtcaacaatcactgcccctgtcgtgtgtcatcactgtgaggaagccccttgcctgcaggtctgcccggtcaatgccatctctcagagggatgatgcgatccaactcaacgaaagcctctgtattggctgcaagctttgcgccgaggtctgcccatttggcgcaatcagcgcttcaggaaagccgtccggtgaatggccatggcgcctatgttttcacgctgaagggtcctccaagacggggagaaaagccgcccccacatggttcttgccgggacctggttttaccgcaggggaaaaacccgtggtttttccaaggcggccggtttgcttcgacaagatggggtcgcaatctcagttaaaaaacacccctcattatagtgagaggccccccccccagaggggcattatcacacctatggtacaaaataccgaccaggcgcaggcagttatgccttatggtccaaaatgtctttatgttcttgcgcaaaacgacgcgctgcaacgcactgaaaattacgccgaaagcattgctgccctgctgaaagataaacaccccgctatgttgctgttggccgcgacgaaacgtggtaaagcgctggcagcacggttaagtgtgcaactgaatgcggcgctggtgaacgatgccacggcggtggatattgtcgatggtcacatttgcgccgaacaccggatgtatggcgggttagcgttcgctcaggaaaagatcaacagcccgctggcgatcattacccttgcacccggtgttcaggaaccgtgcaccagtgatacctctcatcagtgcccgacagaaacggtaccttatgttgctccgcgtcatgaaattctctgtcgcgaacgccgtgcgaaagccgcaagcagcgtggacctgagcaaagcaaaacgtgtggttggcgtcggtcgtggactggcggcgcaggatgacctaaaaatggtccacgaactggcggcggtgctgaatgctgaagtcggctgttcacgtccaattgccgaaggcgagaactggatggagcgtgaattgatgcaacatcacattaccctgcaccgtttttcgcgtgtcctcttcactttgaacaaactgcggccagtttag

SEQ ID NO: 9208 - DNA, 1038 bp, Homo sapiens
  SIMILAR (725)..(808): 641254mologous to Escherichia coli HyfC,accession number M63654,Smith-Waterman Score=78.
atggcattgaccgggcagacctgcaggacaaggggcttcctacacagtgatgacacacgacagggggtaacccactttacggtatttccggcaaatagcgcgttaacaatcccgcgtcggccgggattctgccaggattatcgcgatatccacaaactgtttaaacgccaggaagttgcgccgacatcttcaggtctgatgttccgcctgatgccgtgggtattaatcagcagcatgctggtgctggcgatggccttaccactgtttattaccgtttccccttttgcgggcggcggcgatctgatcacccttatctatcttcttgccctgtttcgttttttctttgctctttccgggctggataccggaagtccgtttgcgggagtcggtgccagtcgcgagttgacgctcggcattctggtcgaaccaatgcttattctctcactgctggtattggcgctgatagcaggttccacgcatatcgagatgatcagcaatacgctggcgatgggctggaactcgccgctaaccaccgtactggcgttactggcctgtggttttgcctgcttcattgagatgggaaaaattccctttgatgttgctgaagcagaacaggaattacaggaaggcccgctgaccgaatattccggtgccgggctggcgctagcgaaatgggggctggggctgaaacaggtcgtgatggcatcactgtttgtggacctgtttctgccctttgggcgcgcgcaagaactttctctcagcctgcctgctgacttcacttgtcgttacgctgctcaagcggttgctgtgaattggaatggtccaccctttgagaagaagagggagattaaggcgcgggtatattgccggaaaggacgactgcatgaaagcccctatacgcacataagtacgtacacactgagtgagaataactttggtcgatatcttcagacttatgaggccactaggcatcgaaacgacgatggctcgttgctcaattgctctcgaggtgtaaccgtgctacgagatgcggcttga

SEQ ID NO: 9209 - DNA, 630 bp, Homo sapiens
  SIMILAR (25)..(324): 1001254mologous to Escherichia coli tdcC,accession number M23638,Smith-Waterman Score=510.
atgcggctccatcatcgcactcgggctatcttcaaatctttcttcggtcactatctgggaacgctggaaggtctgaatggcctggtcctgaagtttggttataaaggcgacaaaactaaagtgtcgctgggtaaactgaacactatcagcatgatcttcatcatgggctccacctgggttgttgcctacgccaacccgaacatccttgacctgattgaagccatgggcgcaccgattatcgcatccctgctgtgcctgttgccgatgtatgccatccgtaaagcgccgtctctggcgaaataccgtggtcgtctggataacgtcccgcacgctatcacccgcgttgatctgaaagaagatggcaaagggctgaagattgttcgccagagcctgccgtacggcactgccagtggcactcacggtctgtacttctgcgcctactgcgcgcgtctgcataacattgagcagcaactgctgagcatgtttggcgataccgatgctatcaaggcatatcaatctttcctggcgcgctcggcttttgcggtgtctcagtgtattcccgtaaacaccgtgtaccgggcctactccgtcattcaaaactggatagcgatcacgattcgtcacgtctag

SEQ ID NO: 9210 - DNA, 3609 bp, Homo sapiens
  SIMILAR (1218)..(538): 931254mologous to Escherichia coli glutamate synthase, large subunit,accession number U18997,Smith-Waterman Score=1112.
tcattcatgtcctgcctcgtcaccgaattgtaccgtcactggcattccctggcgtaacgcatcatcggcgtcggtcaccacaatacgcaggcgatagacgaggtcggtacgcagatccggcgtttcgacggttttcggggtaaattcagcagtcggcgaaacgaaaccaatttctccgaaatcccggaaggcatctttggtaagaaaaccgtcgaactgaacgaaaacggcgttccggcgcgcgcagcgtggatccagttcctgatcgtcatcccgctgatgattatcccgatgctcggttccaataccgtgcaggatcaggcggctggccaggcaacaagtgcgttcataacgctgttttaaccggggcagacgctctgctacccacgtttctggcaaattaagcgccgaggcgagttgcgcacggggagtgaaagtattcagtaataacagcgccagcagccgatcgtcgttatcgtgcttttgcagcaactgaaaaaagctgcggcgctcgaagatttccagctgatagcccgcactgcgcactggcgaaaatgcgggcagcgcaaatttagtggcgaaggttgaccagttcgccagaatctcttcaccgcgctgagagccggtatgctgcacatgctcggtgataagaccacgcagatgctcttcatggatcgccagagcgtcaacgcttaagacctcgaccagttccgggttaacgcgtttgcggaaatcgccgctttcatcgagaacgtaagcgaaaccgccggtcatgcccgcaccgaagttaacgccggttttacccagaatgcagacgataccacccgtcatatattcacaaccgttgtcgccaatgccttctaccacggtgatagcaccggagttacgcacgccgaaacgttcacccgcgcggcctgcggcatacagacgaccaccggtcgcgccatacaggcaggtgttgccgataatgcttgcttcatggctgcggaaggcggaaccaaccggaggacgaatggcgattaagccgcccgccatgcctttaccgacatagtcgttggcatcaccggtcaggtacagttccacgccgcccgcgttccacacgccgaagctctggcctgcggtgccgttgaagtacgctttgataggatcggctgccagcccctgatcgccgtgcgtctgggcgatatagccggctttactgagaacgccgatctgtttggctggtttggtattggtcgtccgctgggcgtaccgacgccagtctggatcatggggattgtcttcctcgcggcctggtacatgctgcatcacacgcgtctggggcgttacatctacgcgctgggcggcaacgaagcggcaacgcgtctttctggtatcaacgtcaataaaatcaaaatcatcgtctattctctttgtggtctgctggcatcgctggccgggatcattgaagtggcgcgtctctcctccgcacaacccacggcggggactggctatgagctggatgctattgctgcggtggttctgggcggtacgagtcagatgatcgtcaaagcggtggtgattttgctggcggtgcctggtttccgctgttgcgctaagcgccaccgtcagtgcgaatgcgatggcaaaagacaccatcgcgctggtggtctccacgcctgcgcacactggggcaggtggcctggcattttccgctgattgagttttctccgggtcaacaattaccgcaacttgctgatcaactggcagcgcggtggcgatgtcggcgctggcgggggtgaaaagcgtgcagcaggttcgcattcgtgccgcccagtcgctgggtgccagccgtgcgcaggtgctgtggtttgtcattttgcccggtgcgctgccggaaatcctcaccggattacgtattggtctgggggtgggctggtctacgctggtggcggcggagcccgctggggccgtatatcggcgcacaaatttcgggtgccgacctgacgcgcccgttaagcgataatcagtttgaacagctttaccatgcggtgctgcgccatcatggcaatcggcgctggcctgtaaataacgttcacgctgttcagcggtcagtttatccacgccgctgccatcctgtacccagacattaacgccggttgctttaacgtgttccagcagttggcgatagccatcgggcgacatgtttccggcgaaaaaactactgatataaaccggttttgctgaaacatcgctaatcagccgctgcgcgttgtttaaccatgttagcaaaggctgacgggcggcttcgctgcgccagttcaggtcgtcaatttccgcgctgatgtaccagccatccggcgttatgccaggcgcggcgctccataatctggcttgctggagatcggcagccagcaggcgattaagatagctttccagcgctgcggacgactgtttctggtgcataaaaaattccggatcggcgttcagcccgacaataagcttcagaccagcctgttgcgcagctgcggcccgcttaaacaataacgtgcgctgttctggctgggtaaatgcatcgccgtaacgggtccattgcaaaacaagggtatcgaagccttgcaaacgtaactgactcatcagcccctgccactgggtatcggtaacctgactatctcggaccggtaccaaaacaacgttcgcgattacactgaatatgcggcttccatcatcgcactcgtggctatcttcaaatctttcttcggtcactatctgggaacgctggaaggtctgaatggcctggtcctgaagtttggttataaaggcgacaaaactaaagtgtcgctgggtaaactgaacactatcagcatgatcttcatcatgggctccacctgggttgttgcctacgccaacccgaacatccttgacctgattgaagccatgggcgcaccgattatcgcatccctgctgtgcctgttgccgatgtatgccatccgtaaagcgccgtctctggcgaaataccgtggtcgtctggataacgtgtttgttaccgtgattggtctgctgaccatcctgaacatcgtatacaaactgttttaatccgtaactcaggatgagaaaagagatgaatgaatttccggttgttttggttattaactgtggttcgtcttcgattaagttttccgtgctcgatgccagcgactgtgaagtattaatgtcaggtattgccgacggtattaactcggaaaatgcattatcaacatcgtcggcaaactgttcaacgaatgtgcagacttccgtcgtaccggttctgcggcgctggatctggcttacgtcgctgcgggtcgtgttgacggtttctttgaaatcggtctgcgcccgtgggacttcgccgcaggcgagctgctggttcgtgaagcgggcggcatcgtcagcgacttcaccggtggtcataactacatgctgaccggtaacatcgttgctggtaacccgcgcgttgttaaagccatgggtcccgatccctggtcggcggaatccgtcgaatttacggctaaggacggtactcgtctgcaaggctggtttatcccttcttcgacgggccctgctgacaacgccatcgcaaccatcattcat

SEQ ID NO: 9211 - DNA, 648 bp, Homo sapiens
  SIMILAR (549)..(298): 981254mologous to Escherichia coli K12 orf, hypothetical protein,accession number AE000330,Smith-Waterman Score=441.
gaattcattgtcgcgacccggacatcaggtggacggggagatccctgacaatacccaacttagtcagcttgtaatgcaactggctggtctgagagtgctgacaaacgcaaaactgcctgatgcgctacgcttatcaggcctacgtggagcccacaatatattgaattagcacgatttcgtaggccggataaggcgttcacgccgcatccggcgtgtacaacgcgcacttggtcaacaatctgaggccagtcagtaatgttactgcctggcctttaatcaatgaatcagaaacgcttacagcgccatcaacttgtccagcgacggtgcgaaataatagccgccggttaccggtttggtgaaacgcaacatcgcatcacgcttaccatcggtatcgccaaacatgctcagcagttgctgctcaatgttatgcagacgcgcgcagtaggcgcagaagtacagaccgtgagtgccactggcagtgccgtacggcaggctctggcgaacaatcttcagccctttgccatcttctttcagatcaacgcgggtaatgatacgaatcgatgctcggcagattttttgaaaggactgcctgtctacaacaaaagcaattttagtcgatttcacgcggactccgtgtgcaaagcctcg

SEQ ID NO: 9212 - DNA, 1034 bp, Homo sapiens
  SIMILAR (218)..(844): 961254mologous to Escherichia coli threonine-serine permease,accession number U18997,Smith-Waterman Score=1007.
atgagctacctggtatggccgtttatcgccagcctggtgctgatttctttgtcgctgatcccttactggaactctgcagttatcgaccaggttgacctcggttcgctggcgttaaccggtcatgacggtatcctgatcacggtgtggggggggaatttccaccaagggttttccccttaaactttccgccaaatgttttttcctttgggggtttctaaagcgtaaaaagtagaaaaaagacttcggtcgcgacttcaccgaacgtaaatgttcccaaatcatttctcgtgccagcatgctgatggttgcagtggtgatgttctttgcctttagctgcctgtttactctgtctccggccaacatggcggaagccaaagcgcagaatattccagtgctttctcatctggctaaccactttgcgtccatgaccggtaccaaaacaacgttctcgattacactggaatatgcggcttccatcatcgcactcgtggctatcttcaaatctttcttcggtcactatctgggaacgctggaaggtctgaatggcctggtcctgaagtttggttataaaggcgacaaaactaaagtgtcgctgggtaaactgaacactatcagcatgatcttcatcatgggctccacctgggttgttgcctacgccaacccgaacatccttgacctgattgaagccatgggcgcaccgattatcgcatccctgctgtgcctgttgccgatgtatgccatccgtaaagcgccgtctctggcgaaataccgtggtcgtctggataacgtgtttagtaccgtgattggtctgctgaccatcctgaacatcgtataccaactgttttaatccgtaactcaggatgagaaaagagatgaatgaatttccggttgttttggttattaactgtggttcgtcttcgattaagttttgccgtgctcgatgccagcgactgtgaagtattaatgtcaggtattgccgacggtattaactcggaaaatgcattctgctcaaacagagacagtgaatttgccat

SEQ ID NO: 9213 - DNA, 981 bp, Homo sapiens
  SIMILAR (384)..(130): 1001254mologous to Homo sapiens FPM315,accession number AC004232,Smith-Waterman Score=429.
tcattgccgcactgtcgctctgatcgctctccagccgttgtccacgttggcaacaatgtgcgcattgacgcctttggcctgaaagcgcggctgacgggcgatctcaatgtcgttcagaatggaacgaccctgttgtctcagtctcccaagctctctctgcatatcctccacaagggtcaccgcttcttcgccgctctccggatgcagctcctgcaccctgctctggatctcctggggcaggatggtcaggaactgctctaacaccagcagctccaagatctgctccttcgtgcgcatctcaggccgaagccacccatggcaaagctcttggagccggctgagggcttcccggggaccagctgcctcttggaagcggaaccgtctaccatcagggacgtggtcctcattgccagccagccagccagccagccagccagccagcaggggagtcaaatttagaatttcacccttataatctggttttgcgacgtcgtttggcacagagaaggtgatttctttatcttttagtgggttgccatttttatcctgcaaggttgcagtcatatattgcggagctgtgttggtgacggtgatatcacctgaaggcacacaccactgccctcctgctgtgaacaagctgattaagaggaagttacaattgatacgactttgagctcggtacccctgacatttcttcagctttgaagaatctgcattttctctcctgatctcaaaaccccaggggctctcccctggggcaggctgagccccggagggctgtaaccccgggcgcaggctgggtgtggtcctcaggtcaacaggcgggtgtgcgagcaggaggtgctgggccccgactgcgatgaactccgcaaggcctgcctggagatccgcagctcgctccggcgccggctctgcctccaggcctgagggtgcggcggccacgggggcgctgctgagacggtggccagatcccagcgccat

SEQ ID NO: 9214 - DNA, 1241 bp, Homo sapiens
  SIMILAR (1)..(561): 991254mologous to Escherichia coli K12 putative transport protein,accession number AE000276,Smith-Waterman Score=944.
atggttaaccatctgccggtgatgatggcggcggtagtgattgcgatggcggttatgttgctggcatccaaaccgctgacgcgattcgttaaccagcaccccacggtggtggtgctctgtctgagcttcctgttaatgattggtctgagtctggtggcagaaggtttcggtttccacattccgaaaggttacctgtatgccgcgattggcttctcgatcatcatcgaagtgtttaaccagattgcgcgtcgcaactttattcgccaccagtcgactttgccgctgcgagcgcgtactgccgatgccatcctgcgtttgatgggcgggaaacgtcaggccaatgttcagcacgatgccgataacccgatgccgatgccgatcccggaaggtgcatttgccgaagaagaacgttacatgattaacggcgtactgacgctggcgtcgcgttctctgcgcgggatcatgacgccgcgcggtgaaataagctgggttgacgctaatctcggggtcgatgaaatccgcgagcaactgctctcttcaccgcacagtctgttcccgattcagctgtatgccagcctgctattacaggtgtttttctttgccgcgaatatttacggttggtatgcgtggtcgcgacaaaccagtcagaacgaggcggagttgaaaattcgctggttgccattgccgaaggcactcagctggttggcggtttgcgttgtttcgattggtctgatgacggtatttatcaatccggtgtttgcatttttgacccgcgtggcagtcatgatcatgcaagcattaggattacaggttgtgatgcctgaactgcaaccggacgctttcccgttctgggattcatgcatgatggtgttatctatcgtggcaatgattctgatgacgcgtaagtatgtggaaaactggctgttgtgggtgattattaacgtgattagcgtcgttatttttgcacttcagggcgtttacgccatgtctctggagtacatcatcctgacctttattgcgctcaacggcagccggatgtggatcaacagcgcactgatccatcaggtagtgttggatctgatccaacaaggcatcgtgatcgtgtggcgggatcacctgcacatgcaacgtcttcaccggcttctcgcctaccatccatacatgtacctggtgcacattgcggacttccgggatttcccggcacatacgaggcttcatttcagcgatatccagcgataccg

SEQ ID NO: 9215 - DNA, 1611 bp, Homo sapiens
  SIMILAR (391)..(972): 971254mologous to Escherichia coli LdcC, probably constitutive lysine decarboxylase,accession number D49445,Smith- Waterman Score=1003.
tgtcccggggattcccgcgccgtgaattttctgggccaagcatcaaaaaaaaggtcgatgctcccacgcaagcacaatggccggttcatgcggtgatcacaaactccacctatgatggcttgctatacaacaccgactggatcaaacagacgctggatgtcccgtcaattcacttagattctgcctgggtaccgtacacccattttcatccgatataccagggtaaaagtggtatgagcggcgagcgtggtgcgggaaaagtgatctttgaaccgcaataggcccacagaatgctggcggcgttatcgcagggttcgctgatcctcattaaaggcgagtatgaccaagaggcctttagcgaagcctttatgaggcatagcccctcctcgcccagttatcccattgggggtgtcggttgagacggcggcggcgatgctgcgtggtaatccgggcaaacggctgattaaccgttcagtagaacgagctctgcattttcgcaaagaggtccagcggctgcgggaagagtctgacggttggtttttcgatatctggcaaccgccgcaggtggatgaagccgaatgctggcccgttgcgcctggcgaacagtggcacggctttaacgatgcggatgccgatcatatgtttctcgatccggttaaagtcactattttgacaccggggatggacgagcagggcaatatgagcgaggaggggatcccggcggcgctggtagcaaaattcctcgacgaacgtgggatcgtagtagagaaaaccggcccttataacctgctgtttctctttagtattggcatcgataaaaccaaagcaatgggattattgcgtgggttgacggaattcaaacgctcttacgatctcaacctgcggatcaaaaatatgctacccgatctctatgcagaagatcccgatttctaccgcaatatgcgtattcaggatctggcacaagggatccatagccgcagggttacggcctctgtgagctctggttcccaggctaatcaacaggtgaattttatcggtgatcaaagtactgctgccctgaccctcagtgtgccttcaggtgatatcaccgtcaccaacacagctccgcaatatatgactgcaaccttgcaggataaaaatggcaacccactaaaagataaagaaatcaccttctctgtgccaaacgacgtcgcaagtaagttctcgattagcaacggaggaaaaggcatgacggatagtaacggggttgcaatcgcctccctgaccggcacgttagcgggcacgcatatgatcatggctcgtctggctaacagcaatgtcagcgatgcacagccaatgacgtttgtggcggataaagacagagcggttgtcgttttgcaaacatcgaaagcggaaatcattgggaatggcgtggatgagacaactctgacagcaacagtgaaagatccgtcgaatcatccggtggcggggataacggtaaacttcaccatgccacaggaaggcgtttacgccatgtctctggagtacatcatcctgacctttattgcgctcaacggcagccggatgtggatcaacagcgcacgtgaaaagaggactcaacgcaacgactga

SEQ ID NO: 9216 - DNA, 805 bp, Homo sapiens
  SIMILAR (192)..(683): 781254mologous to Escherichia coli Probable oxidoreductase OrdL (EC 1.-.-.-),accession number D90768,Smith-Waterman Score=662.
gcacagcccgcagccgacgcgaccattaccgaggttgatagcaagaagcgactaccggtgctagcgaagaaaaaagaagcggcgacggggggactgaacaactaactccgatccgcggaggacaacgatacgcgcgagaaaaacaaacagacgaataggagtgatagcaaactacgcttagtagagacaagcggatcgccaccaaccagctcgtcgcaaacacccgaccccgccttccgatacccgaaaaaatactggtgtggaagactgtagcttatcgcccagaatagccccgtattacccccgacaaccgcttgctgtacggcggcggcgtggtttacggcgcgcgcgacccggatgtcgttgagcgccttgtggtgccgaaactgctgaaaaccttcccgcagctgaagggcgtgaaaattgattaccgctggacgggcaacttcctgctgaccctgtcgcgtatgccgcagtatggtcgcctcgataccaacatctattacatgcagggttacagcggccacggcgtgacctgtaatcatctagccggacgtttgattgccgaactgctgcgcggcgacgccgaacgtttcgatgccttcgccaatctgccgcattacccgttccccggcgggcgcacgctgcgtgtgccgtttaccacgaaaagcgcggcgtattacaagcctgcgcgatcgtctgggcgtttaatttccgattaaccgtgaagagtcaaaaggttcctataatgcacacattaacttttaaaggcgaaaaattggagctcgatgtgctgccgccatga

SEQ ID NO: 9217 - DNA, 681 bp, Homo sapiens
  SIMILAR (212)..(592): 801254mologous to Escherichia coli UbiH (VisB),accession number D90281,Smith-Waterman Score=485.
gctcgcgcattctggaaccgggcatggtactgaccgtatagccagggctgtatattgcgccggatgcagaagtgccagaacaatatcgcggtatcggcattcgtattgaagacgacattgtgattaccgaaaccggtaacgaaaacctcaccgccagcgtggtgaaaaagccggaagaaatcgaagcgttgatggttgctgcgagaaagcaatgagcgtaatcatcgtcggtggcggcatggcgggcgcgacgctggcgctggctatttcccggttaagtcacggggcgctgccggtacatttgattgaagcgactgcgccagagtcacatgctcatccgggctttgatggacgagcgatagcgctggcggcgggtacctgtcagcaactggcgcgcatcggcgtctggcaatctctggcggattgcgcaactgccatcaccaccgtgcatgtcagcgatcgtgggcacgctggatttggtaccctttcgcgaaaaattaccacttgggggctctgacaacggttgtcgaattgcaaatggggggcaaacggctgttttgatttgctgcgtaaagcacctggggtaccgctcgatgcgctgatcgggggtaaagttgccgtactaaaagacgtgaaggaccctgaaagggcgaacccttcgggccgtgctggacacttatg

SEQ ID NO: 9218 - DNA, 4086 bp, Homo sapiens
  SIMILAR (1488)..(871): 971254mologous to Escherichia coli No definition line found,accession number U00039,Smith-Waterman Score=1054.
tcaatcgctcgtttgtatgacgctgaagatggcacccaacacttcacccattttgccgacggaaaatgcgtgctgatctttatggctgaaggtaaccctcgcattgcgaaggtgacgggcgaagggattgcggaaatcgttgcccgctacccgcaatgccagcgcgtggacagcaagctgatcgaaacctggtttaacaacctgaactggggaccggataaagtggctgccgaacgtgtgcagatcctcaaaaccggcaacatgggctttaccaccgaagtatccggctgctggagctgcatccacgaaatctacgaaagcgttattaaccgtattcgtactgagttcccgcacgccgacgacatcaccatgctgcaggccgataacggtcaccaccgccagcatcgcgttacgcagcgcatggacgataatcacccgcatgcgggttagccctttggcgcgcgcggtgcggatgtaatcctcgcccagcacttccagcatcgaggagcgtgtcatacgcacaatgaccgccagcggaatagtacccagcacaatggcaggcaagatcatatgggcgacggcatcgataaagttgccgtcttcaccccagatggcggtgtcgattagcataaaaccggttaacggattggagtcatcgaggaacaccatatcgctcacgcgaccggagacgggcgtcaggttccagtgcaccgaaaccagcatgatcagcatcatgccccaccagaagataggcattgaataacctgtcagcgccaggccaaccgctgtgtgatcgaaaatggaaccgcgtttaaccgcagccagcacgccgaccggaataccgactgccgtagcaaaaatcatcgcgcagacgccaagttccagcgtggcggtgatagacgggctagggatatcacgtaggccagatacctgcattctgtcgcccttcagcgcgccgccgtgttccggcaccacgaccaccatcactttacgacccgatttctcaagttcagtaaagaaggcgtccagttcatcaaagaatttctgcgcccgcgctttgtaatccgctgttttgctgacccccggataatggttgccgtcatgcagtggaagcgtgttgtagaacgtggcactacggctgtttttatctttttcggtaacgtccagccagcggttaagcacagcggtatcgtcataaaccggcgaaccatcaaagcccagcaaaataaccggcagatttgtttgatccatcaattcgctctgcatgccgccattttcgcgaacttctttcaaaaaaccgccgaactggccgttatgtcccatcatcaggtgctgggtaaagcccagtttcgaaaggttatcaaacagatagcagtcgttatttgccggttgatacagattagtgtgcgaagtctgcccgcagctggcgcgcagtaaacggatcgccgccgggccactgtaggaggtggcggagttaaagttcttgaacgggtacgagctagagatcgtccaaaatcgggctggaccggcgacggcttgaccacgatacagaaggccaggagccgcatccagacgatttatcagccggggagcttcacgccactcatcagggtcgaaactgccaccggtgagctggcgaaaacgcagcgccgcagcttggcggatgcccttcagcagtccgtcggcgaagacggtggcagtgtggtgttcccgccggtgttggtgcagatgctcgaccggctggaaagtgaaatcctggctgaccgggtgagtgaggaaagccgccgctggctggcatcgtgcggcctgaccgtggagcagatgcaaaaccagatggacccggtgtacacgccggcgcgaaaaatccacctgtaccactgcgaccatcgcggcctgccgctggcgctcatcagcacggaaggggcaacagcgtggtgcgcagaatatgatgaatggggcaacctgctgaatgaagagaacccgcatcagctgcagcagcttatccggctgccggggcagcagtatgatgaggagtccggcctgtattacaaccgccaccgctattatgacccgctgcaggggcgatatatcactcaggatccgattggaaccataatttcgtccgggcgaaggttcgtaatatcgcccgtttgactcattgacaatgacagaaccaacgtattctttatcgaataaattatcgacacgaccaaataaatccacagttaaattgtggtaattgtatttatacccggtgaataagccgacgagagtataagacggcgcttttgccgtattttcatcatctgccataatatcgcccataaagggatcattaagtcgaatccggctcgctgataacgctgtgcaatagttctcaggtaacccgctgtcactgatgatcgttttaatacatgatagtgttgctacagcatgcggctcaacggcatcaaattttgagtgatcggccatgagaataacttcacgcgagcgttgaataatccgtgttttcaccccgacctcaaacatggtggcattggtgatccccgtctccagcgacagcgcatcgcaggagataaacgcacgttctacggaaaaggcattgatcatctccagcgccagactctctcctaccgaaaaataacctgggcgaatcagtcctccgataatgtaactttccacatggggaaaacagcccagttcattggcgattttaatgtcgttgcagatgacctttacccgcgcatcggccaggcatttcgccagttcgaggcaggttgagccggagtcgagaaaaaagcagtcgccatctttgatcattgttcgggcaagggcagctatttctcttttcgccacagattgcaatgtacgtttcacgtcgaagacgtactctttgtcgtctgtactgtcgtcgaagtccaggcaaccgtgaccgcggatcatgcctggatactggtaaggggaatcatctagagtcgactgtgtacgccgaacgccgcaggaccgcagcggaccgtatgcttgactgatgagtatcaccctgaacgggccagtatcaccggtaagtttagtgacgccgaatgtcctaagctggatgtggtatttccacattttatcagccagatagagtcgatgctgaccactggtgaactgaatccccgccatgcccaatgcgtcaccctgtaccacaacggttttacacgcctgctggaacaacactatggcctgacactgaacgacacgccgttcagtgatgaaactgttattaaggaacatatcgatgctggtatcactctggccgatgcagtcaattttgtggtggaaaggtaggggataatgagagtcaaactgcgagcagcagtcaacgccccccaacaattgccagcgtctcaccgcgttgcagacggtgtcccctttttcacggtagataccggtggttggcgtatcgcctgcgtagccccaggcgcgatacattccttcggtgttaaacggtagcgcgacattcccttcatggtcgatagcgattaagccaccgctaccgccaagcgcagggagtttttccattactacccgctcgcaggcttccgcgagacttaatccgccgtaatccattaacgcggcgatgtcatatgccgccagcgcgcggatgaagacttcgcccgtgccggtacaagaaaccgccacactggcgttattggcgtagcatccggcacccactaagggactatcgccaactcgtccgggtaatttattggtcattccgcctgtggacgtggctgccgccaaattgccgtctaaatccaacgccacggcccccacggtgcccattttctgtttttcatccagtggcgcaccgttgatgcgttgaccaccgtcggtgagttccatatgggatcctctagagtagagcgcaagcagcagtccagtttggagcacaacatccagcgcctgctggcttcccccaccctggaaaatatcggcatcatcctgctggggctgggcgctggcgtaacgggtatcgcgctcgaacaaccggcgctgattgctcttggcctggtcggtggtctgtaccatctgcttaaccat

SEQ ID NO: 9219 - DNA, 3498 bp, Homo sapiens
  SIMILAR (1290)..(7): 531254mologous to Homo sapiens gonadotropin inducible transcription repressor-4,accession number AB021644,Smith-Waterman Score=1242.
tcaggttttttcacatgccttagttcttagatgtttagcaagtgctgaagattgagtgaagtttttcccacatttcttacattcatatggttttgctccagtgtgagttcgtgtgtgaacgttaaggtatgtggaatacctgaaggctttcccacattctttacatgcataaggcttttctcctgtgtgcgttcgcatgtgcatattaagatttgtggaacgagcaaatgctttaccgcattccttacattcacaggccttttctccagtgtgagttcttaaatgggtactaaggcccgaggattgagtgaaagctttcccacattctttgcattcatatggcttctctccagtgtgaatccttacatgttgactaagcattgaggaattattaaaggctttcccacattctttacattcatagggcttttctccagtatgtgttctcatgtgtaaaacaagtcctgaggaacgagtaaaagctttcccacatgccttacataaatacagcttctctccactgtgaatccttacatgttttgtaaggtatgaggaatgaataaaagcttttccacactccttacattcatatggcttttctccagtgtgaattcgcatgtgtaaaataagtcctgtggatctagtgaaggcttttccacattccatacatacatagggcttctttccactgtggattcttgtatgatcagtaaggtatgaagaatgggtgaaggctttcccacactctttacatttatatggtttttctccactgtgagttctgatgtgtaatttaagtcctgtggattgagtgaaagctttaccacattctttacagacatagggcttctctccactgtgaattcttccatgtcctataaggtgtgaggaattactgaaggctttcccacattccttacatacatagtgtttgtctccattgtgagatcttatatgtaacttaagggatgactgattaagaaaagttctccaacagtctttgcattcacacaatttctcttgtgtgtgagttttattctgcctagtaagatttggaaactggttgaaggctttttcatgtttaacacacttaggcattttcccctcagcatgacttttcttgtaaaaactatgaggaaagttctttcttaaggcttttccactctgattatcctcagaagttttctctccaatgtgagttatcatgtgagtcataagaaatgggtgttcattgaagacttttccacaatggttagagtcatacagtttctctgcagtattgcttctctcagtggaggcaagtagctgtaactcagagatacgttgctgtttggccagttcttctctgttattgaacaccttgaaggtgagattgattaaatcctgttgtggggtttgagggccagaatccaaatttggagattttttctgaagccgcacctggtcgcagaggctactgctggggaaaccgttgggccagcggcggctaaagggcaggaggcgccgctgtggccacgcgcacttctgattccgctccagggtttcagaaggaactgagggctctggacccggcctcggaggcgtatagctgcgcgccggctggcacttccgcttccggttgcgcacggcattaagtgtaggggccgagccccaagagctttggaatgaggatgatgtgaagctgagagaagagctggggccacctcttcgacacgcgtacagaaaagtcccgttttctcgcatcccaggtggaccaggatccagatcaatctgtcgatattgggaacgacgccggaccaggaaacccagcgccaagggccgggttggaggcggggaaggatcacaaggtcccacaataggctgtctgcaggctgaggagcgaggagagccagtctgagttccaaaactgaagaacttgaagtctgatgttcgagggcaggaagcatcccgcatcggagtccaagcttgtttgcctgcacgtcccagcatcgagatgtgggaatactggttgtggaagggcacgtccgtgtactcgtaactggacgtgttggtaaaatacgcgaagtagaccttggccccagccaggtgggagttggtcacgtagagcacaccgcagatcatgaaggcctcgccagcgctgcgcttggggtagccggtgtcccaggaccgcatgacctcgagggtgtgcgggtccagccggctgaccacgatgttgcccgcgttctggttggtggtgtacacagcccagagcccgctctcgtccaccatgaagtccatgtcggagaagccgccccaggagtaggggaaggtgttgttgtaaccggcgcccgggaggctcctctgcaccagcacagagcgcgagcggaagtggtatttgaccaccacgttgctctggtacttgttatagaacagggagccgttgtacaccacgtggcccgtgcccgcccacggctggggcagcaggtgctggataaagttctggcctttgatgaagtctcccagggtacggaactccaggacccggcggcctttgtaatagccatccatgtaccagaccttatgcgcttttgccacaatattctcggcggtaaagccaaagaacgggaacagcttatccgccggagcagattccccgtaacccgtcatcccgacaattgcccctttcagaccaacatacttgtaccagtaatcggcaatacctgcttccaccgccacgcgagccgcaacgttagaaggcaacaccgactcccgatattcctcatcctgggcgtcgaaaatatcggtcgagggcagggaaactacgcgtacattgcgaccttctcctgacgggccagtatcaccggtaagtttagtgacgccgaatgtcctaagctggatgtggtatttccacattttatcagccagatagagtcgatgctgaccactggtgaactgaatccccgccatgcccaatgcgtcaacctgtaccacaacggttttacacgcctgctggaacaacactatggcctgacactgaacgacacgccgttcagtgatgaaactgttattaaggaacatatcgatgctggtatcactctggccgatgcagtcaattttctggtggaaaagtacgaactggtacgtatcgatcacagagattttcgtgtcgacgatctggaggatcctccggtacctgaggcgttgagtaatcagtcgcgtaagccccgtgcgcggatcaaaacgcgccacacgctcttgggcacaatccaccaccagacgaatactttcaatggttaaactggtttcagcaatattggtggcgagcacctgtttgcgcatccgttcaaccagcgtcatcaccagcatgataaaagcgttaatcaacacatacgccagcgtaatggcggtaaacgactcccaggcatgggctgagtaatcgagcaatttacccgcctgcgccgccatatccaccagaccgatagtcgaggcgatggcggagtttttcaccaggttcatcat

SEQ ID NO: 9220 - DNA, 1050 bp, Homo sapiens
  SIMILAR (1)..(675): 1001254mologous to Escherichia coli O157:H7 putative ATP- binding component of ABC transporter,accession number AE005655,Smith-Waterman Score=1128.
atgacgaccgaccaacaccaggagatcctccgcaccgaaggattaagtaaatttttccccggcgtcaaagcgttagacaacgttgatttcagcctgcgccgtggcgaaatcatggcgctgctcggtgaaaacggggcgggaaaatcaacgctaatcaaagcattaactggtgtataccacgccgatcgcggcaccatctggctggaaggccaggctatctcaccgaaaaataccgcccacgcgcaacaactcggcattggcaccgtctatcaggaagtcaacctgctacccaatatgtcggtcgctgataatctatttataggccgcgaacccaaacgcttcggccttctacgccgcaaagagatggaaaagcgcgccaccgaactgatggcatcttacggtttctccctcgacgtgcgcgaaccgctcaaccgcttttcagtcgcgatgcagcaaatcgtcgctatttgtcgggctatcgatctctctgccaaagtgctgatcctcgatgaacccaccgccagtctcgacacccaggaagtggagttactgtttgacctgatgcgtcagttgcgcgatcgcggcgtcagcctgatttttgtcactcactttctcgatcaggtctatcaggtcagcgatcggatcaccgtcttacgcaacggcagtttcgtaggctgggggatccttagagtgacccgaaggatcgagctaggcaacgtaggcattcctcctgtgcgaatcatttttttgtggctgccgtttgatgccagcattgaggaacagcgtaatctgccgccgatggtgatggcgaacgaatttgcaccggagctggagctgcctacagttcatatcgacaatctgaccgccgcatttgatgcacttccacagcctttgtggatcgagttcgaggccgataataaacagcatcagcaccaccccaatctcggcaaagtgcagaatagattcggcatcggtcaccagtcgcagcccccacgggccaataatgcagccggcgatcagattttgtctgaagccttacgaattgtctag

SEQ ID NO: 9221 - DNA, 1455 bp, Homo sapiens
  SIMILAR (1)..(615): 991254mologous to Escherichia coli matches PS00743: Beta- lactamases class B signature 1, and PS00225: Crystallins beta and gamma,accession number U00006,Smith-Waterman Score=1034.
atgggtaaacgttacgtgcaggcgctgggcggttctgcccgtgtcatcaacctggcgcaagaagcgaacaagcaaggtgattaccgctggtcggcagaactgctgaaacaggtgattgccgccaacccgggtgaccaggtcgcgaagaatctgcaagcgaataactttgaacagctgggctatcaggccgagtccgccacatggcgcggtttctacctgaccggcgcgaaagagctgcgcgaaggggtgcataagttcagccacggcaccaccggttccccggacaccattcgcgggatgtcggtcgaaatgctgttcgactttatggccgttcgcctcgatagcgcgaaagctgcgggtaaaaatatcagcctgaacttcaatatgagcaacggcgataacctcaacctgacgctgaacgatagcgtgcttaactaccggaaaacgctgcaaccgcaagccgacgcctctttctacatcagccgtgaagatctgcacgccgtgctgaccggacaagccaaaatggcggatctggtaaaagcgaagaaagccaaaattattggcaatggcgcgaaactggaagaaattatcgcctgtctggataatttcgatttgaatggtcatcaaatgacccacgttgcggataaacagcagcgagcgtccgtgcagagaaatttcagagccatcggcggcggtgtaatgacgatcgtcattcagtttacgcacgatttgccgaccgtttttctccattttctcttgcagagtcccctgcatcaggcccagcaggttgcggtacagcaggattttatcttccgcatcaaccgccgcgaccgaatcttcgcagtcgagaatggtactgatagcagcttcgacgataacatcgttgatgtgcgccggatcgtctttgccaatccgcccattggcatcgatttgcagctcaatatgcaggccgttatttttcagcaaaatgcaggtcggcgcagcggcatcgccacgcgagatagcgcggaaattgtcgtcaaactccaccacgccaaagcgttccgggtccatcacctgatagccaaaaaccgtcgccccttcggtgcgcgccgcaacatgacgcagcttcggactgaagccctgaccgaagaagatgttatcgcccagcaccagacaagaaggttcaccattaaggaaggtttcaccgatgataaaggcctgcgccagaccgtccgggctgggctgttcggcatattccagctggataccgaactcactaccatcgcccagcaggcgctggaaataacctttatcttccggcgtagtgatgatgagaatttcgcggataccggccagcatcagcaccgacagcggatagtaaatcattggcttatcgtaaatcggcaacagttgcttcgatacgccgcgcgtaatcggatgcaatcgggtgccggaaccgcccgcccaggataa

SEQ ID NO: 9222 - DNA, 506 bp, Homo sapiens
  SIMILAR (172)..(474): 1001254mologous to Escherichia coli UbiH (VisB),accession number D90281,Smith-Waterman Score=510.
atggtactgaccgtagagccagggctgtatattgcgccggatgcagaagtgccagaacaatatcgcggtatcggcattcgtattgaagacgacattgtgattaccgaaaccggtaacgaaaacctcaccgccagcgtggtgaaaaagccggaagaaatcgaagcgttgatgcaactggcgcgcatcggcgtctggcaatctctggcggattgcgcaactgccatcaccaccgtgcatgtcagcgatcgtggtcacgctggatttgtcaccctcgccgcagaagattaccaactggcggcgctgggacaggttgtcgaattgcacaatgtcgggcaacggctgtttgcattgctgcgtaaagcacctggcgtaacgctgcattgccctgatcgcgtggctaacgttgcccgtactcagagtcacgttgaagtgacgctggagagtggcgagacgctgacgggccgcgtgctggtagagctgatggcaccattcagcgttagcaccgc

SEQ ID NO: 9223 - DNA, 578 bp, Homo sapiens
  SIMILAR (349)..(387): 921254mologous to Homo sapiens p40,accession number U93564,Smith-Waterman Score=70.
aagagcaactcccagacacataattgtcagattcaccaaagttgaaatgaagaaaaaaatgttaagggcagccagagagaaaggtcgggttaccctcaaagggaagcccatcagactaacagcagatctctcggcagaaaccctacaagccagaagagagtgggggccaatattcaacattcttaaagaaaagaattttcaatccagaatttcatatccagccaaactaagcttcataagtgaaggagaaataaaatactttacagacaagcaaatgctgagagattttgtcaccaccaggcctgccctaaaagagctcctgaaggaagcgctaaacatgggaaagggaacaaccggtaccagccactgcaaaatcatgccaaattgtaaagaccatcgaggctaggaagaaactggcatcaactaacgagcaaaataaccagccaacatcataatgacaggatccaaattcacacataacaatattaactttaaatgtaaatggactaaatgctccatttaaaagacacggctggcaattggattaagagtcagacccatcgtgtgctgtattcgga

SEQ ID NO: 9224 - DNA, 4752 bp, Homo sapiens
  SIMILAR (3136)..(3885): 921254mologous to Escherichia coli No definition line found,accession number U00039,Smith-Waterman Score=1200.
atggctgcggttatcgaacaaattcgtcgcgcagtactggcgttagttacgggcgtggtccatccgggtgatattccggtggtgtgggatatcgtctggaacgcgacggctgcgtttatcgccgtcattatcatcagcctgctgctggatgagtccggcttttttgaatgggccgcgctgcacgtcttacgctgggggtatggtcctgggcgcttgccgtttaaccggattggcctgataagacgcattacgcgtcgcatcaggcaacggctgttattcggccttgttacctttattctgctgctcaatagaagccagaatcccgcgcaggatattcaactcctggctttccgggcgcgcacggggaaacagacggcgcaatttattcatcacctgccccggatggttttcacggataaaaccggttccagcaacggactagccccacagggtcagtgtagcgcgcaaggtgagctgatcctcaacgaaaaactggctaaacagctggtaactgccgcgaactgggtaaaaatgcagagtgacgaaggggaaatcaacccggttgatattctacgctggccgggcgtgatggcagcccaggagcaggatcttgacgccattgccgctgaaattctcgcggcgctggatggtacgctggacgactttattgtcgcgcgcgaaaccgaaggtcagtcagggctaaaacgcgtgtatcactcccccggtgcgccggatatccgcgagtttacgcgtgacgccatacccgataaagacgctcagggtggcgaggtgtatctcctttccggcccgacgatgatgatgccaggccacggtcacgggcatatggaacacagcaactggcggatgattaacttgccggttggcccgttggtggacggcaaaccgatttatacgctctacatcgcgctttcgatcgattttcatcttcattacataaatgacttgacgaataaactcattatgaccgcatcggtaatcagcatcctgatcgtctttatcgtactgttggcggtacataaaggtcacgcgccgatccgcagcgtcagcgctcaaatccagaacatcacctcgaaagatctcgacgtctcgctcgacccgcagaccgtgcccactgagctggaacagctggtactgtcgctcaaccacacgatcgagcgtactgaggatgctctcacccgccagcccaacctctcagcggatatcgctcacgaaattcgcacaccaatcacgaatctcacaacgcaaaccgaaatcgccctcagccagaatttgctgatcgcgggcaatcttacatgccgcatcgatagtcggcataaccgcattgcctgcaaggatcacgcaatcggcctgatacggcacctcaccggagaaatcatcctgcgccagccactgtccgataacatttatggcatctatagttgccggcgaaacgtcggaaacgggcatctgcgcacggtcgcaatgtggatcaaccgccagtttttcaagccgttttcaatcgcctgcaaatatcgcagcgtgtcgcacagccgtttgaagccgttaccagtggcaaaccgcgatataccacccgcgcactgcgctttaatgtcagaagcccagggcctggtgcattcacccgccccagagcaggttatcgccttgttgaataaatttgctgtttttccctcagactatatctctgattgcgctaatcatagctccggtaaatcctcggcgaagctaatatgggcggcggaattatcatggatgatctcgatatcaagcacagcttttcaaaacgggacaattgaagaagaactggcctggcattatataatgcttgctggccggtcatgcctgcaggtccgtttccatatggcagcctatcaaagcagaccggatgccaacgcggttgttcacaatcatgccgttcattgcacggcagtttccattcttaaccgatcgatccccgctattcactacatgattgcggcggctggcggtaattctattccttgcgcgccttatgcgacctttggaacacgcgaactttctgaacatgttgcgctggctctcaaaaatcgtaaggcaactttgttacaacatcatgggcttatcgcttgtgaggtgaatctggaaaaagcgttatggctggcgcatgaagttgaagtgctggcgcaactttacctgacgaccctggcgattacggacccggtgccagtgctgagcgatgaagagattgccgtagtgctggagaaattcaaaacctatgggttacgaattgaagaaatgattctgaacgaaacggcatggtttggtcggggtgctgttggggctttaaccgatgaggtgaaacgccgtggttatcagaaggcgctgatcgtcaccgataaaacgctggtgcaatgcggcgtggtggcgaaagtgaccgataagatggatgctgcagggctggcatgggcgatttacgacggcgtagtgcccaacccaacaattactgtcgtcaagaagggctcggtcaacacgccggaaacgcaaacgctgttccagtcgggatggtttgtggtgggcttactgtcgcaaacgctgattgtgcatatgatccgcacccgccgtgtgccgtttattcagagctgtgcatcgtggccgttaatgatcatgaccgtgatcgtgatgattgtcgggatcgcattgccgttttcaccgctggccagttatctgcaattacaggcgctgccgttaagctatttcccgtggctggttgcgattctggcaggacttaatccgggcatgatagcccgaatttccatcaagattagcgacgaacagcgatcgcttcgatctcaatcttcacgtctttcggcagacgggcaacttcaacgcaagaacgtgcccgggaagttggaattacaggaaaaacagggcatttcgtatatttatgttacccagcatatcggaatgatgaagcacattagcgaccaggtgctggtgatgcatcagggcgatggcggcacaacagcaaactcagcaagttcagcaaacccagaaaacggcagcggcacagagcgtatctctgaacaaggtttatatgcgatgcgtgacgtgcaggtagcgcgcctggctctgtttcatggcgatccagaaaaggcaaaagaactgaccaatgaagcttccgctttgctgtcagatgacatgaccggtctgaaagcgggtacgcccgttgttggcggcctgtttgatgtggtttccaccgcactctgcgccgggatcgaagacgaatttaccctcaatgcggtgatggggacctgggcggtgaccagcggcataacccgcggtttacgtgacggtgaagcgcatccgtatgtctatggtcgctacgttaacgatggtgaatttatcgttcacgaagccagccctacctcttccggcaacctcgaatggtttaccgcacagtggggagaaatctcgtttgatgagatcaatcaggccgttgccagcttgccgaaggctgggggcgatctctttttcctgccgttcctgtacggcagcaacgccggactcgagatgaccagtggtttctacgggatgcaggccattcacacccgcgcgcacctgttgcaggccatctatgaaggggtggtgttcagccatatgacccacctcaaccgaatgcgcgaacgttttactgatgttcacaccctacgcgtcactggcggcccggcgcactccgatgtctggatgcaaatgctggcggacgtcagcggtctgcgtatcgagctgccgcaggtggaagaaaccggctgctttggctgcccttgcgcccgcgtcggcaccggggtttatcacaacttcagcgaagcccaacgtgacttgcgacacccggccatgcctggggggtctccatctttattgatgacgatctgcgtagaaagctattccgatgtgctgtggtcggtgaaaacggaacaaggaccaggatacatctattgtctgattgaacatcaaagcacctcaaacaaactgatcgcatttcgcatgatgcgttacgctattgccgcaatgcaaaatcaccttgatgctggatacaaaacgttgccgatggtggtgccattgttgttttaccacggtattgaaagcccctatccctattcgctgtgttggctggattgtttcgccgatcccaaactggcaaggcagctttatgcctccgcatttccgctgattgatgtcaccgtcatgcctgatgatgaaatcatgcagcaccgacgtatggcgctgctggagttaattcaaaaacatattcgtcaacgcgacctgatggggctgacatcatgcgctttaccgggctgtcagaagaaagagtggctgcggcgagtcagtaaccccagttgtcacttcctaccacaagtctctacctcgtcgtacgacatagtctctacctcgtcgtacgacatagtctctacctcgtcgtacgacatagtctctacctcgtcgtacgacatagtctctacctcgtcgtacgacatagtctctacctcgtcgtacgacatagtctatacctcgtcgtacgacatagtctctactcagcccgcactctgggctcttagcggggtcgtctcgaatgcttggccgtccccagaggtgattgtggttggcgctggtgtggccgggctggtggccgccaaggtgctcagcgatgctggacacaagatcagggctggtcctatccgcctcacaggcttgccgtaa

SEQ ID NO: 9225 - DNA, 3568 bp, Homo sapiens
  SIMILAR (1730)..(2338): 991254mologous to Escherichia coli K12 membrane-spanning protein of hydrogenase 3 (part of FHL complex),accession number AE000356,Smith-Waterman Score=1022.
ttatctcccccgcagcatcttcaatggcggcaaggatgttagcgtatgaccacagcgacagatgttgccgctcatacgttcacggatctcatcggcagttgtttctgtgtttggaaaccaaatcgaccgtgacgtgagtgggaatgccgtcctgaatctcttttagcaccgctactgatgaacaaatttgcccggaggtgcagtaaccgcactggaagccatcatgcttgataaaggccgcctgcatggggtgaagattatctggcgaacccaggccttcaatggtggtgatctcggccccctgatgcatgactgcaagcgtcaggcaggcattaagcctgcgaccattgaccagcacggtacaggctccgcactgtccgtgatcgcaacctttcttggtaccgatcaaatgcagattttcacgcaaagtgtccagtagcgtggttcgggtatccacctcaagctgctcggttttgccgttcaccttcagtgtcaagggcattatctctggcgcgggtgtaactgccggaacgcttgccgccagcgtagaatgaggataaacccacggcgggcgccgctgttgcggcgctcagtgacggtgaagcgcatccgtatgtctatggtcgctacgttaacgatggtgaatttatcgttcacgaagccagccctacctcttccggcaacctgctggctggttattttgctcgttagttgatgcagtgtctttctagcctcgacggtttctacaatttggcatgattttgcagtggctggtaccggttgttttgcagaaaacccggcacgatcaggtaaaaccacagcaaaaccataaccgcctgcgccgccatatccaccagaccgatagtcgaggcgatggcggagtttttcaccaggttcatcatctctgaggtcatcggcgggacgcgatcgaactgagtagcgctgagtctctagagtcagcatcagcaccaccccaatctcggcaaagtgcagaatagattcggcatcggtcaccagtcgcagcccccacgggccaataatgcagccggcgatcaggtagccaagtaccgatcccagaccaagacgtaccgcaatgggtacaatcagcgctgccgaaccgagataaatcagcgcccgattgcatccgattacgcgcggcgtatcgaagcaactgttgccgatttacgataagccaatgatttactatccgctgtcggtgctgatgctggccggtatccgcgaaattctcatcatcactacgccggaagataaaggttatttccagcgcctgctgggcgatggtagtgagttcggtatccagctggaatatgccgaacagcccagcccggacggtctggcgcaggcctttatcatcggtgaaaccttccttaatggtgaaccttcttgtctggtgctgggcgataacatcttcttgggtcagggcttcagtccgaagctgcgtcatgttgcggcgcgcatcgaaggcatcggatttttggctatcaggtgatggatctactagggtaccggggatctctagagtctgctgtggcacgttacggcacgctggatctgcgcctgctggatatgcgtatgaacagctgccgctcggttccgatatctggctgctcggagtgattggctttggctgctggcggtgattattccgctgcacggcgtgggtgccgcacaatgcgaacgcctctgcgccactgccgcgttgttttcgctgtggtgggggatcgcgctgctggtgctcggcatgatcaccgcgtttgtcggtggtctgtatgcgctggtggagcacaacatccagcgcctgctggcttaccacaccctggaaaatatcggcatcatcctgctggggctgggcgctggcgtaacgggtatcgcgctcgaacaaccggcgctgattgctcttggcctggtcggtggtctgtaccatctgcttaaccatagcctgttcaaaagcgtactgttcctcggggcggggagcgtctggtctcgtaccggtcatcgcgatatcgaaaaactcggtggtattggcaagaaaatgccggttatctccatcgccatgttagtcgggctgatggcaatggctgcgctgccgccgctgaatggttttgccggggaatgggttatctatcaatcatttttcaaactgagcaatagtggcgcgtttgttgcccgtctgctggggccgctgctcgctgtggggctggcaattaccggtgcgctggcggtgatgtgtatggcgaaagtctatggcgtcacgttcctcggcgcgccgcgcaccaaagaagccgaaaacgccacctgtgcgccgctcctgatgagcagtattcagtatcgtcgaggtggtacgggtttccgggtcacctgctggcgctccagggtatttgccgatgtgttttgtgtcacgggcgacagcgattggcgcggcttaggcgtgattgattcttttggcgtgcacctgccgccggtttatcaccgtttggatgccgaagcacatttccgcccggcaccgcagcagattgacagcatgctagaaggtttcgctccacatatcaaacccatcaagtactgtatggtcaccgttatcatgaatggtgtaatgagcgaggaggatgatttcatattacggaatggcaccaataatgcagggggcgatttgcgggtagtaaagctcacggcaatggctgcacagcatcgcccatacggttttgatcggatacatttcatgcccacagtaaccacagtatttatgcgatcggtaaatatccgccagttgtacgccttgtctggacagttgaaacagcccaacatcacgatctatggcattacgcaccgaccccatatagtaaaaacgctgctgttgtacaaaccatacaggttccccctgccattcgccgatgtgtacaaccatcaacgcttcgatttcttccggctttttcaccacgctggcggtgaggttttcgttaccggtttcggtaatcacaatgtcgtcttcaatacgaatgccgataccgcgatattgttctggcacttatgcatccggcgcaatatacagccctggctctacgtggctaaggccatgcataaagaaaggacgatgggcgttctgagcgatcagttcatcaacatcacctttcaggatgccgagttttaccaggccgctaaccatgatgcgcaccacttcaccagtgacttccagaatggaagttcccggacgatacaggcgcaggctggtttcgagagactccagcacaatgtcgtagatttcacgctgggcctggatcatatgaatcagcccaccttccgggacccggtatcccgttcagcacagaaagaagagttaagcctcgaactgtgtaaccgcgatcgcgagcgtaagctgatcaaaaagatcgagaagacgctgaacaaagtggaagaggaagatttcgggtactgcgaatcctccggtgttgaaattggtattcgccgtctggaagcgcgccctacagccgatctgtgcatcgcctgcaaaccgctgcctgaaattcgcgaaaaacagatggctggctaa

SEQ ID NO: 9226 - DNA, 1097 bp, Homo sapiens
  SIMILAR (734)..(129): 871254mologous to Escherichia coli K12 putative GTP-binding protein,accession number AE000349,Smith-Waterman Score=889.
ttgcacaacaaatcgccaatgaaggcggcgtcgaagcctggatgattgcgcaacaacataaaagcctgctgcgttttctgacctgtggtagcgtcgatgacggcaaaagtactctgattggtcgtctgccttagtccccactgcaggcgaaccgacacggcacacacagaccacacgggctggaatagctcatgcagcaggcagattttgcggctgatattttgtttctgctctgtggaaaggatatttccaccgctggtggattcagctttgtctgactggctgataacaaacagcatcttatgccggtatgcttcgccaatcacctgacggtaaaaatgctcatcagtcgccagtgcccgatcatcagccttaatcagccacagaatcaggtcgagccggggaagttgttcgcggtacagcgcagataactcggtatcgcgaacgccactttcgcccacgccgggcagatccacgatggtcataaagtgttctccaatctgcaggcgaaagcgtaaaggatcacgtgtacaggccgctacatcgctgaccggcgatacttcaccggcaaacagggcattgcaaaggctactctttcccgccccagttttacccatgatgccgatcactggctcgtagtgggttaactgatttatctgatcatcgggagacaaaacagaggcttctaggtactcaggatgattacgtaaagtaaaagtcagtttgctcaggatatgtgtcggaacgtcctgctcatcaataattttggccgtatccagcatgatccggccatatttcatttccagcgtaacgaagcggttccactctggaccgttagcgcacaagaggtcaaaaaggatttcaccagtggtctcagacacggctcggtacgtggggatctctagagtcgtaatcacgcatggacactgccggaagaaagcagccgtcccataattaaacgtgcactggaaggcggcataaatttctttgataccgccaacagttattctgacggcagcagcgaagagatcgtcggtcgcgcactgcgggatttcgcccgtcgtgaagacgtggtcgttgcgaccaaagtgttccat

SEQ ID NO: 9227 - DNA, 595 bp, Homo sapiens
  SIMILAR (592)..(110): 1001254mologous to Escherichia coli K12 putative glucarate dehydratase,accession number AE000362,Smith-Waterman Score=834.
tttcggcggcgaacgggaaacttcctgcccatccactttccacgccccgggaagaaaccctggctcccgccacccacacggggttcttctggcattaagccaagcgaaaccctttcaggtatttaccgattttaatcgcttcgttcagcgaccaggcaccgttaggatcgagcgtaatacgcgcctgcgggaagcgttgcgccagtgccacaatagactcggcctcttcttccccggccagtacaccgcccttcagtttgaaatcgttgaagccatatttttcatatgccgcttccgccaggcgcaccaccgcatccggcgtcatcgcttcttcatgacgcaggcgataccagtcgcatgagtcatccggctggctttgatacggcagcggcgtggctttgcgattaccgacgaagaacagataaccgagcatttcgacttcgctacgctgttgaccatcgcccagcagcgatgccacgtttacccccagatgctgccccagcagatccagcattgccgcttctatcccggtaactacatgaatagtggtacgtaggtcaaatgtctgcaaaccgcgcccaccagcatcacgatg

SEQ ID NO: 9228 - DNA, 966 bp, Homo sapiens
  SIMILAR (870)..(4): 981254mologous to Escherichia coli K12 putative GTP-binding protein,accession number AE000349,Smith-Waterman Score=1453.
tcagaagaagaaatcccagacagcgcgggccactgacaccaccgaggaacgcacggcctgaataatggtccgcaccggggcgggaataaggggaaaggtgcttaccgtatcgagtatggcacctacggtttcaccgaaatcgtcacgtgcctgctcccgggctaccgttgttcgaaagggatgttgcagtagcgctactaccgggctgctggcctcacgcggcagacacttaatcatccgctctgccatcacccttagtccccactgcaggcgaaccgacacggcacacaccggatgcacgggctggaatagctcatgcagcaggcagattttgcggctgatattttgtttctgctctgtggaaaggatatttccaccgctggtgggttcagctttgtctgactggctgataacaaacagcatcttatgccggtatgcttcgccaatcacctgacggtaaaaatgctcatcagtcgccagtgcccgatcatcagccttaatcagccacagaatcaggtcgagccggggaagttgttcgcggtacagcgcagcatactcggtatcgcgaacgccactttcgcccacgccgggcagatccacgatggtcataaagtgttctccaatctgcaggcgaaagcgtaaaggatcacgtgtacaggccgctacatcgctgaccggcgatacttcaccggcaaacagggcattgcaaaggctactctttcccgccccagttttacccatgatgccgatcactggctcgtagtgggttaactgatttatctgctgcaatatacgttcagatacccatagcggtagaccggaaagggagttctgtagtggctgcagaacttcaaaatttttcatcaccactcctgatagtttactgagaatgatgatttccaatttcatccgtgtccctacaaaggacatgaactcatcattttttatggctgcatagtattccat

SEQ ID NO: 9229 - DNA, 2493 bp, Homo sapiens
  SIMILAR (7)..(516): 941254mologous to Escherichia coli similar to E. coli YjhG,accession number U70214,Smith-Waterman Score=829.
atgtgttcccacgcggcgggctgcacgatcccggacgttgagcactggacgcgcatcaaccgtaaagtgccgcgtctggtgagcgtgctgcccaacggcccggactatcacccgaccgtgcgcgccttcctcgcgggcggcgtgccggaggtgatgctccacctgcgcgacctcggcctgctgcatctggacgccatgaccgtgaccggccagacggtgggcgagaaccttgaatggcgtccggagccgggcgcgttccgccagtgcctgcgcgagcaggacggcgtagagccggatgacgtgatcctgccgccggagaaggcaaaagcgaaagggctgacctcgacggtctgcttcccgacgggcaacatcgcgccggaaggttcggtgatcaaggccacggcgatcgacccgtcggtggtgggcgaagatggcgtataccaccacaccggccgggtgcgggtgtttgtctcggaagcgcaggcgatcaaggcgatcaagcgggtagtgattgtcgcctgcggattcagcccgacgcgtacggcgcacgctgcctccgacatcgacatcaccaacaccgtcgatttgcgaaatcgtcggagccagctgcgtcgaggcgaaatcgtacagttcaccctgcgaataagtatcggacgtcagcgtgaggatcataattggcgcatccgacgggttcgctttgcgactaggtcgggcggctggacatcccactggcagcaaactttgtgcagcgttgatcgccgcctgcacatcacgcgctgcgccgttgatatcccggtccaaatcaaactgcgaaataacacccctgctgccgagagaacttccggaggtcatgtcactgactccgggcaatgcgcccaggtggagcgctccagcagcgtagcaacggaggacggcaattgcttctgtagacgaaccgggcaggaggcgctgacgatgcgcaccggaaagtcgacctgcgggcagcgggaagaccggcagcatacagaagcccaaagtggcgttcgcgataccgagtatcgtgcgctgtaccgcgaacaacttccccggctcgacctgattctgtggctgattaaggctgattatcgggcactggcgactgatgagcatttttaccgtcaggtgattggcgaagcataccggcataagatgctgtttgttatcagccagtcagacaaagctgaacccaccagcggtggaaatatcctttccacagagcagaaacaaaatatcagccgcaaaatctgcctgctgcatgagctattccagcccgtgcatccgtggggactaagggtgatggcagagcggatgattaagtgtctgccgcgtgaggccagcagcccggtagtagcgctactgcaacatccctttcgaacaacggtagcccgggagcaggcacgtgacgatttcggtgaaaccgtaggtgccatactcgatacggcgttacttttagaacagcaggacggcaaaactctcgcatcagtacagactctggacgaaagtcgcctgccggagggcgatgtcacggtcgatgttcactggtcgagcctgaactataaagatgcgctggcgattaccggcgataccagtcgcatgagtcatccggctggctttgatacggcagcggcgtggctttgcgattaccgacgaagaacagataaccgagcatttcgacatcctacgctgttgaccatcgcccagcagcgatgccacgtttacccccagatgctgccccagcagatccagcattgccgcttctatcccggtaactacatgaatagtggtaccatcacgatcggcaaaagtattacgcaccagcgtcagaacgtttttgtattcacccagcgttttacctaccaccagcggaatcgcatcttccagcgttttacggattttctcgccgccgggaatttcccctacgccagtgtgaccagaattatctttgataatcacaatattacgcgtaaagaacgaatcaatgacggccgaaaacgggacgtttacggtcaaaggtccagccggggatcaggtactgcatcggacctgcgtcgttacgcgcaccgccaggcagacgtttataggcctcatgtgccttttgtacctgttcccagtccagttccagcccagaccgggcgcatcaggaacggcaatttttccgtttttaatctccagcggattttgggtcagcgacaatcgccctcctgccaaatccagtgggtatcgatagcggtaggattacccggtgccgccgcgcccacatgggtaaacatcgccagagagatatcgaaatggttattagaatggcagccccaggtcagcccccagtcgtcgcaaagtgcgccacacggactgcaccggaaagcgtccagaagtgcggatcggactctagagatccccgagtaccgagctagaattcgagtaacagattgtgtcgccgacaaacttaaaaccacgttttttcagtgccttagatag

SEQ ID NO: 9230 - DNA, 3372 bp, Homo sapiens; identical to SEQ ID NO: 9201
  SIMILAR (811)..(1989): 981254mologous to Escherichia coli 46 KD MEMBRANE PROTEIN,accession number D90860,Smith-Waterman Score=1911.

SEQ ID NO: 9231 - DNA, 2367 bp, Homo sapiens; identical to SEQ ID NO: 9202
  SIMILAR (2334)..(1603): 971254mologous to Escherichia coli DNA polymerase III alpha chain,accession number U70214,Smith-Waterman Score=1231.

SEQ ID NO: 9232 - DNA, 2475 bp, Homo sapiens
  SIMILAR (2431)..(2327): 971254mologous to Escherichia coli Initiation factor IF2- alpha,accession number AJ002540,Smith-Waterman Score=174.
atgaatgcgttaagcaaagcgcgccagtatgtcgaagagtttgacggcaacatcgccagcttcatcttttctggtaagccaggaaccggcaaaaaccatctggcggcggcaatctgcaacgagctgctgctacgcgaacgaaatcttggagaatcagaaatccatacgaccagtgatcatatggtgacggcgacgctgccaggagagacgcaaacgtggccagaggattttcgggatgtcgaacagcgccagcaggttgtcatctttcagcaccttgtcggttgcgtgaaagtggacggtaaatacattcaggtatgtaccttcaccgttggcggcaactacggtgggacgtgtttgcgcggtgatgaatcactggtcatcaaaaaagagagtgatattgaaccgttaattgtggttaccgttgtccagcagttccatatcggcaatggttacgtggtgatcaccattaccccgagcgaaggcgaacgctatcagggcgtagttggtctggaaggccggataaggcgtacacgccgcatccggcataaacaaagcgcacgttgttacaatttacgttttaaacctacgtgcgcaataacccagactacgccaacagaagtcagtccagtcctaaagaagcaattagttctggtgccaaatccgcattacccaggcaataaaccgaacttcaaacgggtatcggtaaaaattattggtgaaagtgcctcccgtcgcctgcagctctcccgtggcgacattgacattgccgatgcgctgtccgatcgcttcgtcagtgaagcgattaccgccaaagttgaagcggcgattaagaactcaattcacatttgcgccgaacaccgggtgcaaggtatgatcgccagcgggctgttgatcttgttgttcggtggtcgggatggcttagtccgatgttccacggtatggcgttaccatcgtattacgccattcgccatacgaggcatatcccgtcactacgccgttttcctcgctcaccagcactggataacctgctatagtccgcgcttcgaaccaggcaatgcggttatcagcagccaccgtttggtcattccagatagccgccaatatcaacaggcggtgaataagatggctcatcgctcatacgtccacgcatatacgggtccagggacaaataaactgtgcgcagtaacacctgtccttcacccggtgtggcgacatcatcttcttcaagacggaaattctccggaacaggatggagtccacttctcggtggacgaaaaatctcgccaggtgaacctgaccgaacgtggtctggtgctgattgaagaactgctggtgaaagagggcatcatggatgaaggggagtctctgtactctccggccaacatcatgctgatgcaccacttgtgtgagcaaccagtccagctcgtgatctttcgccatcagcggatcgccgccggagaaaatcatctcgtccagttccggatgcgcagcaacatactcaagtgcagtttgccagttacgcttgttgccctgattttcggcataggggaagtgacgacggaagcaatagcggcaatttaccgcgcagccgcctttgaccagcaaaagcgcccggttgtggtatttatgcaacaaaccagacactacgctgtgctgttcttccagtgggtcggtggagaatccgggcgcgatgacaaactcatcttgcgaggtcaacgtgaacagcccttccaggatggcgttggacgccgcagccagtgtggcgtcggtttcggtgataccacctacgccagaaccgatgatcttcactttaacttcgtcagtagacagtttcagcaaggagtcggagatcgcttcgacagaaccctgtacgtctgccttcaggacgatattcacttcgtgaacttcgccttcggtcatgttggcgaacatgttctcgagtttagatttctgctgacgcgccagtttaacttcgcggaatttaccctgacgatagagtgcaacttcacgcgctttcttctcgtcacgtacaacggtaacttcatcacccgcagccggtacgccggacaggccgaggatttccaccggaatggacggacccgcttccagcacttcctgacccagttcgttacgcatcgcacgaacacgaccgtattcgaagccacacagaacgatatcgcccttgtgcagagtaccttcacgtaccagaacggtagcaaccggaccacgacctttatcgaggaaggattcgataaccgcaccgctcgccatacctttacgtaccgctttcagctccagaacttccgcctgcagcaggatagcgtccaagcagttcatcgataccggtacccgctttcgcagatacgtgtacgaactggctttcaccgccccactcttccggcaggatgccgtactgggagagttaattcttattttgtaatagaggatacgtggaagcaagttaaatgtcagtag

SEQ ID NO: 9233 - DNA, 3039 bp, Homo sapiens; identical to SEQ ID NO: 9204
  SIMILAR (1041)..(1958): 771254mologous to Escherichia coli Initiation factor IF2- alpha,accession number AJ002542,Smith-Waterman Score=1124.

SEQ ID NO: 9234 - DNA, 951 bp, Homo sapiens
  SIMILAR (1)..(387): 791254mologous to Escherichia coli GLY1 protein,accession number D90724,Smith-Waterman Score=483.
  misc_feature (1)...(951): n = a,t,c or g
atcacgcaatattgtgattcgttcaccatttgcctgtcgaaaggtcttgggacgccagtcggttcattactcgtcggtaatcgtgattacattaaacgtgccattcgctggcggaaaatgacaggtggcgggatgcgccagtccggcattctggctgccgccgggatatatgccctgaaaaataacgttgcgcgcttgcaggaagaccacgacaacgctgcctggatggcggagcagcctgcgtgaaacaggccgcggaatgtgatgcgtcaggacaccaatatgcttgtttgttcgcgtcggggaagaaaatgctgccgcgttaggcgaaattacatgaaagccgaagaaacgtgctgatttaacgcctcgccgattgtccgcctggagagagacgtgccgcaacgcattttagttctcggtgccagtggctacattggtcagcatctggtgcgcacactcagccagcaagggcatcagatcctggcggcggcacgtcatgtcgacaggcttgcaaagctgcaactggcaaacgtcagttgccataaagtcgatctcagctggccggataacctaccggccctgttgcaggatatcgatacggtctattttctggtgcacagcatgggcgaagcggcgatttatcgctcaagcgccggggttgcttctgtttcatctgtgttccgctactgtcttcgtccttcctatgatcctcgtgtctttccttgttttctctgctgtcgtgcgctgctcgttcttccctgccgtttgatctattcgcctttgtcgttcgctctcgtgctctcgctcgctcccatcaaanagatatttattattcgttttgatatcgtcgaccacccgcccacgatcgctggctgccgcctgaaaagagtaaaagttcacctgcacccagcccagactgctggtgctgttcactattacttgtgttaa

SEQ ID NO: 9235 - DNA, 5421 bp, Homo sapiens
  SIMILAR (3880)..(4452): 811254mologous to Escherichia coli Pyruvate-flavodoxin oxidoreductase (EC 1.-.-.-),accession number D90775,Smith-Waterman Score=773.
ttattgcgaagccgcatccggtttacgcaatgccagtggattgagctttatcccttcgtaataactcacccatgaagaatatctctccggggaattccagacacggaaatgcagacgggccatcgtcaccggatcgcttagcagcaccaggcgacgatcgcgattcagcttctctggcgtctcgttcagcgcctgttcaacgtggcggtcacgggcgatttccagcaccttactggcgcggtgacgcgcggtcgccattgcggttgccagagcgttaaatgacgggttaaacactgcgtgcataaagccatcatcaagggagcgttgacgattcatctcaaggaaccgatcggtatcaaccagcacctgcggcggcgaatactcttccgggatcaggaacagtttccagcgtctggtgcgcagaacaacggtggccggctgggaatcaccgaaacaacggtgaccggatccacgagaagacatcggtgccggcagacatgaacgcagatccagcagcatccaaagccaaataacccggagtggtccatacgcgggtaatccacctccgcagaagctgaacaaccgtgcccttttcgaccacagaaaactcccagaaatacgcaaggatttgctgagaaagtactggacccgacaggtaatacgagacaggaagtgaccccctgtactggccagaaatatattcaggatcagcacccggaagtgaaaactgtctcttatgacagttatcagaatgcctttatcgatctgaaaaatggtcgtattgatggggtatttggtgacacagcggtggtaaacgaatggctgaaaaccaatccacaacttggtgttgctactgagaaagtgaccgatccgcaatattttggcaccggcctgggcatcgctgtacgtccggataacaaagccctgctggaaaaactgaataacgcgcgactttgctggagattgctgctttggctccccatgtacagataatatcactcctcgctctcgggtgtcttctccttcgtcctcgtatcggctttgcctcgtctcctcacctgggtggcgattgaagctggcatcgatggtgacagcactttcagttgggtggtgattgaaaacgccagccagcgcggcgaggcgcgttcggctactttgccgttgcctgcggtgattctcttccagccactggcgcagctcgacgggcgcggctttcaggctgttagatccacgcgtaatcgtcgcgatgcctgcgccgagttcattttttaactcacgctggctcatttcgccgcgcaacagctcttcgacaatacgcacgcgagtccccaacgcttcgcgctcatctggcgtcagcatcaggtttaacaacggtaaatggagatcgtataggtaggcattcttaagcaggtcgacaaaaagtaacttggtgctgaagttcgcaatacgcttgtacttgatacgcttcggctccagcgcgtctgcgcccagcgtgcgtttcttgtactcttcgtactcggtaaagttaccttcgaagaactcaactttaccttcatcctggtaatccagaatgtgcgtggcgatacggtcgaggaaccaacggtcgtgcgagataaccatcgcacagcccgggaactccagcagggcgttttccagcgcgcgcagggtttcgatatccaggtcgttggttggttcgtcgagcagcagcatgttgccgccaacctgcagcagcttcgccagatgcagacgaccgcgctcaccaccggagagttcaccaacgcgtttaccctgatcaacccctttaaagttaaagcggccaacgtaggcgcggcttggcatctcggtgttgccgatcttcatgatatccagcccgccggaaacttcttcccaaacggttttgctgttatccattgagtcacggaactgatcaaccgacgccagtttcaccgtttcacccaaagtgatggtgccgctgtccggctgttcctgagcagagatcatacggaacagggtcgatttaccctgcacgatcggaccgattgatccgaagatcgctctaacagggatcagtttagaagcgaacacaggctcaatgagacatacgggcatctgctgggagctgttaaaagttttcctcactcttcctgctcctacaagagaaggtccgtgaggacaaagggggcctctcttggcgttcactatcacctgttgtacggattggcaacgtccagtgcattctacagcaggtgcttcgtagatgtttgctgaatgagtgtccaaatcaacatgcccgtgttctccccaaggaccccagcccccagggcaggccacagctgactcaactcctgcccttagcacgtggtggggtaaggcagctgcatgcattttggaattggcggaattggcgtctgtcatatgacggcgtagtactatgccactgagaaatgccggttcactttcttcgaatcggctttcaatgtgtatttcacacaaattaatcaacttccccttccgaggatctggcgcaaaatcaaacttaaactggtggctgatgaaggcaatataaatgcccaacgcgttctgaatatgcaggaaaatcccggcatgttctttaccgtggtccaaatcggtctgaacgcagtggcgattctcggcggtatcgtcggtgatgcggcattttctccagcttttcaactgttgcggatgcgggtaacgccttatcggcctacggatggtgcgggaatttgtaggcctgataagacgcgcaagcgtcgcatcaggcagttggcactgttgccggatgcggcgtaaacgccttatccggccaaaaccgtcgattttgcaatcgatgttatggtcgccttcaaccaggcggatgtttttcactttggtgccaattttcagcatcgaagagctacctttcaccttcagatctttaatgatggtaacgctgtcgccgtcagccagcagattgccgttagcatctttaacgatcagctcgtcgctttcctgtgcaggttctgcgtcgttccattcgtaggcacattccgggcagatgtacatgccgttatcttcgtaggtgtattcggagttgcattttgggccgtgtggtaatgacttgtggatttcccgtactagccggtccgacgcagcatgcggacacggtgttgatcgaccgtcaggcggaaacaagccaaattcggcattatcttcaaatagagagttcgcccatgccggcccacgaccgttggcatcggtggtatacggtgtagagggcaggttaccgccataaattgaagaacagccagtggcgttagcgatcaacatccggtcgccatagagctgagtcagtaatttaatatacggcgtctcgccacaaccggagcaagcacctgaatattcaaacagcggtgtaatcagctgcgatgtacgaatatcaatacgttccagtttgctacggtcgatttctggcaggttgaggaagaaatcgtaattgattttctcttcttcgacatgttccaggcgagacatcatattgatggctttaatctctggattctgacggtctttcgccgggcaaacttcgacgcacaggttacaaccggtgcaatcttccggtgccacctgcaagacatatttctgcccgcgcatatcacgcgatttcacatccagcgaatgcaggctggcaggggcgttttccatcgcttcaggcggcaccacttttgcgcgaatagctgagtgtgggcaagcggcaacgcagtggttacattgggtacagagttcctctttccagatggggatctcttcggcgatatggcgtttttcccagcgcgtagtggccatcgggccagttgccgtgctttcccgaactcggggggttcggaccccgggggcattgggcggggggtccgggggcgggcttcttagggttcgccgaccagcttcgtgtctccctatctggctgccgacttgatgacgcaatggagcactccggatgttgaaaacccgtttgtcctgcatgtagcggcacgtaccgttgccacacatgcactctctatttttggcgatcattccgacgttatggcggtgcgccagacgggttgcgcgatgttgtgtgcagcaaacgtccaggaagcgcaagactttgctctcatttcgcaaatcgcgacgctgaaaagccgcgtgccatttattcatttctttgatggtttccgcacgtcccacgaaatcaataaaattgtcccgctggccgatgacacgattcttgatctcatgccgcaggtcgaaattgatgctcatcgcgcccgggcactcaacccggaacatccggtgatccgcggtacgtccgccaatcctgacacttatttccagtctcgcgaagccaccaacccatggtacaacgcggtctatgaccatgttgaacaggcgatgaatgatttctatggcgcaagttacgattcgctttgtctgttggtgcaggtggaaagtaaaacggcactggataacctggacgaaatcctcgacgtcgaagggattgatggcgtgtttattggacctgcggatctttctgcgtcgttgggctacccggataacgccgggcacccggaagtgcagcgaattattgaaaccagtattcggcggatccgtgctgcgggtaaagcggctggttttctggctgtggctcctgatatggcgcagcaatgcctggcgtggggagcgaactttgtcgctgttggcgttgacacgatgctctacagcgatgccctggtcacgatcaaagccctgttccagcatgcgcaaagcaattttaatggcttgttcatgcaaaccttctaatttaccttcctgccagccaatttgatgtccttcctgccgcagccgttcagcaatagtcattaatctctccttcctggcaggcaatttgatgcctttctgtcggtaccgttcagcaatatcataatctctcctttgtgtggtgacggtcggcactctgaggcagaggttgagctgtgaatggttgtcactgtcatatctttctatttgattttcttgagatatcagcagcaacactgtgggacctctctccacctgagctcgagaagtacgaaagagacacaggcctggagattgatccgcgtgatgaggtggctcctggtgtgttactgtgccggttaacttttcgtacgttcgtggtttgtttttatcgccttgtttgttgttctcctttgctgggtaacgagctaagcgcagatctctgtgttcgttctttttgagtctctcgtttgtttctccgcgtgtcttctgtgtgtttgtgccttcttggttgtttgcgcctcggtcctctgtgttttttgtgctcctgttaagccctggcaagtgtgctgaggctcttactcggcactcccctgcaactttcaccat

SEQ ID NO: 9236 - DNA, 1210 bp, Homo sapiens
  SIMILAR (609)..(238): 891254mologous to Escherichia coli K12 putative transport protein,accession number AE000493,Smith-Waterman Score=558.
ttacgccaccatggtaatttctgtgcagaaggaacgggcgaacaaagacgtgtacttgccgcacgtcaggcccatgcaaatgcccatggacaaaccgaggttaaattgacctatgttgccgtcgggaataccgggtccgggaaaggggaagcaatgggtgggccagtgtcgggggggctcctgggtcctgtgtttctcatccggatctctccacttctcatccggcgctccataggtggccactcgatgttctcggtctccgtcgcctagcttgtcgccgtctttgtcattgagggtgatgatccccaccaccagcgcgtactcgttcatgatcaccgcgaagtcttcacctgcggttttaaaactttccaacgcctctgaaagggttaacgtatccggcacaatcagcgtgttgcgaatttgtacgccgctgttcagtgccaggctttggttagccagcacgcggttcagcaggtctttagaatcgacataaccgatgatgtggtcaatatcttcattacagacgaggaacttagagtgcggatgttccgccaccttattcttcaggctttgctcatcttcgtggagatcaaaccaaatgacgttttcactgcggtgacattgattacggaacgggacgggattccagctcaaagacgttttcaatcagctcgtgttcctgtttacgtaacacgcccgccagcgcaccggcttccactaccgcgtagatgtcatcagaagtgatgtcatctttacgtaccattggcagtttgaaaatacggaagattatgttcgccaggccgttgaagaaccacaccagcggggtgcaaacgtacaggcagaagcgcatcgggttgatgatacgcaaagccacagcttctggcgcaatcataccgatgcgtttcggggttaaatccgcaaacaggataaacatgccagtcactaacgagaaagagagaataaagctcagttgctcagagagctctgccgacatatagcgggagaacaggctgtgaaaagctggagaaaatgccgcatcaccgacgataccgccgagaatcgccactgcgttcagaccgatttggaccacggtaaagaacatgccgggattttcctgcatattcagaacgcgttgggcatttatattgccttcatcagccagcagtttaagtttgattttgcgtgaggcggcaagcgagatctcggacat

SEQ ID NO: 9237 - DNA, 951 bp, Homo sapiens
  SIMILAR (1)..(315): 981254mologous to Escherichia coli K12 putative transport protein,accession number AE000493,Smith-Waterman Score=500.
atgtccgagatctcgcttgccgcctcacgcaaaatcaaacttaaactgctggctgatgaaggcaatataaatgcccaacgcgttctgaatatgcaggaaaatcccggcatgttctttaccgtggtccaaatcggtctgaacgcagtggcgattctcggcggtatcgtcggtgatgcggcattttctccagcttttcacagcctgttctcccgctatatgtcggcagagctctctgagcaactgagctttattctctctttctcgttagtgaccggcctgtttatcctgtttgcggatttaaccccgaaaagcatcgtttggccccgctgtgtgttgttcacggcggggaacaatttcggtttaacagacagcgaagtaagaaaaaccactgtgaaaaaccgaggaaagacgaccccggaggtgtttatgaaaagcacgataaattggccccgtcgctacacaacccaagccttcgggagcagctttggggctgacaccactctctcaaaggaactaaaggattcgggagccaagaagaaatctttgcaggagacagacaaacactggcagtggctgacttggagaaccctggaaattttcaccatgaaaggttcccggcgcccaagaagccccagtgattcctgcaccgaatccaagagcgaccacgcaggagagagcgggcgagtgactagtggattaatgaatatgcgactggggatagcagacacaaaagtgctgggtcatgcaaccgggtacggtcatcgatgtgtgactaacgacactgacatggaaatgacgcgcaagtggatatgccgcggcatatgtgagctcaggcgcattggcatgccaaacgccagcgccgtgtcttgccggcggccctacgtattgactgtggccaaactacccccatttgccccgattatagcgcatcgttactgcctgactggctaa

SEQ ID NO: 9238 - DNA, 666 bp, Homo sapiens
  SIMILAR (381)..(638): 421254mologous to Ovis aries bactinecin 11,accession number U77049,Smith-Waterman Score=133.
atgcattcactccaatgcttggcccatccttctcaaacctggggaaggaacagccaatcacatcagttcctgctgacaaatcccctggctccaccccctgctgacagtgtacaagattcccccaagagctcagttgtcagagcctcatccacctgccgctggccacagccccgtcgctacacaacccaagccttcgggagcagctttggggctgacaccactctctcaaaggaactaaaggattcgggagccaagaagaaatctttgcaggagacagacaaacactggcagtggctgacttggagaaccctggaaattttcaccatgaaaggttcccggcgcccaagaagccccagtgattcctgcaccgaatccaagagcgaccacgcaggagagagcggccccgccccggaaatggaggtctccacccctgtaactggtctctgctcagtcatccccgctctagaagccttataccatccgccccgagaactgggccccacccacagccccgaccctggaactggtctctgcccaatcagcctcgccctccaggcctggtacggcctcagccggttccccgccttcagccccgacccggaactgatctccgcccacaaccagccccgaacccacaacaccaacaaccggaataacaaaccatag

SEQ ID NO: 9239 - DNA, 1677 bp, Homo sapiens
  SIMILAR (1677)..(1138): 761254mologous to Homo sapiens putative p150,accession number U93563,Smith-Waterman Score=709.
tcatatcctttgcccactttttgatggggttgtttttttcatgtaaatttgtttaagttctttaaagattctggatattagccttttgtgagatgggtagattgcaaaatttttctcccattctgtaggttgcctgttcactctgatggtagtttcttttgctgtgcagaagctcttttgtttaattagatcccatttgtcaattttggcttttgttgccattgcttttggtgctttagtcttgaagtccttgcccatgcctatgtcctgaatggtattgcctaggttttcttctagggcttttatggttttaggtctatcatttaagtctttaatccatcttgaattaatttttgtataaggcgtaaggaagggatccagtttcagctttctacatatggctagccagttttcccagcaccatttattaaatagggaatcctttccccatttcttgtttttgtcaggtttgtcaaggatcagatggttgtagatgtgtggtgtcatttctgaggcctctgttctgttcccttggtctatatctctgttttggtaccagtaccatgctgttttggttgctgtagtcttgtagtatagtttgaagtgaggtagcgtgatgcctccagctttgttctttttgcttaggattgtcttggttatgtgggctcttttttggttccatatgaactttaaagtagttttttccaattctgtgaagaaaatcattggcagcttgatgggaatggcattgaatctgtaaattatcttgggcagtatggccattttcacgatattgattcttcccatccatgagcagggaatgttcttccatttgtttgtgacctcctttattttgttgagcagtggtttgtagttctccttgaagaggtccttcacatcccttgtaagttgcattcctaggtattttattctctttgtagcaattgtgaatgggagttcactcgtgatttggctctctgtttttctgttatttgtgtataggaatgcttgtgatttttgcacactgattttgtatcctgagactttgctgaagttgcttatcagcttaaggagattttgggctgagacgttggggttttctaaatatacaatcatgtcatctgcaaacagggataatttgacttcctcttttcctaattgaataccctttatttctttctcttgcctgattgccctggccagaatttccaacactctacacactgctttaaatgtgtcccagagatgctggtacattgtgtctttgttctcattggtttcaaagaacatctttatttctgccttcattttgttatttacccagtagtcattcaggagcaggttgttcagtttccatgtagttgtgtggttttgagggagtttcttaatcctgagttctaatttgattgcactgtggtctgagagacagtttgctgtgatttctgttcttttacatttggtgaggagtgctttacttccaactatgtggtcaatttcggaataagtgcgatgtggtgctgagaagaatgtatattctgttgatttggggtggagggttctgtagatgtctattaggtctgcttggtgcagagctgagttcaagtcctggatatccttgttaaccttctgtcttgttgatctgtctaatattgacagtagggtgttaaagtctcccat

SEQ ID NO: 9240 - DNA, 529 bp, Homo sapiens
  SIMILAR (432)..(37): 901254mologous to Homo sapiens unknown protein,accession number M22334,Smith-Waterman Score=611.
ttagctatgcaggttctcttttgtttccatatgaactttaaagtagttttcttccaattctgtgaagaaagtcatcggtagcttgatagggatggcactgaatttataaattaccttgggcagtatggccattttcacgatattgattcttcctatccatgagcatggaatgttcttccatttgtttgtgccttcttttgtttccttgagcagtggtttgtagttctccttgaagaggtctttcacatcccttgtaagttggattcctaggtattttattctctttgtagcaattgcgaatgggagttcacgcatgatttggctctctgtttgtctgttattggtgcataggaatgcttgtgatttttgcacattgattttgtatcctgagactttgctgaagttgcttatcagcttaaggagattttgggctacttcattgagagttttttgcatgaagcactgttgaattttatcgaaggccttttctgcatctattgagataaccatgtggtttttgtcattggtt

SEQ ID NO: 9241 - DNA, 477 bp, Homo sapiens
  SIMILAR (414)..(476): 901254mologous to Homo sapiens putative p150,accession number U93569,Smith-Waterman Score=95.
aaatacaaacaaccatcagagaataaacacctctacgcaaataaactagaaaacctagaagaaatggataaattccttgacacatacaccctcccaagactaaaccaggaagaagttgaatccctgaatagaccaataacacgctctgaaattgaggcaataactaatagcttaccaaccaaaaaagtccaggaccagatggattcacagccgaattctaccagagtgttggaagttctggccagggcaatcaggcaggagaaggaaataaagggtattcagttagtaaaagaggaagtcaaattgtccctgtttgcagatgacatgattgtttatctagaaaaccccatcgtctcagcccaaaatctccttaagctgataggcaacttcagcaaagtctcaggatacaaaatcatgtgcaaaaatcacaagcattcttatacaccaataacagacaaacagagagccaaatcatga

SEQ ID NO: 9242 - DNA, 507 bp, Homo sapiens
  SIMILAR (231)..(10): 901254mologous to Homo sapiens NAG13,accession number AF194537,Smith-Waterman Score=331.
tcatgatttgtctctttgtctattattggtgtataggagtgcttgtgatttttgcacattgattttgtatcctgagactttgctgaagttgcttatcagcttaaggagattttgggctgagacaatagggttttctaaatatacaatcatgtcatctgcagacatggacaatttgacttcctcttttccgatttgaatacccttaatttctttctcttgcctgattgcctggccagaacttccaaaactatgtcgaatataagtggtgagagagggcatccttgtcttgtgctgcttttcagaaggaatgcttccagttttttcccattcagtatgatattggctttggtagaattcagctgtgaatccgtctggtcctgggctttttttggttggtagggtattaattattgcctctatttcaaaacttgctattggtctattcagggatttgacttcttcctggtttagtctggaaagggtgtatgcatccaggaatttatccat

SEQ ID NO: 9243 - DNA, 3141 bp, Homo sapiens
  SIMILAR (58)..(834): 831254mologous to Escherichia coli K12 putative peptidase,accession number AE000339,Smith-Waterman Score=1138.
atgctcctggggcttcactcacttgccgccttcctgcaacgcgaatcatttagcggcaaacaatcctggggctgccaactggcggcccttttacaaagaaggataactaaaatgacagaagcgatgaagattaccctctctacccaacctgccgacgcgcgctggggagaaaaagcaacttacagcattaataatgacggcattaccctgcatttgaacggggcagacgatctggggctgatccagcgtgcggcgcgcaagattgacggtctgggcatcaagcatgttcagttaagcggtgaaggctgggatgcggatcgctgctgggcattctggcaaggttacaaagccccgaaaggcacgcgtaaagtggtgtggccggatctggacgatgcccagcgccaggaactggataaccgcctgatgatcatcgactgggtgcgtgacaccatcaacgcaccggcagaagaattgggaccatcgcaactggcacagcgtgctgttgatctgatcagcaacgtcgcgggcgatcgtgtgacttatcggatcaccaaaggcgaagatctgcgtgagcaaggttatatggggctgcacacagtcggacgcggttcagaacgttctccggtattgctggcgctggattacaaccccactggcgataaagaagcgccagtgtacgcgtgcctgctgggcgatatcatcacctatcgcaacggtaaaaaagttgaagtgatgaacactgatgccgaagggcgtctggtgcttgccgatggtctgagtgattaccgcgcggagaggggatccactaggggcacgcgcttaacgttggcttgccacgcattacttgactgtaaaactctcactcttaccgaacttggccgtaacctgccaaccaaagcgagaacaaaacataacatcaaacgaatcgaccgattgttaggtaatcgtcacctccacaaagagcgactcgctgtataccgttggcatgctagctttatctgttcgggcaatacgatgcccattgtacttgttgactggtctgatatccgtgagcaaaaacggcttatggtattgcgagcttcagtcgcactacacggtcgttctgttactctttatgagaaagcgttcccgctttcagagcaatgttcaaagaaagctcatgaccaatttctagccgaccttgcgagcattctaccgagtaacaccacaccgctcattgtcagtgatgctggctttaaagtgccatggtataaatccgttgagaagctgggttggtactggttaagtcgaccagttcataataccgtctgccgccttacgaccttcggcaatagcggtcaccaccagatcggaaccacggacgatatcgccgccagcaaagattttcgggttgctggtctggaaggcgttgtcgctgcttccggggcgatgatgcggcttgtgaatccagctcgacgctgtgttttgccagcccattccaatgttttgtggacggaaaccaacgccatgatcaccgcatctgccggaacgatatgttcggaacctgcaacgatgctccgcgcggcgacggcctttggcgtccggttcgcccatttcggtacgcaccatttttacgccgctgactttgccgttaccgttcacttcaatacccagcggctggacgttgaatttgaactctacgccttcttcccgcgcgtttttcacttcgcggcgggaacccggcatgttctcttcatcacgacgataggcacaggtaacgtgcttcgctcctggcgcacggacgtacgcacgcagtccatcgcagtgtcgccaccgccaaggaccaccacgcgtttgccttccatgctgacgaacgcacccgtggccttctctgaactgggcatttctgacgatcacagcggcattatcgaactgcctgcggatgcgccgattggcaccgatatccgtgaatacctgaaacttgatgacaacaccatcgaaatcagcgtgacgccaaaccgtgccgactgcttaggcatcattggtgttgcgcgtgacgttgccgtgctgaaccagctgccgctggttcaaccggaaatcgttccggttggtgcgaccatcgacgacacgctgccgattacagtcgaagcgccggaagcctgcccgcgttatcttggccgtgcctatgcctattggtcaatggaattagaagacatgattagtacagatgacgcctatgtcacggggaatgcagatcccatttctgcacaagtctcagttagtgtcactgtcgttaatcataaaagatacgaactacgttcgacacagtgccgaagtcgcttcagcacgtattcagtatcaccatctttagaagattataaccgtcgagtgccgttagcgaagcacgggggttatttcaaagaaacgctggagcataccaaagatacgttaataagtagccaagcggcattgaatgccgctatccaggcttataaagcgaataaagctttagtaatgaacacaccattaaaccgtcagccacaagtcgttgaagcggcggatgcaactaaagaagcctggttggcgcttaaacgtacggatattaagagtccggttaccggctatattgcccagagaagtgttcaggtcggcgaaacaaaacactactcacggatgtacggattgtcaatcgtcctatatagcaggggggatccactagttctacacgccggcactgacgaagtgatcatgtctccgcagcaagcaaaagcgcgcggattaacctcaactatcaccttcccggtgggcaatattgcgccagaaggttcggtgatcaaatccaccgccattgacccctcgatgattgatgagcaaggtatctattaccataaaggtgtggcgaaggtttatctgtccgagaaaagtgcgatttacgatatcaaacatgacaagatcaaggcgggcgatattctggtcattattggcgttggaccttcaggtacagggatggaagaaacctaccaggttaccagtgccctgaagcatctgtcatacggtaagcatgtttcgttaatcaccgatgcacgtttctcgggcgtttctactggcgcgtgcatcggccatgtggggccagaagcgctggccggaggcccccatcggtaa

SEQ ID NO: 9244 - DNA, 983 bp, Homo sapiens
  SIMILAR (897)..(944): 1001254mologous to Escherichia coli K12 putative inner membrane component for iron transport,accession number AE000162,Smith-Waterman Score=87.
atggtgcgcgccagcggctatctgcaaacgctcgacgactttaatcacatcgttttaaaagccagtgaaaatggcgtgcccgtttatctgcgcgatgttgcgaaggtccagattggcccggagatgcgccggggcattgccgaactaaacggcgaaggcgaagtggcgggcggggtggtgatcctgcgatccggcaaaaacgcccgagaagtgatcgccgccgtgaaggacaaactggaaacgctgaaaagtagtctgccggaaggcgtggagatagttacaacatacgatcgcagccagctcattgaccgcgccatcgacaacctcagcggcaagttgctggaagagtttatagtggtggcggtagtctgtgcgctgtttctctggcatgtgcgctcggcgctggtggcgattatttcgttgccgctgggcttgtgtattgcttttattgtcatgcacttccagggactgaatgccaatattatgtcgttgggtggcattgcgattgccgtcggggcgatggtcgatgctgctatcgtcatgatcgagaatgcgcataaacggctggaagagtggcagcaccagcatcctgacgccacgctggataataaaacgcgctggcagggcaggaagggcgtctgtttggcccgttggcgttgcaccaaaacgtatgcgatggcgggtgcggcgctgctggcgatcgtagtgatcccgatcctgatgggctactggatccgtggcaaaattccgccggaaagcagtaacccgctcaatcgctttttgattcgtgtttatcatccgctgttgctgaaagtactgcactggccgaaaaccacgctgctggtggcggcgctttcggtgctgacggttctctggccgctcaataaagttcgcccggggaatttttaccgcagatcaatgaaggcgacttgttgtatatgccatgcgacgctgctcaaggaattccgcagcagaggcggcga

SEQ ID NO: 9245 - DNA, 660 bp, Homo sapiens
  SIMILAR (462)..(16): 891254mologous to Homo sapiens NAG13,accession number AF194537,Smith-Waterman Score=660.
tcactcatgatttggctctctgttattggtgtataagaatgcttgtgatttttgcacattgattttgtatcctgagactttgctgaagttgcttatcagcttaaggagattttgggctgagatgatggggttttctaaatatacaatcatgtcatctgcaaacagaggcaatttgacttcctctcttcctgtttgaatacgctttatttctttctcttgcgtgattgccctggccagaacttccaatactatgttgaataggagtggtgagagagggtgtccttgtcttgtgctggttttcaaagggaatgcttccagcttttgcccattcagcatgatattggctgtgggtttgtcataaatagctcttataattttgagatatgttttatcaatacctagtttcttaagagtttttagcatgaagggctgttgaattttatcgaaggacttttgtgcatctctgagcttttcagttatacgagccgatgaagtctctttttgcttaagcctctttggattggatttactgcctactgggaaaccatgcttctcccatgggtctttgcaatcagcatatccagagatcccctcataagctgtgtggagtcccagcagagcagccagtcggccacacacagagacccaggagttttgcat

SEQ ID NO: 9246 - DNA, 726 bp, Homo sapiens
  SIMILAR (254)..(355): 821254mologous to Homo sapiens putative p150,accession number U93563,Smith-Waterman Score=128.
atgagatttaaggaaagaagctatctctataacataaaagtgcaaggcgaagcagccaatgttgatgtagaagcatcagcaagttatccaaaaggtctagaaattgctgcagctaccacagccttcagcaaccaccagccttatcagtcagcagccatcaacaatgaggcaaggttctccaccagcaaaaaagatgacagcttgctaaagacacagatgattgttagcatttttagcagtaaagtgtttttcaaattaagtgttggaagttctagccagggcaatcaggcaggagaaagaaataaattgtattcgattaggaaaagaggaaatcaaattgtccctgtttgcagagacatgattgcatatttagaaaaccccatcatctcagcccaaaatctccttaagctgataagcaacttcagcaaagtctcaggatacaaaatcaatgtgcaaaaatcacaagcattcctatacaccaataatagacaaacagagagccaaatcatgagtgaactcccattcacaattgctacaaagagaataaaatacctaggaatccaacttagaagggatgtgaaggacctcttcaaggagaacaacaaaccactgctcaatgaaataaaagaggacacaaacaaatggaagaacattccatgttcatggataggaagaatcaatattgtgaaaatggccatactgcccaagataatttatagattctaa

SEQ ID NO: 9247 - DNA, 882 bp, Homo sapiens
  SIMILAR (1)..(456): 1001254mologous to Escherichia coli K12 putative capsule anchoring protein,accession number AE000156,Smith-Waterman Score= 808.
atgctaaaaaccgacgcccgtcagaatttgcgcctgtgggtgctggaagacgaaagccggatgatcggttcgaatcacctgccggaatgcctgcgcgagcgaatgactcaggcggcgattgcggtggtagaagatccgtttgagatccgtcttgagcgcctgaacgaagagtatttcttgcgtatgcatcatgattttacccacgcgtacggcgacgaacagggctggcaggagtattgcgaatacctgcatcacggactttcggcgattaagcgtcggctggggctacagcgctataacgaactggctgcaaggctggatgcagcactgacaacgcaactcaccaccggcagcaccgacggtcatctggcctggctggtgccgttacttgaagaatattacgacccgatgtatcgctatcagcttgagaaaaaagcggaaaaagttgtctttcgcgaggtaactctcatgcttcatactgccaatcccgtcatcaaacacaaagccggtttgctcaatctggctgaagaactcagcaacgtatcaaaagcctgtaaaatcatgggcgtttcgcgtgatacgttttatcgttaccgcgaactggtcgctgaaggcggtgtggatgcgcagattaatcgtagtcgccgcgctcctaaccttaagaaccgtaccgatgaggcaactgaacaggctgttgttgattacgccgtcgctttcccgacacatgaatctcaaaagacgatactgaacaaattttatcaggtgacgttccgtaaaaagttgtatggagttctcgatgcagtcggcgcgactatcagtacccccgctgaacctggactatcggccgccgtactggggcatgggtaccgagctcgattgtaa

SEQ ID NO: 9248 - DNA, 822 bp, Homo sapiens
  SIMILAR (322)..(693): 961254mologous to Homo sapiens putative p150,accession number U93572,Smith-Waterman Score=592.
atggcttatcactttcatgtgcggaaaaacaaaggtctgagcctttccggcattattgctgctattaccggcgttcgcccgcaaggcccatggggaaaactggtcgatttgatgttcctgatcgccactgtcggcgcaacgcggcgagcgacagtgggaaaggatggaggaggagaggatggcgactgcagaatgatgaccatgcgactgccctggatgaaaattgccctgcaacaagtgcctgcacatctgctggaaactggatgtgctgcttcgacttcgcagaacacccttgcttcgatcgtgggactggggcctgaattgctggaagttctggccagggcaattagacaggagaaggaaataaagggtgttcaactaggaaaagagaaagtcaaattgtctctgtttgcagatgacatgattgtatatctagaaaaccccatcgtctcagcccaaaatctccttaagctgataagcaacttcagcaaagtctcaggatacaaaatcaatgtgcaaaaatcacaagcattcttatacaccaataacagacaaacagagagccaaatcatgagtgaactcccattcacaattgcttcaaagagaataaaatacctaggaatccaacttacaagggacgtgaaggacctcttcaaggagaactacaaaccactgctcaatgaaataaaagagggcgtgtttatgagcgtctttgacctaatggaaaatatcaacatagatgagaaagtgggttggctccatgtctatgctatagagtaccttgctgctgacattaatattgatgctctcgtatctctatag

SEQ ID NO: 9249 - DNA, 1653 bp, Homo sapiens
  SIMILAR (415)..(864): 941254mologous to Homo sapiens putative p150,accession number U93563,Smith-Waterman Score=721.
atgcctgactgcacatcaaagtgtcgatccctgaagcatgctttggatgtcctttctgtggtaacaaaggggagcgaaaaccagattaaggcctttctctccagtcattgttacaatgctgcaactatcaaggatgtttttggcaggaatgccctccaccttgtttcctcctgtggaaagaaaggagtgttagattggcttattcagaaaggagtggatctgttggtgaaagacaaagagtctggatggacagcattgcacagaagcattttttatggacatattgattgtgtttggtctctattgaaggaaagaagcagacaccgagggagaattttaaagacttcaaagagcccgagtggactaccacatccctgtagctggcagtcctatagctggcggtcctacttgtccatattggaagttatgtccagggcaatcaggaaagagaaagaaataaagggtattcaattaggaaaagaggaagtcaaattgtccctgtttgcagatgacatgattgtatatttagaaaaccccatcgtctcagcccaaaatctccttaagctgataagcaacttcagcaaagtctcaggatacaaaatcaacgtgcaaaaatcacaagcattcctatacaccaataggaaacaaacagagagccaaatcatgagtgaactcccattcacaattgcttcaaagagaataaaatacctaggaatccaacttacaagggatgtgaaggacctcttcaaggagaactacaaaccattgctccaggaaataaaagaggatacaaacaaatggaagaacattccatgctcatgggtaggaagaatcaatatcgtgaaaatagccatagtgcccaagcagccttgtgacactgttgtgtgtatcccagccatttcaggtccagctgtgactaaaaagggccaaagtacagttcagatgatgaaagctgtgaattttgaaggctttcatgtggtgttaagcctgcaggtgaacaaattgcaagagaggaggcttgggagcctccaaccaggattcagaggaggctctctgcaagaagaaaaatatggctctattgtgcctgaccctgcaggcagtcagaccttatggttgtcttcccttgttcccaaaaattgctgttattctgttcattttcaaggtgcactgatttcatattgttcaaacacccatgttttacaatcaatttgtacaatagtggtcctgagttgtgacatgcacccattactggaactggcatgcactgacacctactttataggcctcactgttgttgtcaatagtggagcaatctgtatggtcattttcaaccttctgttaatctcctatggagtcatcctaagctcccttaaaacttacagtcaggaaaagaggggtaaagccttgtctacctgcagctccggcagtaccgttgttgtcctcttttttgtaccctgtattttcatatatgttagacctgtttcaaactttcctactgataagttcatgactgtgttttataccattatcacacacatgctgagtcctttaatatatacgttgagaaattcagagatgagaaatgctatagaaaaactcttgggtaaaaagttaactatatttattataggaggagtgtccgtcctcatgtag

SEQ ID NO: 9250 - DNA, 1353 bp, Homo sapiens
  SIMILAR (879)..(568): 631254mologous to Escherichia coli chlE protein,accession number M21151,Smith-Waterman Score=266.
ctctcattacccttgtcagacttcatcagggcctttgaacacactgttctctctccctggaataagtcactccttggccatttcttctcctggcaaaggggatcctctagctggaaatcaagacgtcctggcgtttttttcaggcgggacgctgtgcgtacgcgctggcgcgcgggcaggccgctggcggtgttaccgcttagttttgccagcaaaggctgtaccagttgatagaaggtcagcgtcgctgaaaccgggttgcccggcaggccgcagaaccagctattgctgagtttaccgaacgcgaacggtttacctggtttaatcgccagcttccagaaggcgatctcccccagctcttcaagaatcgttttggtgtaatccgcctcacccactgaaacaccgccggaactgatcaccacatccgcctggctgtcggcttcaataaatgcggcgcgcagggcatggggatcgtcgcggataatccctaagttaattacctcgcatcccaactgttctaacatcaggtgtacggcgagacggttggtatcgtagatttggccgtcggcccagcggctgaccgggcaactggagttcatcaccggtagaaaaaagcgctacacgcactttacgaatcaccggaacttcggcaatccccagtgaagcaattactggcagctctgcggtagtcaggcgagttcccgccgggaaaacaaccgcaccgacggagataaagtccacgcccgtttcggcaaattcacgcagtgttttgtcagtgacgttgccagacacttccagtagcgccttgccgttggtgcgtttgacggcttcgcgcatctgttctgtttcgaagttatccagcatgatgatatcggctcctgctttcagggcttcatcaagttcttccagattctctacttcgacttctactggcgcatccgggtgcagccaggacgctttttcgaccgcctggcgcactgagccggaggcaataatatggttttctttgatcaggaaggcatcagaaagccccagacggtgattcgctccgccgccgcaaagtaccgcgtatttcagagctgaacgcaggccgggtaaggttttgcgcgtatccaacaactgcgtgttggtgccttccagcaattcgacatagtggcgtaccttactggcaactcctgaaagggtttgcacaaaattaagcgcagtgcgttcgcccgttaacagcacgcgggatgggccttcaagttcgaacaaggattgattggcattgatgacatcgccgtcatccacatgccagattatggtggggtaatccgcattccagacaatgtatggccttatcgcatgccccat

SEQ ID NO: 9251 - DNA, 3447 bp, Homo sapiens
  SIMILAR (2788)..(3444): 961254mologous to Escherichia coli lipoic acid synthetase,accession number M82805,Smith-Waterman Score=1115.
atggtggactgttttatctcgttgcaaattgccggtggcggcgatgatctgcagggcattaaaaaagggctgatggaagtggctgatctgatcgttatcaacaaagacgatggcgataaccataccaatgtcgccattgcccggcatatgtacgagagtgccctgcatattctgcgacgtcaatacgacgaatggcagccacgggttctgacttgtagcgcactggacaaacgtggaatcgatgagatctggcacgccatcatcgacttcaaaaccgcgctaactgccagtggtcgtttacaacaagtgcggcaacaacaatcggtggaatggctgcgtaagcagaccgaagaagaagtactgaatcacctgttcgcgaatgaagatttcgatcgctattaccgccagacgcttttagcgcttactgccgatcttatgacgggtaagcgacctcaaccggcggcaaatccgaggccatctgccgccccgaagtggtccaagtctccccaggggatcttcaccgatcctcagtcatatattacttacgcgaccgcgctggcttatcgtggcgaaaaagcacgcctccagcattatctcattgaaaataagccactatttaccacggacgcacaagagaaaagttggctctatctgttatctaaatacagcgctaaccccgttcaggcgttggcgaattatacggtacagtttgccgacaaccgccagtatgttgttggcgcgacgctaccggtgctgttaaaagaaggtcagtacgacgcagcgcaaaaactgctcgccaccctccccgccaatgaaatgcttgaggagcgttatgctgtcagcgtggcgacccgtaacaaggctgaagctctgcgtctggcacgattgctgtatcagcaagaaccggcaaatcttacccgcctggatcaactaacctggcaactgatgcagaacgagcagtcacgcgaagctgccgatttattgctgcaacgctatcctttccagggcgatgcgcgtgtcagccagactttaatggcgcgactggcgtctctgctggaaagtcatccttacctggcaacgccggcgaaggtggcgattttatcgaaacccttaccgctggcggagcaaccggaatatatggtgcgcgccagcggctatctgcaaacgctcgacgactttaatcacatcgttttaaaagccagtgaaaatggcgtgcccgtttatctgcgcgatgttgcgaaggtccagattggcccggagatgcgccggggcattgccgaactaaacggcgaaggcgaagtggcgggcggggtggtgatcctgcgatccggcaaaaacgcccgagaagtgatcgccgccgtgaaggacaaactggaaacgctgaaaagtagtctgccggaaggcgtggagatagttacaacatacgatcgcagccagctcattgaccgcgccatcgacaacctcagcggcaagttgctggaagagtttattgtggtggcggtagtctgtgcgctgtttctctggcatgtgcgctcggcgctggtggcgattatttcgttgccgctggggttgtgtattgcttttattgtcatgcacttccagggactgaatgccaatattatgtcgttgggtggcattgcgattgccgtcggggcgatggtcgatgctgctatcgtcatgatcgagaatgcgcataaacggctggaagagtggcagcaccagcatcctgacgccacgctggataataaaacgcgctggcaggtgctgaaagccggtttggctgccctgacgttgtcaggaatgtcgcaagccatcgccaaagacgaacttttaaaaaccagcaacggacacagcaagccgaaagccaaaaaatctggcggcaaacgtgtcgttgttctcgatccaggtcacggcggaattgataccggagcgatcggacgcaacggttcgaaagaaaaacatgtggtgctggcgattgctaaaaacgtccgttccattttgcgtaatcatgggattgatgcgcgtttaacgcgttctggcgatacgtttatcccactttacgatcgcgttgaaatcgcccataaacatggcgcagatctgtttatgtcaattcatgccgatggctttaccaacccgaaagctgccggtgcttcggtatttgccctctctaaccgtggggcaagtagcgcaatggcgaaatacctgtctgaacgcgaaaaccgcgccgatgaagttgccggtaaaaaggcgactgacaaggatcacctattgcaacaagtgctgtttgatctggccgccgggcccggaaaacctaatcggagctggtggcgcgtcatctgcgcgaacacaagtacagaagatgattatcgccaccgcactcgcgaacgtgcccaaattctggcagatgaagtcggcgcggaagtgattgccctgagtgatatcgacgaacgtctgcgcgaagccgatatcatcatcagttccaccgccagcccgttaccgattatcgggaaaggcatggtggagcgcgcattaaaaagccgtcgcaaccaaccaatgctgttgtcagacgattacccgcataaccccaacactgaggacttaagccaattctcttatacggtgagaaataacgattattcgcttgtctatacagtagaaaacaatcagttaggtctctacaaactgacggatctacagcaaaaagataaccttgccgccgccaatccgcaggtcgttaaagagatgcaaggcgtggtaagagagtttatcgacagcagccagccaccgcttagcgagggtcgcccgttagctccggaggccaaggaaccagtgaaactggcgcagaccatggccgatatggcgctgcgttatgtggttatcacctccgttgaccgtgatgacctgcgcgatggcggtgcccagcactttgcggattgcattactgccattcgggaaaaaagcccgcaaatcaaaattgaaactctggtgccggatttccgcggtcgtatggatcgtgctctggatattctgactgcaacgccaccagatgtgttcaaccataacctggaaaacgtaccgcgtatttaccgtcaggtacggcctggtgcagattacaactggtcgctgaagctgctggaacgctttaaagaagcgcatccggaaatcccgaccaagtctggtctgatggtgggactgggtgaaaccaatgaagaaattattgaggtaatgcgcgacctgcgccgtcatggtgtgacgatgttaacgctggggcaatatttgcagccaagccgccatcacctgccggttcaacgttacgttagcccggatgagttcgacgaaatgaaagccgaagcgctggcgatgggctttacccatgctgcatgcggtccgtttgtccgctcttcttaccacgccgatttgcaggcgaaagggatggaagttaagtaa

SEQ ID NO: 9252 - DNA, 933 bp, Homo sapiens
  SIMILAR (630)..(130): 861254mologous to Homo sapiens putative p150,accession number U93572,Smith-Waterman Score=698.
cttgtttccaatggcctttttgggtgggaagttgtaggccctcacttgagggtacttgttttgtaacttgtggtgcaaactcctgaactctgtataccggcgataaatattccattcatcgtcttttatccggatgtagaccttgggcagtatggccgttttcatgatactgattcttcctacccatgaggatggaatgttcttccatttgatggaatgttcctcttttatttcattgagcagttgtttgtagttctccttgaagaggtccttcacatcccttgtaagttggattcctaggtattttattctctttgaagcaattgtgaatgggagttcactcatgatttggctctctgtctgtctgttattggtgtataagaatgcttgtgatttttgcacattgattttgtatcctgagactttgctgaagttgcttatcagcttaaggagattttgggctgagacgatggggttttctagatatacaatcatgtcatctgcaaacagggacaatttgacttcctcttttcctaattgaataccctttatttccttctcctgcctgattgccctggccagaacttccaacacataagcttcctgagaacatggactattcttatttgttaaagaatcatatttaagagcatatatatgcttttggggtttatatcttaactctgccactacctgaagtgtgaacttagcgagattattttttgtttgcttcagtttccgctcttctccagttgcccatttgtctactgcctgagaatcaaagaattcagttggcagatcaaccacagactgtagactttgtcttaggactggctcaatttccatgaagtcctctagagctgagatggctgaaacagacgtgtatccccttttattcctgagcttagtggaaaagttttccatttttaccat

SEQ ID NO: 9253 - DNA, 2153 bp, Homo sapiens
  SIMILAR (1317)..(898): 981254mologous to Escherichia coli K12 putative asparaginase,accession number AE000185,Smith-Waterman Score=680.
tcacctcatcacatggatgcattccggctccttggtgaagctgtaggcatagccactggatgtggtcccaaagtcgacggccaccaccacgagaaatgactgctgttctgagacgttggagtcagtgtcgttgtggaccgcctggatcaggagcctcatcagacccttctccatgcacatccttcccaaacagtcacagattccattgaaaggagcagattctatcagttcttctgtgcagactttaagagctgaacgttctggttctggaagccatgtgactgcgcagaacaacctaagaaaccctttgtgtcctgaggggtcgttgacctctccttccgggtcggagcagtcactccacaggacagggcccaggcagggttttaccgacagtgcttgtattaagaaagctgtctccgccccaacaacccgaatgttttgcacggcttgggtgtacattgcccgggacccgtgcctccagtccacacagatgcagttcaccttctccacttcaaacattttcttgcacatgtccgatggccagctgtcctccgccttgtctaagaagccatggatgatgaagcgtgtcttgcggtccagttggaagtttgaagcctcaatggtgtctggttccgtgccagtgattagtggggcatgtctgcacagttgtgttcttcctggtagcaagcccatggtcacagtatttgccttgagggctggggcccggggtggcgaaagcaccaggatgttgctctcctgggctgtgtcttcctgtctggctctcaattttactggaatgatgccaccacccccatccctttccctgacattggctcggcccagggcagttttaaaaggaagaatgacttcttttggctgctgcgggctgtgtgtgctgcgcgctgccagtagttgttcataacgcaaagacgtggagaaaatctccggcgagacgcgctccatgccacgagcaaacgcaaaattttctgccccttcgccaatcatcatcacatgcgggctttgctccatcaccagccgggcggcaagaaccggattacgcagatgactaacgcccgccaccgcaccggctttcagggtgttaccatccatcacacaggcgtccagttcatgggtttcatcacgcgtaaagacagcgccaattccggcgttaaacagtggacactcttccagcagacgcaccgcttccgtcaccacatccagcgcactttcgcccgcttccagcattttctgcccggtttcaacaatggcagacaacgcctcgatgtagcgtaattcctgttgcagactctctgcgcgcggctaattgcacctgcgccaccatgaattgcaatgactgcttgcccatagtattcgtccattaagggtggttcgccacttttgcaccggattgatgtcgctcgacaccgccttaatgagatgctttctcgcgtcaccccactgaccgcccaggaaacgcgccactggtacagtgttttggtcgtattctggcgagcgatgtcgtttcgcgcttgatgttccggggtttgataactccgcaatggacggctacgcggtcgtttagccgatattgcctccgggcaaccgctgcccgttgccggtaaatctttgccggtcagccataccatggtgaatggcctgcattgtattatgaccggtgcgccggtgccggaaggctgcgaagcggtggtgatcaggagcagactgaacaaatggacaatggcgtgcgttttactgctgaaggcgtagcgggcaaaatattcgccgtcgcggtgaagatatctctggggggcggttgttctccccgcggaactcgcctgataccgcagagctgccagtatgcttatggggatggcgaaatccgtgatcgtaagggtgtaagcttttacggaaggaccaatgccgcagacactttgcgtcttgacagctacaccttgcccctgactattaccactgtctgttgaccacccttgatctgttgcccactgcattggcactataaccttgacacatcgtggacaacactggctgctgtggtaggacgacggtgcctgtgatatttgcagtacatcttgggtgctggcatcctctccctgacatatccaatctgacacaaaattgaacattcctggcat

SEQ ID NO: 9254 - DNA, 2677 bp, Homo sapiens
  SIMILAR (1183)..(1842): 991254mologous to Escherichia coli K12 putative dehydratase,accession number AE000500,Smith-Waterman Score=1113.
atgaccaggcttgtagggggcccagccttccagcttctcacgctctttcgcgatgaccgcttccggtgcgcgggcgacaaagccttcgttcgccagtttgttctcgatacggctgatttcaccttcaatcttcgccacttctttcgccagacgcgccagctcatcttctttgttgatgaggccagccatcgggatcagaagctctgcaccgtcgatgatcttcggaccggaaaccggacctttgttatccggcaggcatgcacggtgattcttttcctgacgcccccgcgctttgccggaagccaccgcgttctcattaacaccaccgctctgcataccgcgctggatccacgcagtatcagcttccagcgttttgccccggccgaagttcttcctagacgcgcgttacgtaccgcgctgatcgccacctacggccgtgatcgtgatcctggccggccgttgtggttggggtcggtcaagtcgaacatcggtcatacgcaagcggcggcgggtgtggctggtgtgatcaagatggtgatggcgatgcggcacgggcagctgccacgcacgttgcacgtggaatcgccgtcgccggaggtggattggtcggcggggacggttcaactccttacggagaacacgccctggcccaggagtggtcgtgttcgtcgggtgggggtgtcgtcgttcgggatcagtggtactaacgcgcacgtcatcctcgaacagcccccgggagtgccgagtcagtctgcggggccgggaacggaagattctggtttcggggtgcatccggcactgctggacgcggctctgcacgcaacggctgtccgagacatggatgacgcacgcttgccgttccagtgggaaggtgtgtccctgcacgccaaggccgcgccggctttgcgggtccgcgtggtcccggctggtgacgatgccaagtccctggctggttgtgatgggaccggtcgaccgtgctccggcaaccgcgccgccggagctgacgccacagaatattccttcccgcaccgccagttcgcgcatggtgttttccgcatcgcgctgatgaatatccagcacctcatccaccagagaagcgttgaaaatccccggcagatattccgtaggccagcggcgaatgccgggaatgctgctgccctcttccggttgcaggccgacaatggtacaacggggatgtttgattcgctaccataccgaaatgacgcatcgatggtaatgcgccgccttattcgctctctgcccgacgcgaaagcagttattggtgtggcgagttgcgataaggggcttccggccaccatgatggcactcgccgcgcagcacaacatcgcaaccgtgctggtccccggcggcgcgacgctgcccgcaaaggatggagaagacaacggcaaggtgcaaaccattggcgcacgcttcgccaatggcgaattatctctacaggacgcacgccgtgcgggctgtaaagcctgtgcctcttccggcggcggctgtcaatttttgggcactgccgggacatctcaggtggtggccgaaggattgggactggcaatcccacattcagccctggccccttccggtgagcctgtgtggcgggagatcgccagagcttccgcgcgagctgcgctgaacctgagtcaaaaaggcatcaccacccgggaaattctcaccgataaagcgatagagaatgcgatgacggtccatgccgcgttcggtggttcaacaaacctgctgttacacattccggcaattgctcaccaggcaggttgccatatcccgaccgttgatgactggatccgcatcaacaagcgcgtgcccccgactgttgagcggactgcctaatggcccggtttatcatccaacggtcaatgcctttatggcaggtggtgtgccggaagtcatgttgcatctgcgcagcctcggattgttgcatgaagacgttatgacggttaccggcagcacgctgaaagaaaacctcgactggtgggagcactccgaacggcgtcagcggttcaagcaactcctgctcgatcaggaacaaatcaacgctgacgaagtgatcatgtctccgcagcaagcaaaagcgcgcggattaacctcaactatcaccttcccggtgggcaatattgcgccagaaggttcggtgatcaaatccaccgccattgacccctcgatgattgatgagcaaggtatctattaccataaaggtgtggcgaaggtttatctgtccgagaaaagtgcgatttacgatatcaaacatgacaagatcaaggcgggcgatattctggtcattattggcgttggaccttcaggtacagggatggaagaaacctaccaggttaccagtgccctgaagcatctgtcatacggtaagcatgtttcgttaatcaccgatgcacgtttctcgggcgtttctactggcgcgtgcatcggccatgtggggccagaagcgctggccggaggccccatcggtaaattacgcaccggggatttaattgaaattaaaattgattgtcgcgagcttcacggagaagtcaataggttggcgctgctgccgcgtgtgtcgggaggtgggcgcggctgggcgtggcgcgctgccgtgcgtgtggaggctgggggcgtcgcgcacgtcgtggtgcgttttctcgtgtgctccacgtga

SEQ ID NO: 9255 - DNA, 993 bp, Homo sapiens
  SIMILAR (654)..(4): 871254mologous to Homo sapiens putative p150,accession number U93563,Smith-Waterman Score=965.
tcatgctgttttggttaccgtaggcttgtagtgtagtttgaagtcaggtagcatgatgccttcagctttgttctttttgcttaggattgtcttgacaatgcaggctcttttttggttccatatgaactttaaagtagttttttccaattctgtgaagaaattcattggtagcttgatggggatggcattgaatctataaattaccttcggcagtagggccattttcacaagattgatccttcctatccataagcatggaatgttcttccatttgtttgtgtcctctttcatttcattgagcagtggtttgtagttcttcttgaagaggtccttcacatcccttgtaagttgtattcctaggtatgttattctctttgtagcaattgtgaatgggagttcactcatgatttgtctctctgattgtctgttactggtgtataggaatgcttgtgacttttgcacactgattttgcatcctgagactttgctgaagttgcttatcagcttaaggagattttgggctgagacgatggggttttctaaatatacaatcatgtcatctgcaaacagagacaatttgacttcctctttttctacttgaataccctttatttctttctcttgcccgattgccatggcctgaacttccaatattcttttcattctgagtctattaatcctgtcagtcttcaactgccttccatagccgtcataggaaagcccaaattcatcagcatggcatctagggtcgctccacagtttgacactagtctggactgacatttcccaaagtctcttccttatgtaagtcttcacgcccacccccagaagcgtagccaacaatcttccatagacttcttcatgatactcactttcagtaggcagcagccgcacacgttgttgggggtcggggacgtggtaattcctcaaggccttcatgttctgggggtccggctgcgggctcagaggaggcaatgcatggctgccagccat

SEQ ID NO: 9256 - DNA, 2681 bp, Homo sapiens; identical to SEQ ID NO: 9191
  SIMILAR (345)..(1277): 941254mologous to Escherichia coli K12 putative dehydratase,accession number AE000500,Smith-Waterman Score=1488.

SEQ ID NO: 9257 - DNA, 3253 bp, Homo sapiens
  SIMILAR (2053)..(2988): 791254mologous to Homo sapiens putative p150,accession number U93564,Smith-Waterman Score=1317.
atgaacattgatgcagaaatcctcgataaaatactggcaaaccgaatccagcaggacatcaaaaagcttatccaccatgatcaagtgggcttcatccctgggatgcaaggctggttcaatatatgcaaatcaataaacgtaatccagcatataaacagaaccaacgacgaaaaccacatgactatctcaatagatgcagaaaaggcctttgacaaaattcaacaacgcttcatgctaaaaactctcaataaattagtgttggaagttctggccagggcaatcaggcaggagaaggaaataaagggtattcaattaggcaaagaggaagtcaaattgtccctgtttgcggatgacatgattgtatatctagaaaaccccatcgtctcagcccaaaatctccttaagctgataagcaacttcagcaaagtctcaggatacaaaatcagtgtgcaaaaatcacaagcattcttatacaccaacaacagacaaacagagagccaaatcatgagtaaactcccattcacaattgcttcaaagcaaataaaatacctaggaatccaacttacaagggatgtgaaggacctcttcaaggagaactacaaaccactgctcaatgaaataaaagaggatacaaacaaatggaagaacattccatgctcatgggtaggaagaatcaatatcatgaaaatggccatactgcccaaggaacgcagctcctcaccagcaacggaacaaagctggatggagaatgactttgatgagttgagagaagaaggcttcagacgatcaaacttctccgagctaaaggagaaagttcgaacccatcacaaacaagataaaaaccttgaaaaaaggagctggttttttgaaaagatcaacaaaatcgatagacctctagcaagactaataaagaagaaaagagagaagagtcaaataaacgcaataaaaaacgataaaggggatatcactgccgatcccacagaaatacaaactaccatcacagaatactataaacacctctatgcaaataaactagaaaatctagaagcaatggataaattccttgacacatacaccctcccaagaataaaccaggaagaagttgaatctctgaataggccaataacaggctctgaaactgaggcaataattaatagcttaccaaccaaaaaaagtccaggaccagatggattaacagctgaattctaccagaggtacaaggaggagctggtaccattccttctgaaactattccaatcaatagaaaaagagcgaatcctcccgaactcattttatgagggcatcatcctcctgataccaaagcctggcagagacaacacaaaaaaagataattttaaaccaatatccctgatgaacatggatgcaaaaatcctcaataaaatactggcaaaccgaatccagcagcacatcaaaaagcttatccaccatgatcaagtgggcttcatccctgggatgcaaggctggtttcaacatatgcaaatcaatgaaagtaatccatcacgtaaacagaaccaatgacaaaaaccacatggattttctcaatagatgcagaaaaggcctttgacaaaattcaacaacccttcatgctaaaaaaactctcaataaattaggtattgatgggacgtatctcaaaataataagagatatctatgacaaacccacagccaatatcctactgaatggacaaaaactggaagcattccctttgaaaactggcacaagacagggatgtcctctctcaccactcctattcaacatagtgttggaagttctagccagggcaatcaaggcaagagaaagaaacaatgggtattcgaataagaagagagaaagtcaaattgtctctgtttgcagatgacatggttgtatatttagaaaacccaatcgtctcagcccaaaatctccttaagctgataagcaacttcagcaaagtctcaggatataaaatcagtgtgcaaaaatcacaagcattcctatacaccaataacagacaaacagagagccaaatcatgagtgaactcccattcagaattgctacaaaagacaataaaatacctaggaatccaatttacaagggatgtgaaggacctcttccaggagaactacaaaccactgttcaacgaaataaaagaggacacaaacaaatggaagaacattccatgctcatggataagaagaatcaatatccatgaaaatggccatactgccccaggtaatttatagattcaatgccatccccatcaagctaccaatgactttcttcacagaattggaaaacaaactactttaaagttcatatggaaccaaaaaagagcccgcattgccaagtcaatcctaagccaaaagaacaaagctggaggcatcacgctacctgacttcaaactatactacaaggctacagtaaccaaaacagcatggtactggtaccaaaacagagatatagaccaatggaacagaacagagccctcagaaataataccacacatctacaaccatctcgtctttgacaaacctgacaaaaacaagaaatggggaaaggactccctatttaataaatggtcctgggaaaactggctagccataggtagaaagctgaaactggatcccttccttacaccttatacaaaaattaattcaagatggattaaagacttaaatgttagacctaaaaccataaaaatcctagaagaaaacctaggtaataccattcaggacataggcatgggcaaggacttcacgactaaaacaccaaaagcaatggcaaccaaagccaaaattgacaaatgggatctaattaaactaaagagcttctgcacagcaaaagaaaccaccatcagagtgaacaggcaacctacagaatgggaggaaatttttacaatctacccatctgacaaagggctaatatccagaatctacaaagagctcaaacaaatttacaagaaaaaaaacaaacaatcccatcagaaagtgggcgaaggacatgaacagacacttctcaaaagaagacatttatgcagccaacagacacgtgaaaaaaagctcaccatcactggtcatcagagaaatgcaaatcaaaatcacaatgagataccatctcacaccagttagaatggcaatcattaacaagtcaggaaacaacaagtgctggagaggatgtggagaaataggaacacttttacactgttggtgggactctaaactagttcaaccactgtgggagtcagtgtggtga

SEQ ID NO: 9258 - DNA, 773 bp, Homo sapiens
  SIMILAR (30)..(770): 911254mologous to Escherichia coli O157:H7 cystathionine gamma-synthase,accession number AE005625,Smith-Waterman Score=1128.
ggcttttggggccagcctcgcccaagacaaacccaacactggtactgggtagaaaagcccaagtcatcccattgttacgggtcttggatattggaaaaatctgccatctggcaaggaaagtcggggcggtaagcgtggtggataaccccttcataaggccggcattacaaaatccgctggcattacgtgccgatctggtgttgcattcatgcacgaaatatctgaacggtcactcagacgtagtggccggcgtggtgattgctaaagacccggacgttgtcactgaactggcctggtgggcaaacaatattggcgtgacgggcggcgcgtttgacagctatctgctgctacgtgggttgcgaacgctggtgccgcgtatggagctggcgcagcgcaacgcgcaggcgattgtgaaatacctgcaaacccagccgttggtgaaaaaactgtatcacccgtcgttgccggaaaatcaggggcatgaaattgccgcgcgccagcaaaaaggctttggcgcaatgttgagttttgaactggatggcgatgagcagacgctgcgtcgtttcctgggcgggctgtcgttgtttacgctggcggaatcattagggggagtggaaaagttaatctctcacgccgcaaccatgacacatgcaggcatggcaccaaaagcgcgtgctgccgccgggatctccgagacgctgctgcgtatctccaccggtattgaaaatggcgaaaatttaattgccgaccttgaaaatggcttcccggcttga

SEQ ID NO: 9259 - DNA, 2242 bp, Homo sapiens
  SIMILAR (764)..(787): 1001254mologous to Escherichia coli sn-glycerol-3-phosphate acyltransferase,accession number K00127,Smith-Waterman Score=40.
  misc_feature (1)...(2242): n = a,t,c or g
gaaaatcgaccgtgtgcgcacccgccgtggaccaaagtgaagagcggaaaataatccgcagtcgtagatgccggaggggcgcaccacacccgccggcaattcgcaccattatggtgcgcttgcacacattcaatgccggagagcagccgtgaatgacgctatccctcgcccgcaggcgaaaacccgtaaggcgctgacgccgctattagaaatccgcaacctgaccaaatcctacgatggtcaacatgcggtggatgatgtcagcctgaccatctacaaaggtgaaatcttcgcgctgctgggcgcatccggctgtggcaagtccacgctgctgcgtatgctggcaggtttcgaacaaccttctgccggacagataatgcttgatggcgtcgatttgtcacaggttccgccttacctgcgccccatcaatatgatgtttcagtcttacgcgctgtttccgcatatgaccgtggaacagaacatcgcttttggcctgaaacaggacaaactaccgaaagcggaaattgccagccgggtcaatgagatgctcggcctggtgcatatgcaggagttcgccaaacgcaaaccgcatcagctttccggtggtcagcgacaacgtgtggccctggcccgaagccttgcgaagcgccccgaaactattactggtcgatgagccgatgggcgcgctcggataaaaagctgcaagccaggatgcaggagtcccgcgtaggatccaggccgaggaggtcgacggtccaactgggcgatgctgcgtggcggcacgcgtcgattacgctgattccgatctatatcggttatgagcacgtcatggaagtgggtacgtacgaacaacagaattgcccggcgcgacgaaagagaaagaaagccggccgcagatcgtgcgaggtttaagcaagttgcgtaatgtcggtcagggttacgtcaacttcggtgaaccaatgccgttgatgacctaccttaaccagcatgtacctgactggcgtgaatctatcgatcccatcgaagcggtgcgtccggcatggttaacgccgacggtcaataatattgctgccgatctgatggtacgcattaacaacgcaggcgcggcaaacgccatgaacctgtgctgtactgcgctactggcatcacgtcagcgctcactcacccgcgagcagttaaccgagcaactcaactgctacctggatttgatgcgcaacgtgccctactccacggactctaccgttcaatcagccagcgccagcgagcttatcgatcacgcgctgcaaatgaacaagtttgaagtcgagaaagacacaatcggcgacatcatcattctgccgcgcgagcaagcggtgctgatgacctactatcgcaacaacattgcgcatatgttggtgctgccttcgctgatggcggcaatcgtcacccagcatcgccacatctcccgcgacgtattgatggagcacgtcaatgtgctttacccaatgctgaaagcggagctgttcctgcgctgggatcgcgacgagttgccggacgttattgatgcgctggcaaatgagatgcaacctngctggcgcaggcgcgccgaaacgctgcaacgttatgccatcaccttctggttgttgagtgccaacccgtcgatcaagcgcggtacgcttggagaaagagagccgcaccgtcgcgcaacgtctctccgtgctgcacggcatcaacgcgccggagttcttcgacaaggcggtgttcagttctctggtgctgacactgcgtgatgaagggtatatcagcgatagcggcgatgccgaaccggcagaaacgatgaaggtttatcagttgctggcggagttgattacatcagacgtgcgtttgacgattgagagtgcgacgcagggcgaagggtaatcagagagaattgccggatgcggcgaaaacgccttatccggccttccataatctgcaaattcaataaattgcgatgtgttgtgtaggcctgagaagcgccgcgcatcaggcaacccagaagaaagccggatgatcatccggcttttttacatcatcagaaatgccagtaactcattgccagccctaaaaatagtaccagaccaacatagttattattcataaatgctttaaagcaggcttcacgctcgcggttggcaatcagtttttgttgataaacaaacagcgcgccagccaccagaattgaccagtaatatccccagcctaagccatttaactcaccgat

SEQ ID NO: 9260 - DNA, 639 bp, Homo sapiens
  SIMILAR (7)..(636): 731254mologous to Homo sapiens p40,accession number U93567,Smith-Waterman Score=756.
atgactgacgagctgagagaagaaggcttcagacgatcaaattactctgagctacgggaggacattcaaaccaaaggcaaagaagttgaaaactttgaaaaaaatttagaagaatgtataactagaataaccaatacagagaagtgcctaaaggagctgatggagctgaaaaccaaggctcgagaactactaaggcaggccaacgttcagattcaggaaatacagagaacgccacaaagatactcctcgagaagagcaactccaagacacataattgtcagattcaccaaagttgaaatgaaggaaaaaatgttaagggcagccagagagaaaggtcgggttaccctcaaagggaagcccatcagactaacagcggatctctcggcagaaaccctacaagccagaagagagtgggggccaatattcaacattcttaaagaaaagaattttcaacccagaatttcatatccagccaaactaagcttcataagtgaaggagaaataaaatactttacagacaagcaaatgctgacagattttgtcaccaccaggcctgccctaaaagagctcctgaaggaagcgctaaacatggaaaggaacaaccggtaccagccgctgcaaaatcatgccaaaatgtaa

SEQ ID NO: 9261 - DNA, 945 bp, Homo sapiens
  SIMILAR (37)..(942): 521254mologous to Homo sapiens p40,accession number U93569,Smith-Waterman Score=729.
atggggaaaaaacagagcagaaaaactggaaactctaaaaatcagagcgcctctcctcctccaaaggaatgcagctcctcaccagcaacggaacaaagctggacggagaatgactctgacaagttgagagaagaaggcttcagacgatcaaactactccgagctaaaggaggaagttcgaaaccatggcaaagaagttaaaaaccttgaaaaaaaattagatgaatggctaactagaataatcaacgcagagaattccttaaaggacctgatggagctgaaaaccaaggcacgagaactacgtgacaaatgcacaagcctcagtagccaatttgatcaactggaagaaagggtatcagtgatggaaaatcaaatgaatgaaatgaagcgagaggagaagtgtagagaaaaaagaataaaaagaaacgaacaaagcctccaagaaatgtgggactatgtgaaaagaccaaatctacgtctgattggtgtacctgaaacaaagcaggccaacattcaaattcaggaaatacagagaacgccaaaaagatactcctcgagaagactaactccaagacatgtaattgtcagattcaccaaagttgaaatgaaggaaaaaatgttaagggcagccagagagaaaggacgggttacccataaagggaagcccatcagactaacagctgatctctcagcagaaactctacaagccagaagagagtgggggccaatattccacattcttaaagaaaagaattttcaacccagaatttcatatccagccaaactaagcttcataagtgaaggagaaataaaatcccttacagacgagcaaatgctgagagattttgtcaccaccagacctgccctaaaagagctcctgaaggaagcactcaacatggaaaggaacaaccggtaccagccactgcaaaaacatgccaaattgtaa

SEQ ID NO: 9262 - DNA, 972 bp, Homo sapiens
  SIMILAR (103)..(552): 981254mologous to Homo sapiens kidney superoxide-producing NADPH oxidase,accession number AB041035,Smith-Waterman Score=787.
tcagcggcccggcaggccgcacaactgtaaccgctgccccggccgccgcccgctccttctcgggccggcgggcacagagcgcagcgcggcggggccggcggcatgcctgtgtcctggaggagctggctcgccaacgaaggggttaaacacctctgcctgttcatctggctctccatgaatgtcctgcttttctggaaaaccttcttgctgtataaccaagggccagagtatcactacctccaccagatgttggggctaggattgtgtctaagcagagcctcagcatctgttcttaacctcaactgcagccttatccttttacccatgtgccgaacactcttggcttacctccgaggatcacagaaggttccaagcaggagaaccaggagattgttggataaaagcagaacattccatattacctgtggtgttactatctgtattttctcaggcgtgcatgtggctgcccatctggtgaatgccctcaacttctcagtgaattacagtgaagactttgttgaactgaatgcagcaagataccgagatgaggaaatacagagaacgccacaaagatactcctcgagaagaccaactcaaagacacataattgtcagattcaccaaagttgaaataaaggaaaaaatgttaagggcagccagagagaaaggtggggttgcccacaaacggaagcccatcagactaacagctgatctctcagcagaaactctacaagccagaagagagtgggggccaacattcaacattcttaaagaaaagaattttcaacccagaatttcatatccaaccaaactaagcttcataagtgaaggagaaacaaaatcctttacagacaagcaaatgctgagagattttggcaccaccaggcctcccctaaaagagctcctgaaggaagcactaaacatggaaaggaacaaccggtaccagccacagcagaaacacaccaaattgtaa

SEQ ID NO: 9263 - DNA, 1378 bp, Homo sapiens
  SIMILAR (593)..(1033): 571254mologous to Homo sapiens p40,accession number U93567,Smith-Waterman Score=316.
atggggaaaaaacagagcagaaaaactggaaactctaaaaatcagagtgcctctcctcctccaaaggaacgcagctcctcaagagcaatggaacaaagctggacggagaatgactttgacgagttgagagaagaaggcttcagacgatcaaactactctgagctaaaggaggaagttcaaacccatggcaaagaagataaaaaccttgaaaaaaaattagatgaatggctagctagaataatcaatgcagagaagtccttaaaggacctgatggagctgaaaaccaaggcacgagaactatgtgatgaatgcacgagcctcagtagccgattcgatcaactggaagatggggtatcagtaatggaagatgaaatgaatgaaatgaagtcagaagggaagtttagagaaaaaagaataaaaagaaatgagcaaagcctccaagaaatatgggactacgtgaaaaaaccaaatctatgtctgattggtgtacctgaaagtgataggaagaacggaaccaagttggaaaacactctgcaagatattattcaggagaacttccccaatctatcagggcaggccaacattcacattcaggaaataccagagaacgccacaaagatactccttgagaagagcaactccaagcacacctaattgtcagattcaccaaagttgaaatgaaggaaaaaaatgttaagggcagccagagagaaaggtcggggttacccacaaagggaagcccatcagactaacaacagctgatctctcagcagaaactctacaagccagaagacagagtgggggccaatattcaacattcttaaagaaaagaatttttcaacccagaatttcatatccagccaaactaagcttcataagtgaaggagaaataaaatactttatagacaagcaaatgctgagagatttttgtcaccaccagggcctgcccttaaaagagctcctggaaaggaaggcacttaaacatgggaaagggaacaaccagtaaccagccacttgcaaaaacattgccaaatttgtaaagaccattgaggctagggaagaaacttgcatcaacttaacgagcaaaataaccagctaacatcataatgacaggatccaaattcacacataacaatattaactttaaatgtaaatggggctaaatgctcccatttaaaagacacagactgggcaaattggataaagaatcaagacccatcagtgtgctgtattcaggatacccatctcacatgcagagacacacataggctcaaaataaagggatggaggaagatctgccaagcaaatggaaaacaaaaaaaggcagggtttgcaatcctagtctctgataaagcagactttaaaccaacaaagatca

SEQ ID NO: 9264 - DNA, 514 bp, Homo sapiens
  SIMILAR (455)..(514): 701254mologous to Homo sapiens Human secreted protein, SEQ ID NO: 4658,accession number G00577,Smith-Waterman Score=79.
tttttttttttttttttactttctgtagaaagggtacactcgtcagcagttttgccacgagagtgcaccgaacaaaggagacagggtcatttataacctgacgtgtccaccttactgctgtgtccagtttccattggctggaaccgggcttcacattctgtatttgtcctgattgttttgtgcaatgttgagaaaggtaaaaacaccttcaaatgaggaagaggaacatgctatgacctaatgcttgcttggaccagtataagcatgccagggcaaatatttaggctaaattgtgggagccaagaacataaagtacattgatttctttattacggctagcagatatttaagaatgttagcacaggtctttgaataaattttgcttctgagagaagttactaggtattcttaattcgatggggaggaaagcctttgaagaggaaactctactttttgcattgctctatcacccaggctttagtgcagtgggacaatctcagcccaatgcaacctg

SEQ ID NO: 9265 - DNA, 1253 bp, Homo sapiens
  SIMILAR (231)..(1250): 1001254mologous to Homo sapiens Death-associated protein kinase 2,accession number AB018001,Smith-Waterman Score=1732.
tttcgttgcagccatacagcagactttagagagaggggtgtcagagaggggctccctacaccggtcctcctgaggggggtagggaactgtgagctggccggatgcaaaacggtatagtacagtggtctcttgtaactcaggctgtagactgagagcaaaatgaacttggttaaaagcaagaaagcctcctccaccacagcagcaccctagacaagctggtggtttctaaaagtggccagtttgccatcgtgaagaagtgccgggagaagagcacggggcttgagtatgcagccaagttcatcaagaagcggcagagccgggcgagccggcgcggtgtgagccgggaggagatcgagcgggaggtgagcatcctgcggcaggtgctgcaccacaatgtcatcacgctgcacgacgtctatgagaaccgcaccgacgtggtgctcatccttgagctagtgtctggaggagagctcttcgatttcctggcccagaaggagtcactgagtgaggaggaggccaccagcttcattaagcagatcctggatggggtgaactaccttcacacaaagaaaattgctcactttgatctcaagccagaaaacattatgttgttagacaagaatattcccattccacacatcaagctgattgactttggtctggctcacgaaatagaagatggagttgaatttaagaatatttttgggacgccggaatttgttgctccagaaattgtgaactacgagcccctgggtctggaggctgacatgtggagcataggcgtcatcacctacatcctcttaagtggagcatcccctttcctgggagacacgaagcaggaaacactggcaaatatcacagcagtgagttacgactttgatgaggaattcttcagccagacgagcgagctggccaaggactttattcggaagcttctggttaaagagacccggaaacggctcacaatccaagaggctctcagacacccctggatcacgccggtggacaaccagcaagccatggtgcgcagggagtctgtggtcaatctggagaacttcaggaagcagtatgtccgcaggcggtggaagctttccttcagcatcgtgtccctgtgcaaccacctcacccgctcgctgatgaagaaggtgcacctgaggccggatgaggacctgaggaactgtgagagtgacactgaggaggacatcgccaggaggaaagccctccacccacggaggaggagcagcacctcctaa

SEQ ID NO: 9266 - DNA, 1290 bp, Homo sapiens
  SIMILAR (732)..(1043): 831254mologous to Homo sapiens KIAA1673 protein,accession number AB051460,Smith-Waterman Score=476.
atgcacagatctgacatgtcttgccctgacaaagtggacattttggatacaacggcattcagaattgccattaatgaagtgaagcattctaaactcacaagtgttacagtgacaaaagtcctagacatgttcatcagtcgttcttccctctttccaatagatgatggcttgcttgatgatggtcacagtgatcaagttggagttttaaattcacccacctgttattcagctcaccaaaatggagagcgaatagaacgcttctctcgaaaagtttttgttggtggtcttcctccagatattgatgaagatgaaataactgctagcttcagaagatttgggcctttggtagtagattggcctcataaagcagaaagcaagtcctattttccaccaaaaggctatgcatttcttctctttcaagaagagagctcagttcaggcactcattgatgcttgtattgaagaagatggaaaaactctacctgtgtgtttcctagcccctactatccaaggacaaacccagttccaaatacgtcccttggaatttaagtgatagtgattttgtaatggatggttctcagcctttggatccccgaaaaacaatttttgttggaggtgttcctaggccattaagggctgtggaacttgctatgatcatggaccggctgtatggtggagtttgttatgcaggaattgatacagatcctgagctaaaatacccaacaagctcctgggcgagttgctttctccaatcagcagagctatattgctgccattagtgctcggtttgttcagcttcagcatggtgatattgataaacgtgtggaggtaaagccatatgtgctagatgaccagatgtgtgatgaatgccagggcgcacgctgtggtggaaaatttgctccctttttttgtgccaatgtcacttgcctgcagtattactgtgagttttgttgggcaaatatccactctcgtgctggacgtgaggtccatattcccttggttacagaaagcgccgtcgccgcccctcggatccacattccgtggacctaacaataagccgacgggcctctgtttaacaaggaaagaaagggtgcatgtggcttactgtgtctgaagatactgacatgcagaagaaataagtgcattcttctgcttttcaccccagctatcaatacatgcatctttatcagcagccaaaacactacaagcctcttgtttttcaccaaaaccctacatctcaggcttactaatttttgtgatattttcatgttcaaataaaatgtttttttgt

SEQ ID NO: 9267 - DNA, 176 bp, Homo sapiens
  SIMILAR (14)..(94): 881254mologous to Homo sapiens dJ109F14.1.2 (Transcriptional Enhancer Factor family protein)(PUTATIVE isoform 2),accession number AL022721,Smith-Waterman Score=116.
caggattttcaacagtgtcctgcagaacaagttcagcccaccttcccctctgccccaggccgtcttctccacttcctcgcgggtacatgggtcccaggaggtgggctggtgtgggggtgtgctgtaaaggatgagctttagtggggttcatggatgctgaggggcccctgggcctt

SEQ ID NO: 9268 - DNA, 1942 bp, Homo sapiens
  SIMILAR (1827)..(1940): 1001254mologous to Homo sapiens transcription factor,accession number X94439,Smith-Waterman Score=195.
  misc_feature (1)...(1942): n = a,t,c or g
atagcgtccaacagctggaacgccagcagcagccccggggaggcccgggaggatgggcccgagggcctggacaaggggctggacaacgatgcggagggcgtgtggagcccggacatcgagcagagcttccaggaggccctggccatctacccgccctgcggccggcggaagatcatcctgtcagacgagggcaagatgtacggccgaaatgagttgattgcacgctatattaaactgaggacggggaagactcggacgagaaaacaggtgtccagccacatacaggttctagctcggaagaaggtgcgggagtaccaggttggcatcaaggccatgaacctggaccaggtctccaaggacaaagcccttcagagcatggcgtccatgtcctctgcccagatcgtctctgccagtgtcctgcagaacaagttcagcccaccttcccctctgccccaggccgtcttctccacttcctcgcggttctggagcagcccccctctcctgggacagcagcctggaccctctcaggacatcaagccctttgcacagccagcctaccccatccagccgcccctgccgccgacgctcagcagttatgagcccctggccccgctcccctcagctgctgcctctgtgcctgtgtggcaggaccgtaccattgcctcctcccggctgcggctcctggagtattcagccttcatggaggtgcagcgagacccctgaacacgtaccagcaaacacctgtttgtgcacattcggcacacagaccgaaacccccgccgtttcttcagaaccccacccctggggcccagtagatgtgcgcccagatctatgaccnaaatttccccgagaaaaagggaggattgaaggagctctatgagaaggggccccctaatgcctttcttccttgtcaagttctgggccgacctcaacagcaccatccaggagggcccgggagccttctatggggtcagctctcagtacagctctgctgatagcatgaccatcagcgtctccaccaaggtgtgctcctttggcaaacaggtggtagagaaggtggagactgagtatgccaggctggagaacgggcgctttgtgtaccgtatccaccgctcgcccatgtgcgagtacatgatcaacttcatccacaagctgaagcacctgcccgagaagtacatgatgaacagcgtgctggagaacttcaccatcctgcaggtggtcacgagccgggactcccaggagaccctgcttgtcattgcttttgtcttcgaagtctccaccagtgagcacggggcccagcaccatgtctacaagctcgtcaaagactagggtgccctctgcgcctccttaaggatgcagggtgagcatctcctctccacacctgcctggcacccctgggggggtccaggattgaggattcatctacctgccaggcctcaggcccaggacccaggaggcctccccacctaccccagcacacacactccctgccactgttctgcgctttaattgtgggagaagagaggagaggagggctcaacggtggggcagcctgtccggggcgctgacccaccatcaccctgctctgtccagactcgcgtgacctcagagaggtggggataggggacaccttcagcctccagcatgtgtggccactgtacccccacccacccttgggggagcatgatgggcaggtgagggcaggatggagaccaagggagtcagtgagcagaggccctgggagtgtccggttggggttggactgaggacagaggggcccacacttccttgcccctttgtgtcccaggcctggtgcccagactccttacatgatcaacttcatccacaagctgaagcacctgcccgagaagtacatgatgaacagcgtgctggagaacttcaccatcctgcaggtggtcacgagccgggactcccaggagac

SEQ ID NO: 9269 - DNA, 339 bp, Homo sapiens
  SIMILAR (2)..(337): 1001254mologous to Escherichia coli ferredoxin reductase,accession number Y11070,Smith-Waterman Score=546.
actgcgagaagttctgcagcccgaacggtcagtcgtgattatcggtgccggaactattggtctggaactggctgccagcgccacgcagcgcagatgtaaggtgacagtgattgaactggcggcaaccgtcatgggccgtaatgcaccaccgcccgtgcaacgctatcttttacagcgccaccagcaggctggtgtgcgcattctgctcaataatgccattgaacatgtggtcgatggtgaaaaagtagaactgacgctgcaaagtggggaaacgcttcaggctgatgtggtgatttacggtattggtatcagcgccaacgagcaactggctcgcgaggc

SEQ ID NO: 9270 - DNA, 2913 bp, Homo sapiens
  SIMILAR (1998)..(1234): 941254mologous to Escherichia coli No definition line found,accession number U00039,Smith-Waterman Score=1275.
ttacggctggatctcatgctgatggctttcccagtatgacttcacgtagtccgggtgaccaaacgccatgtagatcttgcccattgcggaacagtagagcggcatatgctggccaatataggcacgggttcgcagcatcccggttgtgggttccagcttataaatcaaaatagcgtgatcgtcttcgcggctggagaagttaatggtttcaccagtggcgatgttcagtgcctcaagatgcggagcggcgatatgaatgatattcagcgaagacagcgccttctgcccgacggcaataaatttggtggtcaggcgataactccccgaaatttgaaacacgtttggcattgacgctttggccagaaaggtcataaggaggaacctggtatcaggcctatgccaaaaacacgtaaggggaataataacgcggtaataaagggtgcgtgtaaaatagtcgcaccaccacgggtttctcggacattctctataacagagcggttctcgcacgtataccgctaggccgctgtaaaatatcaggcggtgtaacacgggggtatgctcgaaatctttttcgtggcggaggagcagactaagacacgcactcatcacatagcgcgctagaacagaaacgacattatgcctggtatgattcgcatcgtgaaacagcacggtcacgaagagtttatctatctgtctggcggcattcttgaagtgcagcctggcaacgtgaccgttctggccgacaccgcaattcgcggccaggatctcgacgaagcgcgagccatggaagcgaaacgtaaggctgaagagcacattagcagctctcacggcgacgtagattacgctcaggcgtctgcggaactggccaaagcgatcgcgcagctgcgcgttatcgagttgaccaaaaaagcgatgtaacaccggcttgaaaagcacaaaagccagtctggaaacaggctggcttttttttgcgcgtgtgacccgtcctgaatagcgttcacatagatcctgctgatataaaacccccctgttttcctgtttattcattgatcgaaataagagcaaaaacatccacctgacgcttaaattaaggtactgccttaattttctggcttttatcgtagcggagtgtcgctggaaggcattaactacctggatggcgggatcagtgatgcgattccggttaaagaggcggcaaggcagggcgctaaaacgttggtcgtcattcgcacacccttcatagatggcctgcaacaggtgcgcgcgggtgtgaatggcctgcatcccgtagaaaccactggtcatctcgagtccggcgttgctgccgtacaggaacggcaggaaaaagagatcgcccccagccttcggcaagctggcaacggcctgattgatctcatcaaacgagatttctccccactgtgcggtaaaccattcgaggttgccggaagaggtagggctggcttcgtgaacgataaattcaccatcgttaacgtagcgaccatagacatacggatgcgcttcaccgtcacgtaaaccgcgggttatgccgctggtcaccgcccaggtccccatcaccgcattgagggtaaattcgtcttcgatcccggcgcagagtgcggtggaaaccacatcaaacaggccgccaacaacgggcgtacccgctttcagaccggtcagggcggctgtctgagcggtgatctccccgcagatttcggcagatccgacaacaggcggcagggcgtgattgatttcagcgatccccagccagtcggtgaggcacgggtcatattccccaagactcatgttgtagaggttggactcggaaatattgctctcttcacagcctttgacgccagttaaacaccagcgcaggtagtcgtgcgtcatcatcacgcagccaatttgcgcgtagcgttctggttcggggtctttcagccagcgtaacagcgacacggatgcccggtcaccaggttggtcggtcaggggtacagtttccgggtgcctcttctgcagcgagaccgattcatcgcggggtcgggcaattgctccggggttggctccccgcaagcagctttcggggggatcctcggattgtccgtcaccggtttcgcgggcgttcgctcttgggtctttggcggcatggatttcacggggggcttccggaggcgtggggccctgtttccggcgactgaacttttccaagcctggtctcttcctcctattgcggcggcggtatttctcaatgcggatattaaaccgggcattgaaattgtgttgaatgcggtcaatcttgcgcaggcagtgcagggcgcagcactggtgattaccggggaagggcgcatcgactcgcaaacggcaggcggtaaagcgccgctgggtgtggcgtcggtggcgaagcagtttaatgtaccggtgattgggattgctggcgtattgggtgatggcgtggaagtggtgcaccagtacggcattgacgcggtattcagcattttgcctcgtagcgatcgcttcgatctcaatcttcacgtctttcggcagacgggcaacttcaacgcaagaacgtgccgggaaggtggcgttgtgttcggtgaagaaggcttcgtaagtggcgtttacggttgcgaagtcgttcagatcttttacaaacacggtagttttaacgatgtcgcccactttcaggccagcggcttcgacgatcgcttttacgttatccagcgactgacgtgcctgtgcagcgacgtctgccggtacttcgcccgttttcggatttaccgggatctgaccggaggtgatgatcatattgcccagatcaacgccctgtacgtaaggaccgatagctgccggtgcattttccgtcgcgatagttttgctcatgatttctcctttattacagcggtaaaaagtctggctcat

SEQ ID NO: 9271 - DNA, 1713 bp, Homo sapiens
  SIMILAR (1)..(513): 1001254mologous to Escherichia coli ATP synthase beta subunit (atp-8),accession number J01594,Smith-Waterman Score=859.
atgggcgttctgcaggaacgtatcacctccaccaaaactggttctatcacctccgtacaggcagtatacgtacctgcggatgacttgactgacccgtctccggcaaccacctttgcgcaccttgacgcaaccgtggtactgagccgtcagatcgcgtctctgggtatctacccggccgttgacccgctggactccaccagccgtcagctggacccgctggtggttggtcaggaacactacgacaccgcgcgtggcgttcagtccatcctgcaacgttatcaggaactgaaagacatcatcgccatcctgggtatggatgaactgtctgaagaagacaaactggtggtagcgcgtgctcgtaagatccagcgcttcctgtcccagccgttcttcgtggcagaagtattcaccggttctccgggtaaatacgtctccctgaaagacaccatccgtggctttaaaggcatcatggaaggcgaatacgatcacctgccggagcaggcgttctacatgggtgatatggcaatgacttaccacctggacgtcgtcagcgcagagcaacaaatgttctctggtctggtcgagaaaatccaggtaacgggtagcgaaggtgaactggggatctacctggccacgcaccgctgctcaccgccaattaagcctgcctggctgttgctgaaagcgtctttagaaacggcgctaacagcaggtttgtggaatgccggatcgctcaacggcctgacgtgggcaaaaacctcgccttccgcacccatcattatattgatgctcattgccgccgccttactggtacgccggatgcgcttgctggaaatgggcgatgataccgcgtgtgcgctgggcgtcagcgtcgaacgttcgcgtctgttaatgatgctggttgcactgcacgccggtcatgggcgcgtattggtttgccccctgtgcaacgtggtgcgccagccgcctgtaagggaacggccgacaagaaacttcagccgctgcgtcaccgggatcatcgatgcggcaaccagccacgcatcttcgcagcagacagacaacctgggtttaaattctggttctgccacttaccggcctgctgctccggtgacgaaagaggttcgcgttgcgtcacctgctatcgtcgaagcgaagccggtcaaaacgattaaagacaaggttcgcgcaatgcgtgaacttctgctttcggatgaatacgcagagcaaaagcgagcggtcaatcgctttatgctgctgttgtctacactatattctcttgacgcccaggcgtttgccgaagcaacggaatcgttgcacggtcgtacacgcgtttactttgcggcagatgaacaaacgctgctgaaaaatgccctgtggcacaatggtcaacataataccctaacccgacaacgcgaaaaaaagaactttgccatgaaattgaatatccgcgcgcaaactgcacaaaaccagcacaataattctcccatcgttcttgtccacggtctgtttggcagcctcgacaaccttggcgtactggctcgcgatctggtaaacgatcacaatatcatccaggttgatatgcgtaaccacggtctttcaccgagagatccggtaatgaattacccggcgatggcgcaggatcttgttgatactctggatgcacagcagatcgacaaagcacattatcgtcactcatggcggtccaggctagagtga

SEQ ID NO: 9272 - DNA, 1194 bp, Homo sapiens
  SIMILAR (337)..(660): 971254mologous to Escherichia coli ATP synthase epsilon subunit (atp-9),accession number J01594,Smith-Waterman Score=531.
atgataacttgctacgttcaggagacagtaaagcatcagggcaatcaggaacactacgacaccgcgcgtggcgttcagtccatcctgcaacgttatcaggaactgaaagacatcatcgccatcctgggtatggatgaactgtctgaagaagacaaactggtggtagcgcgtgctcgtaagatccagcgcttcctgtcccagccgttcttcgtggcagaagtattcaccggttctccgggtaaatacgtctccctgaaagacaccatccgtggctttaaaggcatcatggaaggcgaatacgatcacctgccggagcaggcgttctacatgggtgatatggcaatgacttaccacctggacgtcgtcagcgcagagcaacaaatgttctctggtctggtcgagaaaatccaggtaacgggtagcgaaggtgaactggggatctacactggccacgcaccgctgctcaccgccattaagcctggtatgattcgcatcgtgaaacagcacggtcacgaagagtttatctatctgtctggcggcattcttgaagtgcagcctggcaacgtgaccgttctggccgacaccgcaattcgcggccaggatctcgacgaagcgcgagccatggaagcgaaacgtaaggctgaagagcacattacagctctcacgcgacgtagattacgctcaggcgtctgcggacagccaggcttaaaggatattcagaacgcagcaaatcctggccacgccagtccctcccacatgctgggcttgcacggctttgtggctgcagaggtgttatgcgcgcacctgtctgccaggtgtgacaacggcgttgggaatgggtctactctgtgcctagatataaagggcagctgtgtgaatcaaggaattgatataaggacggggatacttgtacctgttgatagcgtcatcgtctacttcacgacattgctgaccgatgagctgaccattgggcctatccgggctgtcccgatggatattacgccgaagtatgtgggaattgccagcggattgatgaacgccggttccgctgtcgccgacattatttcacctatcgcctttggcattattatcgacaaaacaggcaactggagtttaccattctacggttccgtcgcattgcttgttattggtatattcctgacgttcttcatgcgtccagataagtcattgtaa

SEQ ID NO: 9273 - DNA, 2334 bp, Homo sapiens
  SIMILAR (2334)..(1900): 931254mologous to Escherichia coli open reading frame upstream glnE,accession number Z21844,Smith-Waterman Score=720.
tcatatccttcgcccactttttgatggggttgattttttcttgtaaatttgtttaagttctttgtagattctggatattagccctttgtcagatgggtagattgtaaaaattttctcccattctgtaggtttccttttcactctgatggtggtttcttttgctgtgcagaagctctttagtttaattagatcccatttgtcaattttggcttttgttgccattttgttctccctgcctctcttctcctcttcttcttctcttttctctcctccttcccttctcttcttcttcttctctcctcttcgctttttctttcttcttcccttctctttctttctctcccttttccttctttcttttcttttcttttctggagtctccgggctggctatgagtgttcgggaaactctctggctctggtcctggcagccacagttgaccagtccagaagtcagcatctgcctgagcccaccgatatgggttccttctgggggatgtgaagactggagtgagaagggcagatggtctccctggcaatgctgagctgcagtctgcaccaggggaagctggcggcccctgattccactatcatttgtacttttctggtggttgaaaagtttgtagccaccaaatcccagaactttctctctctccttcagatcttcgtaggtgtcagctgagagcttggtgctgttcatgtttaaactgcagagactcttcatggagctcagggccagcaggccagcgtctgtgaccggggtctcgcacaggttcagcacctggagcatggtgaggtgttccgacaggagccgaaggccagcgtctccaaactgtagagcacagaaactctcagccctctcccggccactcctggggaagtgactctgaggcacctggacgtcgtcagcgcagagcaacaaatgttctctggtctggtcgagaaaatccaggtaacgggtagcgaaggtgaactggggatctaccctggccacgcaccgctgctcaccgccattaagcctggtatgattcgcatcgtgaaacagcacggtcacgaagagtttatctatctgtctggcggcattcttgaagtgcagcctggcaacgtgaccgttctggccgacaccgcaattcgcggccaggatctcgacgaagcgcgagccatggaagcgaaacgtaaggctgaagagcacattagcagctctcacggcgacgtagattacgctcaggcgtctgcggaactggccaaagcgatcgcgcagctgcgcgttatcgagttgaccaaaaaagcgatgtaacaccggcttgaaaagcacaaaagccagtctggaaacaggctggcttttttttgcgcgtgtgacccgtcctgaatagcgttcacatagatcctgctgatataaaacccccctgttttcctgtttattcattgatcgaaataagagcaaaaacatccacctgacgcttaaattaaggtactgccttaattttctcgtggggtgaatactggtgtaataaggtgccccttgggttccagggtagtgtttctggcccagacccttgttcttgtaaccttgtggtaagccgatgtcggaagtgttggtggtcgttggaagtggtctgtatttgaccgcaatgctcttggtttgcggcatgacaccagcaggtcgattacccggccctgccgcactaaataacgatgcgccgatatcaccaaaatcaaattcaacaatctgcccggcatttaattcgcagttttgcggtacttcaacccggccaccaaaactaatggtataaacaggtgtaaccaacggatcgtaaggcgttgatgtcacatacacggtaaacatcacctgtctggggatctccaccatgttaataaagggacgaataaccggttgaatgccccggtggagggccatttcaatggggcaaccatcgcccgccaccagccatttttcggaataaaaatgggtgctgaacagcggctgcacgcgggaggcgagatcggcgggcaattcgccgttcggccagacttccgtcggtaactgcgccaggtcgagcgtcggttcgctcaacgccacgttatattccgggcgctgatgaaacccgcctgtcactcttcctgcaactttcatggtcatctcatagcgaccgttttcgccacgaatacgtaagcccatatcgtgcccacgcagccagttatccggcgtttcgtagtaaatattcagcaactgcacggggtcatggtgctcgccgcccagcgtattgagatggtcacgcaacgcctcaacggcactgtgattaacaataaactttaattcgatttcctgagccat

SEQ ID NO: 9274 - DNA, 722 bp, Homo sapiens
  SIMILAR (300)..(599): 871254mologous to Escherichia coli ATP synthase beta subunit (atp-8),accession number J01594,Smith-Waterman Score=429.
  misc_feature (1)...(722): n = a,t,c or g
gtatgctttcagcggtaggttatcagccgacctggcggaagagatgggcgttctgcaggaacgtatcncctccaccaaaactggttctatcacctccgtacaggcagtatacgtacctgcggatgacttgactgacccgtctccggcaaccacctttgcgcaccttgacgcaaccgtggtactgagccgtcagatcgcgtctctgggtatctacccggccgttgacccgctggactccaccagccgtcagctggacccgctggtggttggtcaggaacactacgacaccgcgcgtggcggtcagttcattctggcacggtatcaggaacttgaaagccttcttcgccatcctgggtatgaatgacctgtctgaagaagacaaactggtggtagcgcgtgctcgtaagatccagcgcttcctgtcccagccgttcttcgtggcagaagtattcaccggttctccgggtaaatacgtctccctgaaagacaccatccgtggctttaaaggcatcatggaaggcgaatacgatcacctgccggagcaggcgttttacatggtcggttccatcgaagaagctgtggaaaaagccaaaaaactttaacgccttaatcggagggtgatatggcaatgacttacctcctggacgtcgtcagcgcagagcaacaaatgttctctggtctggtcgagaaaatccaggtaacgggtagcgaaggtgaactgg

SEQ ID NO: 9275 - DNA, 1251 bp, Homo sapiens
  SIMILAR (491)..(526): 911254mologous to Escherichia coli fumarate reductase flavoprotein subunit,accession number J01611,Smith-Waterman Score= 54.
tccgccataatcgccgcgcgttttaataagttaggaatggatgcgctcggctgccaggatgccgtttcgctcatagttaaagctgcagtttttgacaagggcacgaagtctactcgcaacgcgacggcgagacaaattttacgcaggaatcaaacagcggtgggcagtgactaaaaaaagcacgatctgatggtttagtaattaaattaatcatcttcagtgataatttagccctcttgcgcactaaaaaaatcgatctcgtcaaatttcagacttatccatcagactatactgttgtacctataaaggagcagtggaatagcgttcgcagaccgtaactttcaggtacttaccctgaagtacgtggctgtgggataaaaacaatctggaggaatgtcgtgcaagacctttcaagccgatcttgccattgtaggcgccggtggcgcgggattacgtgctgcaattgctgccgcgcaggcaaatccgaaaatcaaaaatcgcactaatctcaaaagtatacccgatggagtagccataccgttgctgcagaagggggctccgccgctgtcgcgcaggatcatgacagcttcgaatatccctttcacgatacagtagcgggtggcgactggttgtgtgagcaggatgtcgtggattatttcgtcccccactgcccaaccgaaatgacccaactggaactgtggggatgcccatggagccgtcgcccggatggtagcgtcaacgtacgtcgcttcggcggcatgaaaatcgagcgcacctggttcgccgccgataagaccggcttccatatgctgcacacgctgttccagacctctctgcaattcccgcagatccagcgttttgacgaacatttcgtgctggatattctggttgatgatggtcatgttcgcggcctggtagcaatgaacatgatggaaggcacgctggtgcagatccgtgctaacgcggtcgttatggctactggcggtgcgggtcgcgtttatcgttacaacaccaacggcggcatcgttaccggtgacgggatggggatggcggtaatccacaggggttccggtgtgtgagatggaaatttgttatatataccccaaccgggttggaagggttcgggattcttataaaccaaggttgccggcgtggaaggcggttttttgttaacaaacatggctctctgtttttgcgaaaataccgagtggcccggaaactcctttggggaacccataaacaaaatatggt

SEQ ID NO: 9276 - DNA, 2191 bp, Homo sapiens
  SIMILAR (705)..(1049): 671254mologous to Escherichia coli ATP synthase beta subunit (atp-8),accession number J01594,Smith-Waterman Score=335.
cgccaatgtggcggaacgtcgggagcacgccggacgcagcgggcggacaaggaatgggagtcttgccaagtcgtgagggccccgacggcggagccccaggcctcagcggcagggggcgcacacgacccgggccagaatgcgggaccaaaaaacctagcgagcacaggccagcggtgacggggcaccctcctgccgcgggtaggttgcgagctcggcacgccgcgggttgccagttcacgggcccgcccctcttcaagggcctgggaactcacaggatcggctgggagcggtaccaatcgttgcggcctgaggggacccctcgtaaagggcggaaaaggaggtaggttccctagcgcgcggttaattcaaaccgtaaaaaagggggggacgcccagtcgggaccacgcgatgcgagccctccggttacctctgtgagtgcgggcgtaggtgaaacgtactcgtaagggaagcgtctttgcccacgaaatgcccgactgcaacgttatcgacaaagtatccctggtgtatggccagatgaccgagccgccgggaaactgtatgcgcgttgctctgtccggtctgaccatggctgagaaattccgtgacgaaggtcgtgacgttctgctgtttgttgacaacatctatcgttacgccctggccggttaggaaagattcgccactgtggggcggtaagcttccaaccggtaggtattcagccgaccctggcggaaaagatgggcgttctgcaggaacgtatcacctccaccaaaactggttctatcacctccgtacaggcagtatacgtacctgcgaatgacttgactgacccgtctccggcaaccacctttgcgcaccttgacgcaaccgtggtactgagccgtcagatcgcgtctctgggtatctaccccggccgttgacccgctggactccaccagccgtcagctggacccgctggtggttggtcaggaacactacgacaccgcgcgtggcggttagtccattcctgcagcggttttcaggaactgaaggacttcatggcccttcctggctttcggatgaactgtctgaagaagacaaactggtggtagcgcgtgctcgtaagatccagcgcttcctgtcccagccgttcttcgtggcagaagtattcaccggttctccgggtaaatacgtctccctgaaagacaccatccgtggctttaaaggcatcatggaaggcgaatacgatcacctgccggagcaggcgttctacatgggtgatatggcaatgacttaccacctggacgtcgtcagcgcagagcaacaaatgttctctggtctggtcgagaaaatccaggtaacgggtagcgaaggtgaactggggatctactctggccacgcaccgctgctcaccgccattaagcctggtatgattcgcatcgtgaaacagcacggtcacgaagagtttatctatctgtctggcggcattcttgaagtgcagcctggcaacgtgaccgttctggccgacaccgcaattcgcggccaggatctcgacgaagcgcgagccatggaagcgaaacgcgcctcgggcaaagtgaaaccctcgataatgcagtctctgacgccggagaaaattgccgccattttaccgctgcaatttttcccgcaaccggcggattttacgggcccgtatgtgatgttgacatcgcggcgcaataatcgcgcattaagccggtgtgatgatcaaacgctgatgccgggtttagcgattcgcggcattcgccaccgccaccagcaggctggtgtgcgcattctgctcaataatgccattgaacatgtggtcgatggtgagaaagtagaactgacgctgcaaagtggggacacgcttcaggctgatgtggtgatttacggtattggtatcagcgccgacgagccactggctcgcgaggccaaccttgatactgccaatggcattgtcattgatgaggcttgccgcacctgcgatcccgcgatctttgccggtggcgatgtgcccatcacgtcgtcgttgattaatgtggtggacgaaataatccacgacatcctgctcacacaaccagtcgccacccgctactgtatcgtgaaagtgatattcgaagctgtcatgatcctgcgcgacagcggcggagcccccttctgcagcaacggtatggctacgcatcgggtatacttttga

SEQ ID NO: 9277 - DNA, 2322 bp, Homo sapiens
  SIMILAR (1)..(732): 871254mologous to Escherichia coli DeoR repressor (aa 1- 252),accession number X02837,Smith-Waterman Score=1110.
atggaaacacgtcgcgaagagcgtatcgggcagctgctgcaagaattaaaacgcagcgataagttacatcttaaagacgccgccgccctgcttggggtttcggagatgacgattcgtcgcgatctgaacaaccacagtgcgcccgtcgttttgctcggcggctatattgttctggaaccgcgcagtgccagccattacctgttaagcgatcaaaaatcccgcctggtggaagaaaaacgccgggcggcaaaactggctgcgacgctggtagaacccgatcagaccctcttttttgactgtggcaccaccacgccgtggattattgaagcgattgataatgaaatcccttttaccgccgtttgttattcgctaaatacctttctggcgctgaaagagaaaccccattgccgcgcgtttccttgcggtgcaacgccattttcaaacccatcgattttcagcaaacgcgtgaataatttttgccgggatatcgctttttattattcggcgggcgtgcatgtcagtaaaggcgttacctgttttaatcttaagaggtggccggtaaaacaatgggccatgtcgatggcgcaaaagcatgtgttggttgtcgaccacagtaaatttggagaggtgggtccggtgtgcatgggtgacctaaaacgttttgatattgtggtgagagagtgttgcccggaagatgagtatgtgaagtacgcgcagacgcagcgcattaagccggataaagtttcgcgccatccggtgatcataagattaagagaaccagggcttgaaccagtgatggaatttcatcatcccgtcctcccacaacggaccacagaatccgccgtggtccacattgcccatacacgaaaatcgtggcgccctgaacattctgcccctgtgctgatccagacaagcccagtggaaaggggtccccagtacattcagtgttatcaattatcactcacttcagaagagaacaaccaacctgacacacagacaactactaaacctgctcagtacagttctatattgttcttgtccaagtatccaaaagttattgttgatgctccagacaggtcaacccagcggggttggtctagtggacttgccactcaaagcaatgagcaggcctgcactaccaaatgcaacagctgcactgccaactggcaccagaacacaaccaccttcaactccactgctaacccgtctaccttcaagccaccgacttctgctgcactcagggttttgagcctttggactgggaatcactgcgattggtgttttatccgctactggcgcctaacgcctaactggcagcgcttcagaagggttgggcgtacggagcgggccacaacgcataatcgcctgcaggcgtttgggggtcacacacaagggctgtcaccaggcccccgccgatggctccacgagcagcgcttcccaacaacaagtgacaccggcggccatacggctgacgactttcggaaattagatccgtgcattcagggaccgtacggatctcatcggcattcggttaagagtgaagtgaatttcaaggagaaacgttacgctttcgcgccggcggcctcttttcggtatactgtcctgatacgcttttgtgcgcccccgaatacgggccgatttttacttaccggaacacctttacccatgctcagttatcgccacagctttcacgctggcaaccacgccgacgtccttaaacataccgttcagagcctgatcatcgagtcgctgaaagagaaagataaaccgtttctctatctcgacacccacgcaggggccgggcgttatcagttaggcagcgaacatgccgagcgtaccggcgaatatctcgaaggcatcgcccgtatctggcagcaggacgatttgcccgcagaactggaggcgtacatcaatgtggtaaaacacttcaaccgtagcggtcagttgcgttactaccccggttcgccgttgattgctcgcctgctactgcgtgaacaggacagcctgcaactgaccgaactgcacccgagcgattacccgttgttgcgttctgaatttcagaaagatagccgtgcgcgtgtcgaaaaagccgacggtttccagcagcttaaggccaaactgccgccggtttcccgccgtggtttaatccttatcgacccgccgtatgaaatgaaaactgactatcaagcggtggtcagcgggatagcagaaggttacaaacgtttcgccactggctggtattgcgtattgatgcagctcttcatggtaggtcttaattggcatgtttgcagcggctggtactggtgtttctttccggtttag

SEQ ID NO: 9278 - DNA, 603 bp, Homo sapiens
  SIMILAR (113)..(553): 811254mologous to Escherichia coli Mannose-1-phosphate guanylyltransferase (GDP) (EC 2.7.7.22) (GDP- Mannose pyrophosphorylase) (GMP),accession number D90843,Smith-Waterman Score=601.
  misc_feature (1)...(603): n = a,t,c or g
gtcaggcgctcctgctggccaaacacaacgcggtggcacgtgaatatcacgaacgcacgctcgataaagacaacgtgttacgtcaatttataaatgatattcggggataattatggcgcagtcgaaactctatccagttgtgatggcaggtggctccggtagccgattatggccgctttcacgggtgctttatcccaagcagtttttatgcctgaaaggcgatctcaccatgctgcaaaccaccatctgccgcttgaacggcgtggagtgcgaaagcccggtggtgatttgcaatgagcagccccgctttattgtcgcgcaccagatgcgtcaattgaacgaactttccgagaacattattctcgaaccggcagggcgaaccacggctcctaccattgcgccggcggcgctggcggcaaatcgtcatagtccggagagcgcgccgttaatgctggtattggcgacggatcatgtgattgccaatgaagacgcggtccgcgcccccgtgaagtaatgccatcccctatcccaaaaaaggcaagttggtgactttcggcattgggctggatgggcgggtacctagatataatatgggnncgtaca

SEQ ID NO: 9279 - DNA, 677 bp, Homo sapiens
  SIMILAR (41)..(547): 971254mologous to Escherichia coli narJ protein,accession number M20147,Smith-Waterman Score=828.
gctcgaatgcccagggcgcagtacagcaaattgttcgccccgtgcccgcgccacgtcactgttgctgttgacacatgtgcacggcgaatcccgcgaccgcgcccaggagatggtggacctgctggcgcagtacgagcagcacggcttgcagttaaacagccgcgaattgccggaccatctgccgctgtatctggagtacctggcgcagctgccgcaaagcgaagccgtggaaggtttgaaagatatcgcgccgattctggcattgctgagcgcgcgtctgcaacagcgtgaaagccgttatgccgtgctgtttgatctgctgctgaaactggcgaataccgctatcgacagcgacaaagtggcggaaaaaattgccgacgaagcgcgcgatgatacgccgcaggcgctggatgctgtctgggaagaagagcaggttaaattctttgctgacaaaggctgcggtgattcagcaatcactgcgcatcagcgtcgctttgccggtgccgtcgcgccgcaatatctgaatatcaccaccggaggacagcactaatgcaattcctgaatatgttcttctttgatatctacccgtacatagccggggcggtcttcctgattggtagctggctgcgttatgactacgggcagtacacctggcgcgcggcgtccagccagatgct

SEQ ID NO: 9280 - DNA, 1188 bp, Homo sapiens
  SIMILAR (67)..(570): 501254mologous to Mus musculus Pro-Pol-dUTPase polyprotein,accession number Y12713,Smith-Waterman Score=449.
atgaacaaagtggccgtggtgccagggatggaggtgccagggatggggtcagagaaggaggatgcatggactcagcagcatggacttccactcaccaaggttgagctggctacagttgctgagtacccagtctgcctgtggcagagattaacacttaagtccccaatatggcagcattcccagggtgatcagtcggatgggtggaaagttgattataatggaccattttcattatggaagggacagcattttgttatcaatggaatagacacttgctctggatgcaaatttgcaattcctgtatgtagtgcttctgccaaactactacctatgagctcacagaatgtctaccatcgtgatattctgcacaggattgattctgaacaaggaactcacttcagagtgaaagaagtgcagcaatgggcccttggtcgtggattttactggtcttactatattagccatcatcctgaagccgctggcttggtagaacaatgcaatggcattttgaagactccatcacagttccagatgggtaggaataccttgcagggctggggcaaggtattgccttctctggaaggctgtgcattctcttcatcaaagtccaacttatgttctgttgtcctaaaagtctttgttccaaaggaaggaatggttccaccaggagacacaacaatgattatactgaactgcaagttaagactgccacctgatgcctctgaatctactggcaagcaaggaagttactgtgctggactacaaggggaaattggacagctgctccacaatagaggtaaggaagaatgtgtctggaatacaggagactgcttaacatatctcttaatattaccaagctctgttattaaagttaaagaaaagccgcaaccccatccgggcaggactattaatggcccagatccttcaggaatgaagacctgggttaccccaccagccggggcggtcttcctgattggtagctggctgcgttatgactacgggcagtacacctggcgcgcggcgtccagccagatgctggatcgcaaagggatgaacctggcgtcgaacctgttccatatcgggattctggggatttttgtcggtcacttcttcggtatgctgacgccgcactggatgtatgaagccatgacttatggttcatgtgacacagataacgcaaatgtttga

SEQ ID NO: 9281 - DNA, 1401 bp, Homo sapiens
  SIMILAR (685)..(1389): 971254mologous to Escherichia coli Mannose-1-phosphate guanylyltransferase (GDP) (EC 2.7.7.22) (GDP- Mannose pyrophosphorylase) (GMP),accession number D90843,Smith-Waterman Score=1215.
atgagcgcggtcgtcgctgcggagctagcacgcgtacaagatacacatcgcgaaaggtccttggtaacgacccgtgaacggatcttaatttccggaaacggtgcttaccaggcacagcacgcattcggcactgaaagtacgggacttgacgccggccacccttacacccgtcagtatgatcttgatctgctggctgaacttcgccgtgacaaccaggcaatgcgtgtaatcgccatcgccgcggaaagcagcgacatcgtcgctgccggtccacatatcatcctgccaccgtcacgtcactttatcgacgttgagcaggcattttgcttcctgatgtacgcccagacgtttgcactgatgcagtcgctgcacatgggcaatacgccggataccccatcagccagtggcaccgttaaccgcgtgcgtagtgggagagggcgtcatgcggtgcagtcacgcgccgtcagatgctggccttgcccggtgctcgtagggtctcacaggagcctgcgaccagacgtacgcgtaggcgtgctgactggttggagtgtggagtgggtggaggtgggtgaggcgatgtggggcggtggtggggtggatgtgtctgtggtttgtggtcgtggctgtggtggtgtgggtagtgtgttttgtgttggttgtcggtgtggactggtcgtttgtcgtagacccgaatctgaaaccgctcaggcctatgtggcaagcggcgaatattactggaacagcggtatgttcctgttccgcgccggacgctatctcgaagaactgaaaaaatatcgcccggatatcctcgatgcctgtgaaaaagcgatgagcgccgtcgatccggatctcaattttattcgcgtggatgaagaagcgtttctcgcctgcccggaagagtcggtggattacgcggtcatggaacgtacggcagatgctgttgtggtgccgatggatgcgggctggagcgatgttggctcctggtcttcattatgggagatcagcgcccacaccgccgagggcaacgtttgccacggcgatgtgattaatcacaaaactgaaaacagctatgtgtatgctgaatctggcctggtcaccaccgtcggggtgaaagatctggtagtggtgcagaccaaagatgcggtgctgattgccgaccgtaacgcggtacaggatgtgaaaaaagtggtcgagcagatcaaagccgatggtcgccatgagcatcgggtgcatcgcgaagtgtatcgtccgtggggcaaatatgactctatcgacgcgggcgaccgctaccaggtgaaacgcatcaccgtgaaaccgggcgagggcttgtcggtacagatgcaccatcaccgcgcggaacactgggtggttgtcgacgggaacggcaaaagtcaccattga

SEQ ID NO: 9282 - DNA, 2065 bp, Homo sapiens
  SIMILAR (101)..(640): 981254mologous to Escherichia coli Mannose-1-phosphate guanylyltransferase (GDP) (EC 2.7.7.22) (GDP- Mannose pyrophosphorylase) (GMP),accession number D90843,Smith-Waterman Score=910.
tgctgcccaaacacaacacggtggcacgtgaatatgccgaacgcacgctcgataaagagaacgtgttacgtcaatttataaatgatattcggggataattatggcgcagtcgaaactctatccagttgtgatggcaggtggctccggtagccgcttatggccgctttcccgcgtactttatcccaagcagtttttatgcctgaaaggcgatctcaccatgctgcaaaccaccatctgccgcctgaacggcgtggagtgcgaaagcccggtggtgatttgcaatgagcagcaccgctttattgtcgcggaacagctgcgtcaactgaacaaacttaccgagaacattattctcgaaccggcagggcgaaacacggcacctgccattgcgctggcggcgctggcggcaaaacgtcatagcccggagagcgacccgttaatgctggtattggcggcggatcatgtgattgccgatgaagacgcgttccgtgccgccgtgcgtaatgccatgccatatgccgaagcgggcaagctggtgaccttcggcattgtgccggatctaccagaaaccggttatggctatattcgtcgcggtgaagtgtctgcgggtgagcaggatatggtggcctttgaagtgggcaaaaggagtcgaccaacgccagcgtacaagccaaactccgggtccgccccgacccaccacggccccggcccgccctcgcccgccggccccaaacaacacgacatccacaaacttacgcccgccaccccaccagacacctacggaatccacgcggctaaccaccgggtgtcgacgaacgtgcgtgaaattgacgagtgcctgaacgaccaccatgctctgttcacgattcgacaaattgcctttgacatcttcggcggtgacttcaatcggccaggtgttatcggtttctggcgtactggtgaaccgaacgatattgttgttgcgatccaccagatcataacggctgcctgcaaggctacgccgtgcagcgacttcattcgggtcaagctgtttctgcattgcgctgccaggttgccaggtaaaatcgacggcaaaacgggtgtcattttcgccctgtttaccctggcgttgctccgcgctgaaggtcatcagcgggaagggggtataggccaattcatcgccataaatactggtcatagaccagtttaccgccaaggtgcggccagcggggtagccagctttctgcgcgtacatcccagccaattggcgggcgtgcttcataatcgttgtccagttcagaacaagaagcagaagcagaagcagaagcaagaagaagaagaagaagaagaagaagaagaagaagaagaagaagaagaggaagaggaagaggaagaggaagaggaagaagaggaagaaggagaaggggaacgggaagggggagaaggggaacgggaaggggaagaaggggaacatgaccggtttagtacacataagccccaggcaaaagatgaaacgatgaagtacatacgatctaagcctgacaaccgaatcccggagagacactatatcgcaggtagaccacgagaactcgtatcaactcaccgctatgtgtcagcccgatattacgaagcaacaacgtacaaggacaatgatgctccaaggacaaagacgaagagaatgaagaagaagaagaagaagaagaagaagaagagcaagaagaacaagaagacccaaaccaggagatacattacggtcgacattgaggccgccagcacggcgtgtaccgcaaacagcaacggtgaaatgaacaggaaggtaaattccagcggttcggtaattcccaccagcatggcggttaaggttgcgggaatcagcaagcccgccacttttacccgattttccggtgcggcagtgaagtacatcgctaaagaaatgcccacggcaccaaagatttttgagttaccgtgcagggcaaaaccgccttccgggaacaacgatttcagcggctcggcgctcaaactgaactcttgcagatgtgcgcccagtacatctgaatgccgccttcaacagctgccggaccaaagataa

SEQ ID NO: 9283 - DNA, 885 bp, Homo sapiens
  SIMILAR (1)..(516): 991254mologous to Escherichia coli narJ protein,accession number M20147,Smith-Waterman Score=854.
atggatccgctcgatgcccaggcgcagtacagcgaactgttcgaccgtggccgcgccacgtcactgttgctgtttgaacatgtgcacggcgaatcccgcgaccgcggccaggcgatggtggacctgctggcgcagtacgagcagcacggcttgcagttaaacagccgcgaattgccggaccatctgccgctgtatctggagtacctggcgcagctgccgcaaagcgaagccgtggaaggtttgaaagatatcgcgccgattctggcattgctgagcgcgcgtctgcaacagcgtgaaagccgttatgccgtgctgtttgatctgctgctgaaactggcgaataccgctatcgacagcgacaaagtggcggaaaaaattgccgacgaagcgcgcgatgatacgccgcaggcgctggatgctgtctgggaagaagagcaggttaaattctttgctgacaaaggctgcggtgattcagcaatcactgcgcatcagcgtcgctttgccgccggggcggtcttcctgattggtagctggctgcgttatgactacgggcagtacacctggcgcgcggcgtccagccagatgctggatcgcaaagggatgaacctggcgtcgaacctgttccatatcgggattctggggatttttgtcggtcacttcttcggtatgctgacgccgcactggatgtatgaagcctggctgccgattgaagtgaaacagaaaatggcaatgtttgctggtggtgccagcggcgtgctgtgtctgattggcggcgtgctgttgctgaaacgtcgtctgttcagcccacgcgtgcgtgcaaccactaccggagcggatatcctgatcctgtcgctgctcgttatccatgcgcgctgggcctgttga

SEQ ID NO: 9284 - DNA, 2013 bp, Homo sapiens
  SIMILAR (28)..(798): 991254mologous to Escherichia coli DNA mismatch repair protein,accession number M64730,Smith-Waterman Score=1283.
atggatgacaatataacgtataccacatttatctgcaacccgctgaatctgtcgccgcagcgccgcatgttgatcatcaccggtccgaacatgggcggtaaaagtacctatatgcgccagaccgcactgattgcgctgatggcctacatcggcagctatgtaccggcacaaaaagtcgagattggacctatcgatcgcatctttacccgcgtaggcgcggcagatgacctggcgtccgggcgctcaacctttatggtggagatgactgaaaccgccaatattttacataacgccaccgaatacagtctggtgttaatggatgagatcgggcgtggaacgtccacctacgatggtctgtcgctggcgtgggcgtgcgcggaaaatctggcgaataagattaaggcattgacgttatttgctacccactatttcgagctgacccagttaccggagaaaatggaaggcgtcgctaacgtgcatctcgatgcactggagcacggcgacaccatggcctttatgcacagcgtgcaggatggcgcggcgagcaaaagctacggcctggcggttgcagctctggcaggcgtgccaaaagaggtcattaagcgcgcacggcaaaagctgcgtgagctggaaagcatttcgccgaacgccgccgctacgcaagtggatggtacgcaaatgtctttgctgtcagtaccagaagaaacttcgcctgcggtcgaagctctggaaaatcttgatccggattcactcaccccgcgtcaggcgctggagtggatttatcgcttgaagagcctgggtaaaaccatgccatctacacgctatcaaaaaatcaatgcccatcactatcgccatatatgggtcgttggtgatattcatggtgaatatcagttattacaatcccgcttacatcaactctcttttttccccaaaatcgacttacttatttctgtcggcgataatattgatcgtggaccggagagtcttgacgtcctgcgcctgctaaaccaaccctggtttacgtcggttaaaggcaaccacgaagcgatggcgcttgaggcattcgaaactggcgatggcaatatgtggcttgccagcggtggtgactggtttttcgatttaaatgattcagagcaccaagaggctatagatctgttgctgaaattccatcaccttccacatattattgaaatcactaacgacaacataatatatgccatcacaacatgcgtaggtaatgctcgccgcgcacacgccgtgcacttctgcggtgacgtagctcgactcctgacttgccagataaacatatacaggggccagttccgccggttgccccgcacgtttcatcggcgtttgctgaccaaactgcgggatcttatcctgcgtttgtccgccggaaatttgcagtgctgtccagatcgggcctggcgcgacaatattcacccgaatacctttctccgcgacctgttttgccaagccacggctgtagttcagaatcgccgccttcgtagccgcataggggatcgcttcctgggagcggtggaacgccgcttcggcaacgatcttccgtcgtctccagtggagtggctgacggataatggttcatgctaccgggctaatgaaacacgccagttcgcccggatgttgggacttgaaccgaagaacacggcggtgcggagtccggagagtaacggaatagcagagagcttcgtgaaaacgataaagcgtgactacatcagtatcatgcccaaaccagacgggttaacggcagcaaagaaccttgcagaggcgttcgagcattataacgaatggcatccgcatagggcaaatccaattacctatcaggcagtttgcgccaatcactaccggaccctgaataacggcaccatgacaaatacgggtattcgcgccgataacaacttcacctgcagtttcatcaataattacctggtctgcaatctgaatatttttctctttaacattaagcttcagatagtttttcagttcctgtga

SEQ ID NO: 9285 - DNA, 3097 bp, Homo sapiens
  SIMILAR (11)..(97): 961254mologous to Escherichia coli substrate-binding protein,accession number D85613,Smith-Waterman Score=131.
atgcggggcgcttcttgccgcactggcattcatcgcttttcaggcacaggcggtgaacgtcaccgtggcgtatcaaacctcagccgaaccgggaaagtggctcaggccgacaacacctttgctaaagaaagcggacaaccgtggactggccggaccagcatcgtgcgggcgctggcttcaggcgacgtgcaaatcggcaacctcggttccagcccgttagcggttgcagccagccaacaggtgccgattgaagtcttcttgctggcgtcaaaactgggtaactccgaagcgctggtggtaaagaaaactatcagcaaaccggaagatctgattggcaaacgcatcgccgtaccgtttatctccaccacccactacagcctgctggcggcactgaaacactggggcattaaacccgggcaagtggagattgtgaacctgcagccgcccgcgattatcgctgcctggcagcggggagatattgatggtgcttatgtctgggcaccggcggttaacgccctggaaaaagacggcaaggtgttgaccgattctgaacaggtcgggcagtggggcgcgccaacgctggacgtctgggtggtgcgcaagattttgccgagaaacatcctgagcgccatcgatgctcagcaaccgtacattgctaacccagacgtgtggctgaaacagccggaaaacatcagcaaactggcgcgtttaagcggcgtgcctgaagctgcccgtaagcaccacggttttaccagcaaacgggctgtcaatctcttccgcgttgataacgatcggcgcaggccagtgaacaccttccgccaacagctcgctgatgacattgcggttgctttcttcggcaaagaagttgtgaacgtgggatgcaacgacaatgccaacatcaggcaccttttgcagctcttcaatcgaagcggcttccagcgcttccagcgtgccgaaatatgccgccagacctgctgcggtggcctcgccgacttcacggatgccaagtgcatagaggaagcgagcaaaggtggtttctttcgctttttccagcgcgttaaccacgttttgtgccgattttggccccatacgctccagtccggtcagtttgcctgcggtgagtttgaacagatctgccggagtatggacatattctttttcaaccagctgatcgatgattttgtcgcccattccgtcaacatccatcgcacggcgggaaacaaagtgtttcagcgactctttacgctgcgcaccgcaaatcagggcaccggtacagcgggcaaccgcttcaccttccacacgctcaacgtcagaaccacataccggacaatgcgtcgggaatacaacctcacggaagagattttatgcgcggcggacgggttactcgacgtgatggagcgaccactggatgcgcgtattctcggcaaacagatcatccgcgaaattctgtactacgtgctgaccggaccttgcggcggcgcgttactggcgctggtcagtcgccagactcacttcagtctgattagccgcgtgctgaaacggattgagaataaatacaccgaaaacctgagcgtcgagcaactggcggcagaagccaacatgagcgtatcggcgttccaccataattttaagtctgtcaccagtacctcgccgttgcagtatttgaagaattaccgtctgcataaggcgcggatgatgatcatccatgacggcatgaaggccagcgcacgagcgatgcgcgtcggctatgaaagcgcatcgcaatttagccggatgaacctggcgtcgaacctgttccatatcgggattctggggatttttgtcggtcacttcttcggtatgctgacgccgcactggatgtatgaagcctggctgccgattgaagtgaaacagaaaatggcaatgtttgctggtggtgccagcggcgtgctgtgtctgattggcggcgtgctgttgctgaaacgtcgtctgttcagcccacgcgtgcgtgcaaccactaccggagcggatatcctgatcctgtcgctgctcgttatccagtgcgcgctgggcctgttgaccattccgttctccgctcagcatatggacggtagcgagatgatgaaactggttggctgggcgcagtcggtggtgaccttccacggtggcgcttctcaacacctcgatggtgtggcgtttatcttccgtctgcacctggtgctggggatgacgttattcctgctgttcccgttctcgcgtctgatacacatctggagcgtaccggtggagtatctgacacctggttctcttaatcttctgataaccggatggcgcgaaacgtcatccggttatacgtcattaatacatcaacttaatgcgctgcgtctgcgcgtacttcacatactcatcttccgggcaacaatcgctcaccacaatatcaaagcgtttcaggtcacccatgcgcgccggacgcaccttgccaaatttactgtggtcgacaaccagcacatgcttttgcgccatcgacatggcccagtgttttaccggcaactcttcaagattaaaacaggtaacgcctttactgacatgcacgcccgccgaataataaaaagcgatatcccggcaaaaattattcacgcgtttgctgaaaatcgatgggtttgaaaatggcgttgctggcgtgaaattcaccaccgcaaagaaacgcgcggcaatggggtttctctttcagcgccagaaaggtatttagcgaataacaaacggcggtaaaagggatttcattatcaatcgcttcaataatccacggcgtggtggtgccacagtcaaaaaagagggtctgatcgggttctaccagcgtcgcagccagttttgccgcccggcgtttttcttccaccaggcgggatttttgatcgcttaacaggtaatggctggcactgcgcggttccagaacaatatagccgccgagcaaaacgacgggcgcactgtggttgttcagatcgcgacgaatcgtcatctccgaaaccccaagcagggcggcggcgtctttaagatgtaacttatcgctgcgttttaattcttgcagcagctgcccgatacgctcttcgcgacgtgtttccat

SEQ ID NO: 9286 - DNA, 2458 bp, Homo sapiens
  SIMILAR (412)..(930): 831254mologous to Salmonella enterica subsp. indica GDP- mannose pyrophosphorylase,accession number AY012199,Smith-Waterman Score=770.
atggaaacacgtcgcgaagagcgtatcgggcagctgctgcaagaattaaaacgcagcgataagttacatcttaaagacgccgccgccctgcttggggtttcggagatgacgattcgtcgcgatctgaacaaccacagtgcgcccgtcgttttgctcggcggctatattgttctggaaccgcgcagtgccagccattacctgttaagcgatcaaaaatcccgcctggtggaagaaaaacgccgggcggcaaaactggctgcgacgctgcccggggaaagcgatggcccctcgatccggatctcaatgtattcgcgtgagaagaagcgtttctcgcctgcccggaagagtcggtggattacgcggtcatggaacgtacggcagatgctgttgtggtgccgatggatgcgggcttggagcgatgttggctcctggtcttcattatgggagatcagcgcccacaccgccgagggcaacgtttgccacggcgatgtgattaatcacaaaactgaaaacagctatgtgtatgctgaatctggcctggtcaccaccgtcggggtgaaagatctggtagtggtgcagaccaaagatgcggtgctgattgccgaccgtaacgcggtacaggatgtgaaaaaagtggtcgagcagatcaaagccgatggtcgccatgagcatcgggtgcatcgcgaagtgtatcgtccgtggggcaaatatgactctatcgacgcgggcgaccgctaccaggtgaaacgcatcaccgtgaaaccgggcgagggcttgtcggtacagatgcaccatcaccgcgcggaacactgggtggttgtcgcgggaacggcaaaagtcaccattgatggtgatatcaaactgcttggtgaaaacgacgtccatttatattccgctgggggcgacgcattgcctggaaaacccggggaaaattccgctcgatttaattgacgtgcgctccggctcttatctcgaagaaaatgatgtggtgcgtttcgcggatgacctggacggaggagagggacgccgccagcgcaatggcaggtgccgtgtttcgccctgccggttcgagaataatgttctcggtaagtttgttcagttgacgcagctgttccgcgacaataaagcggtgctgctcattgcaaatcaccaccgggctttcgcactccacgccgttcaggcggcagatggtggtttgcagcatgaaaacccctcagatggaaaagatcttgaagatgcgacccagaccgttctgctgccaggcgatttaagcgatgagaaatttgcccgttcgctggttcacgaagcgcacaaggcgttaggcgggctggatattatggcgctggtcgccgggaaacaggttgccattccggatattgcagacctcaccagcgaacagtttcaaaagacctttgccattaacgttttcgcgctgttctggctaacccaggaagcgatccccctgctaccgaaaggtgcaagtatcatcaccacttcgtcaatccaggcataccagccaagtccgcatttactggactatgcggctacgaaggcggcgattctgaactacagccgtggcttggcaaaacaggtcgcggagaaaggtattcgggtgaatattgtcgcgccaggcccgatctggacagcactgcaaatttccggcggacaaacgcaggataagatcccgcagtttggtcagcaaacgccgatgaaaccgtcgctttgccggtgccgtcgcgccgcaatatctgaatatcaccaccggaggacagcactaatgcaattcctgaatatgttcttctttgatatctacccgtacatagccggggcggtcttcctgattggtagctggctgcgttatgactacgggcagtacacctggcgcgcggcgtccagccagatgctggatcgcaaagggatgaacctggcgtcgaacctgttccatatcgggattctggggatttttgtcggtcacttcttcggtatgctgacgccgcactggatgtatgaagcctggctgccgattgaagtgaaacagaaaatggcaatgtttgctggtggtgccagcggcgtgctgtgtctgattggcggcgtgctgttgctgaaacgtcgtctgttcagcccacgcgtgcgtgcaaccactaccggagcgaatatccggatcctgtcgctgctcgttatccagtgcgcgctggccctgttgaccattccgttctccgctcagcatatggacggtagcgagtatgatgaaactggttggctgggcgcagtcggtggtgaccttccacgtggcgcttcacaacacatggatgtttatcacaccatggatgtcatgtgggatgaacacagtgattacacagccatgttgaagtggagctgtgatacacagctgcgcacagcaagcacagaacagtacacagagcagcaagcagagttcaagtgtagcagagtgaagcag

SEQ ID NO: 9287 - DNA, 720 bp, Homo sapiens
  SIMILAR (531)..(620): 931254mologous to Escherichia coli Glycolate oxidase subunit GlcD,accession number D90811,Smith-Waterman Score=141.
ttagtctgtgtattcggctccatttactgccttttcagcccgcgtaacccgaaacatgtggccacctttgggcatatgtttggccgtcttgcgccgctgtttggcctttatttcaaggtgcatgtcctcggctaacgttcggtcaccccagtcactgatattgtgaagctcctggagttcactcgcttgcgccttcctggctacacgaaatccatagagtaaacaaacatcacctttcagtgcgctattgcagcagcctgaaagaatagtgtatcgaccccccgcggcggcggcaccggcactaacggtcaggcgctcaaccaggggattattgttgatatgtcccgccatatgaaccgcatcatcgaaattaaccctgaagagggctgggtgcgcgttgaggccggggtgataaaagatcaactcaatcagtacctgaaaccgttcggctacttttttgcgccggaactttcgaccagcaaccgggcaacgctcggtgggatgatcaataccgatgcatccggtcagggatcgttggcgtacgcgcggtgttgttggggggcgatattctcgatacgcaacctttacccgtcgaattggcggaaacgctgggtaaatctgctgaatgatatgcacacgatctggagcgtcttggtggatgttgccacagaaaggaattgtcgttgttactacgataatgaacggatgctgacacaacat

SEQ ID NO: 9288 - DNA, 4653 bp, Homo sapiens
  SIMILAR (2350)..(3150): 891254mologous to Escherichia coli O157:H7 aspartokinase II and homoserine dehydrogenase II,accession number AE005625,Smith- Waterman Score=1162.
atggtgaccggcattcttccgctgttgattagcctgctggttatcatgaacgcactgattaattttatcggtcagcatcgtattgaacgttttgctcaacgttgcgccggtaaccctgtttcccgttacctactgttaccgtgcattggcacgtttgtcttttgcaatccgatgaccctaagcctgggtcgctttatgccggaaaagtacaaacccagctactacgcggcggcctcttatagctgccactcaatgaatggcctcttcccccatatcaaccctggcgaactgtttgtttatcttggcattgccagcggtctgacaacgctgaacctgccacttggcccactggcgtgcagcagctgctggagatcccactacggaatagtcgcgcgcatcttccagcgaaacgccacggttgaggaacgctggcaccaccacttcatcgttaaagatttgcggaataccggtaccgaagcgaatggtttcggcggttttcatcaggaacggcgtgtcgatcaaggcgttagtgcgcacgccgaggttcggttgcggcgtcaaggcaaaggaacgaaagcacgttcaccgcgctacgtccgttctcggttaacccgccgagcagtgcggtatagtgatcatcccaccgagcgttgcccggttgctggtcgaaagttccggcgcaaaaaagtagccgaacggtttcaggtactgattgagttgatcttttatcaccccggcctcaacgcgcacccagccctcttcagggttaatttcgatgatgcggttcatatggcgggacatatcaacaataatcccctggttgagcgcctgaccgttagtgccggtgccgccgccgcggggggtcgatacactattctttcaggctgctgcaatagcgcactgaaaggtgatgtttgtttactctatggatttcgtgttgcaggaaggcggcaagcgagtgaactccaggagcttacaatagccgagcgcgtacgggcggagctggcgcgttttctcgaaaacccggcagatccgcgttatctggcggcgagctggcaggcaggccataccggcagtggcctgcattatcgccgttatcctttctttgccgccttgcgtgaacgcgcaggtccggtaacctgggtgatgatgatcgcctgcgtggtggtgtttattgccatgcaaattctcggcgatcaggaagtgatgttatggctggcctggccattcgatccaacactgaaatttgagttctggcgttacttcacccacgcgttaatgcacttctcgctgatgcatatcctctttaacctgctctggtggtggtatctcggcggtgcggtggaaaaacgcctcggtagcggtaagctaattgtcattacgcttatcagcgccctgttaagcggctatgtgcagcaaaaattcagcgggccgtggtttggcgggctttctggcgtggtgtatgcgctgatgggctacgtctggctacgtggcgaacgcgatccgcaaagtggcatttacctgcgacgtggggttattatctttgcgccgatctggattgttcgccgatggtttgaaatgacgccgacccagtggagcaactatttcttcgagaacctgttcaagtatgagtgggtacagacccgcagcccggctggcgcaatccagttcgaagcggtagacgcaccggaaattatcccggatccgtttgatccgtcgaagaaacgtaaaccgacaatgctggtgaccgacctgacgctgcgttttgatcctgagttcgagaagatctctcgtcgtttcctcaacgatccgcaggcgttcaacgaagcctttgcccgtgcctggttcaaactgacgcacagggatatggggccgaaatctcgctacatcgggccggaagtgccgaaagaagatctgatctggcaagatccgctgccgcagccgatctacaacccgaccgagcaggacattatcgatctgaaattcgcgattgcggattctggtctgtctgttagtgagctggtatcggtggcctgggcatctgcttctaccttccgtggtggcgacaaacgcggtggtgccaacggtgcgcgtctggcattaatgccgcagcgcgactgggatgtgaacgccgcagccgttcgtgctctgcctgttctggagaaaatccagaaagagtctggtaaagcctcgctggcggatatcatagtgctggctgatctgtgccaagaaactgcctggctgcctccaagtggtgggggagctgctggctccacctggatctgggggccttctatcgccttctgggaacaggaagcaggttcccatctgatagatataaaggtctgtcagctgcataaatttggtggcagtagtctggctgatgtgaagtgttatttgcgtgtcgcgggcattatggcggagtactctcagcctgacgatatgatggtggtttccgccgccggtagcaccactaaccagttgattaactggttgaaactaagccagaccgatcgtctctctgcgcatcaggttcaacaaacgctgcgtcgctatcagtgcgatctgattagcggtctgctacccgctgaagaagccgatagcctcattagcgcttttgtcagcgaccttgagcgcctggcggcgctgctcgacagcggtattaacgacgcagtgtatgcggaagtggtgggccacggggaagtatggtcggcacgtctgatgtctgcggtacttaatcaacaagggctgccagcggcctggcttgatgcccgcgagtttttacgcgctgaacgcgccgcacaaccgcaggttgatgaagggctttcttacccgttgctgcaacagctgctggtgcaacatccgggcaaacgtctggtggtgaccggatttatcagccgcaacaacgccggtgaaacggtgctgctggggcgtaacggttccgactattccgcgacacaaatcggtgcgctggcgggtgtttctcgcgtaaccatctggagcgacgtcgccggggtatacagtgcccgaccgcgtaaagtgctgaatcgcgaaaaagtagatttagtcatcagcgacctgcggatggatgaaatggacggtatgcagctgtttgctgaaatccagaaagtgcagccgggaatgccggtaattattcttaccgcgcatggttctattcccgatgccgttgctgcaacacagcagggcgtttttagtttcctcaccaagcctaatgcagcttgctgctgtcgatctagaggatcccctaagtccgggattcaactggctgaactggacgagctggcagctgcggtcgctgaactaccgcgtttacgtctgcgcgggttgatggcaatccctgcgcctgagtcagaatatgtaaggcagtttgaagttgcacgccaaatggctgtagcatttgccggactgaaaacgcgctacccgcatatcgacacgctctctctgggaatgtcggacgatatggaagccgccattgcggcaggtagcacgatggttcgtatcggcactgcaatttttgatgtaattgtcatcaaaggcgggaatactgttaagattcatagattacctctcagtgtgaaacggaaggttgtgatgaaaccggcaagagtccctcaaactgtcgtggctcctgattgctggggcgatttgccctggggaaagctttatcgcaaggcgctggagcgccagctcaacccgtggttcactaaaatgtatggttttcatctgcttaagattggcaatttaagcgcagaaatcaattgcgaagcgtgcgcggtttctcatcaagtgaatgtttctgcgcaaggaatgcccgtccaggtacaggcggacccacttcatcttccttttgccgataaatccgttgatgtttgtctactggcacatacattgccgtggtgcaccgatccgcatcgtttattgcgtgaagccgatcgggtattgattgatgatggctggctggtcattagtggcttcaatcccatcagttttatgggattacgcaaacttgtgccggtattgcgcaaaacctcgccctataacagccggatgtttactctgatgcggcagctggactggctctctttgttgaattttgaagtgctacacgccagccgtttccacgttctcccgtggaacaaacacggaggaaaactattgaatgcgcatattcctgcgcttggttgcttacaacttattgttgcccggaaacggactattcctttaacgctaaatccgatgaaacagagtaaaaacaagccacgaattcgccaggcgctttcctattccctgagacacaacaatattgaaattaggccaattaataaccctataatggcctctaagtgttcaaatggaaagaagtgtcacacatctctcactttaaatcataagctggaaatgattaagcttagtgatgaaggcatattgaaagctgagataacagtttcaggcaaccagtcaccctcagacttttccagcctagagatgggcaataggctaaagggtgcaggactgatttttgcccacctcttgttccacgtttccaatgggctactggacacgcgccaccggctgatggttactacatctcctctggtcattattatccagaccactgaaaatatctcctaa

SEQ ID NO: 9289 - DNA, 819 bp, Homo sapiens
  SIMILAR (584)..(817): 1001254mologous to Escherichia coli Glycolate oxidase subunit GlcD,accession number D90811,Smith-Waterman Score=382.
ctgctgctcgactctagaggatcttttgcaaacgtaacaataccggccaggtggcgataaccaccgtaccggcccatgcaaagccgagaataaagggtttgaacaaatccacagacatgccacaatcatgatggctaaaaacagcaccgaaagcagaatttgtgcgacatccctgggctgacgaacatttaccataactacttttcaccttttttgtgcgtcaaatcgtcgacgcgacgtgaacacgcgaaactcacctgcataatgatgagcaatttcagcggtttttaacaggccgattctgcccttaattctgatgggcgtgttagaaaaaaatgtggtacaacaactcaggcaacacgcaaacgatttactcgtcgtatttcaagttgcatgtgctgcggctacgttcgttcaccccagtcacttactattgtaagctcctggagttcactcgcttgccgccttcctgcaacacgaaatccatagagtaaacaaacatcacctttcagtgcgctattgcagcagcctgaaagaatagtgtatcgacctacatcacagaccgcaggaaagggtcaatataatgattccacagatttcccaggcacccggcgtcgttcaactggtgcttaattttttgcaagagctggagcaacaaggttttaccggcgatacggcgacaagttatgccgatcgtctgacaatgtcgaccgacaacagtatttaccaacttctccccgatgcggtggtatttccgcgttcaaccgcagatgtggcgctgatcgcccgtcttgccgcgcaggaacgctattcatcgct

SEQ ID NO: 9290 - DNA, 768 bp, Homo sapiens
  SIMILAR (181)..(765): 941254mologous to Escherichia coli Glycolate oxidase subunit GlcD,accession number D90811,Smith-Waterman Score=977.
  misc_feature (1)...(768): n = a,t,c or g
atgcaggaatggggtcgatacactattctttcaggctgctgcaatagcgcactgaaaggtgatgtttgtttactctatggatttcgtgttgcaggaaggcggcaagcgagtgaactccaggagcttacaatagggtaccgagctcaaaaaaatagggtttccagctggtgttactgccattttcggcaaatggcaaaagcccagcatattaaaggttttctaaatcgtttgcggaagacggcgaaaaagacgngggatttcctcacccgtatgccgaagctgggtatgacaatggtgggcgtcgatccggcgctggtactttgttatcgcgatgaatataaactggcgctgggcgaggagcgtggcgagtttaacgtcttactggcgaatgaatggctggcaagcgcacttgagtcacagccagtggctacagtcagcggtgaatcatggtatttctttggtcactgtaccgaagttaccgccttgccgggtgcgccagcacaatgggccgcgatatttgcccgttttggcgcgaaactggaaaatgtcagcgtgggttgctgcggcatggcagggacttacggacatgaagcgaaaaaccatgaaaattcgctcgggatctatgagttatcctggcatcaggctatgcagcgactgccgcgtaaccgctgtctggcgaccggatattcctgccgtagccaggtaaaacgggttgaaggcacgggggtacgccatcctgtgcaggctttactggagattattaaatga

SEQ ID NO: 9291 - DNA, 1713 bp, Homo sapiens; identical to SEQ ID NO: 9271
  SIMILAR (1)..(513): 1001254mologous to Escherichia coli ATP synthase beta subunit (atp-8),accession number J01594,Smith-Waterman Score=859.

SEQ ID NO: 9292 - DNA, 2562 bp, Homo sapiens
  SIMILAR (1888)..(2547): 991254mologous to Escherichia coli EPSP synthase,accession number X00557,Smith-Waterman Score=1129.
atggccacctcctccccacgaccgattctggttatcaccagcggcaggcagcttccctcggcgagggtcctcttgatggctctgcagacaggacgggggctctctgaagaggggagtccatgccccagctccttccaccccctgactgactccggtgcttccccatatggtcctgttgtgctgtcgaatcgtcagttgtacaataaggaccaatcaccggatgcatcatccagaccatggacggtgcagtcaatcaccctcagtcccctgcaaggtctgaggcttgctgggagccttcccaagcctgatggccttcacacttctaaggccacagcattgagtgcccagggcctgagctccggtccctgctgcacaggcccattcaggcaatcggctcaacaaggtggcccagtcacaaacaagagagactggcttcaacaaaaaggagaaggtgctggctcccaaaatgtaaaagtgttggactgggctagcttcagccatggctggatccagcagctaatgagaaaactacagcccagagagggaagtaactttgctgaaataagtaagtctatgactgacgccaagaagtcctgccttcctcgctacgtgtacctcgccagtatttttacagactccccacttctcttcctcgtctccttccacatgcccttcaaatgtccagccctggtcaaactgacccgctcacaagtctctaagacactgctgggtcaagcctcagtgcgtttgcccaggcccagttcaacagtcacttccttgacgcctcataatggtcaccactgcctgcctatctctgctgctgcccttaccacagacaccgtggacagcagctcgtggctgtgccccccacgcctccgcttgctgctgccagccggcctccacgaacacttctactgtctcctgacctctccacagccagaggacacgagggacgccccttgcagatacttccaatgtgctgactgctggcaccagaggacagtgctgcccccatcccgccctggctccatgagggcaaggggactgtgcgggcggcgttctggtccggcaatgctaccggcagaggtgcttaaacaggctcaacaggaactgcgcgactggaacggtcttggtacgtcggtgatggaagtgagtcaccgtggcaaagagttcattcaggttgcagaggaagccgagaaggattttcgcgatcttcttaatgtcccctccaactacaagattgaaaagcgcttcctgcgtgaatcccggtgcttaacttctgggtctgtacatattcgcgacaaagagtgcgcactgtgttttaccaacggtaaaggcgcaaccaagaaagcggcgctggcttctgcactcggtgaatatttcgagcgtctctcaaccaactacttttttgcggacttctggctgggcgaaaccatcgccaacggtccgttcgtgcattatcccaacgaaaaatggttcccactgaccgaaaatgacgatgtgccagaagggctgctcgatgaccgtctgcgcgcgttttatgatccggagaatgaactgaccggcagcatgctgattgacctacaatccggtaacgaagatcgtggtatttgcggcctgccgtttacgcgtcagtccgacaatcagaccgtttatattccgatgaatatcattggtaacctgtacgtctccaacggtatgtccgcaggtaatacccgcaacgaagcacgcgttcagggattgtctgaagttttcgaacgctacgtgaaaaaccgcattattgctgaaagcatcagcctgccagagatcccggcagacgtgctggcgcgttacccagcagtagttgaagccatcgacacgctggaagcggaggagtacatctatccggcaatgcgtccgctggcggcagctctttgtctgggtagcaatgatattgtgctgaccggtaggccgcgtatgaaagaacgcccgattggtcatctggtggatgcgctgcgcctgggcggggcgaagatcacttacctggaacaagaaaattatccgccgttgcgtttacagggcggctttactggcggcaacgttgacgttgatggctccgtttccagccaattcctcaccgcactgttaatgactgcgcctcttgcgccggaagatacggtgattcgtattaaaggcgatctggtttctaaaccttatatcgacatcacactcaatctgatgaagacgtttggtgttgaaattgaaaatcagcactatcaacaatttgtcgtaaaaggcgggcagtcttatcagtctccgggtacttatttggtcgaaggcgatgcatcttcggcttcttactttctggcagcagcagcaatcaaaggcggcactgtaaaagtgaccggtattggacgtaacagtatgcagggtgatattcgctttgctgatgtgctggaaaaaatgggcgcgaccatttgctggggcgatgattatatttcctgcacgcgtggtgaactgaacgctattgatatggatatgaaccatattcctgatgcggcgatgacctttagggcgctgtga

SEQ ID NO: 9293 - DNA, 1416 bp, Homo sapiens
  SIMILAR (705)..(1001): 951254mologous to Escherichia coli ATP synthase beta subunit (atp-8),accession number J01594,Smith-Waterman Score=469.
cgccaatgtggcggaacgtcgggagcacgccggacgcagcgggcggacaaggaatgggagtcttgccaagtcgtgagggccccgacggcggagccccaggcctcagcggcagggggcgcacacgacccgggccagaatgcgggaccaaaaaacctagcgagcacaggccagcggtgacggggcaccctcctgccgcgggtaggttgcgagctcggcacgccgcgggttgccagttcacgggcccgcccctcttcaagggcctgggaactcacaggatcggctgggagcggtaccaatcgttgcggcctgaggggacccctcgtaaagggcggaaaaggaggtaggttccctagcgcgcggttaattcaaaccgtaaaaaagggggggacgcccagtcgggaccacgcgatgcgagccctccggttacctctgtgagtgcgggcgtaggtgaaacgtactcgtgagggtaacgacttctaccacgaaatgaccgactccaacgttatcgacaaagtatccctggtgtatggccagatgaacgagccgccgggaaaccgtctgcgcgttgctctgaccggtctgaccatggctgagaaattccgtgacgaaggtcgtgacgttctgctgttcgttgacaacatctatcgttacaccctggccggttaggaaagattcgccactgtggggcggtaagcttccaaccggtaggttatcagccgaccctggcggaagagatgggcgttctgcaggaacgtatcacctccaccaaaactggttctatcacctccgtacaggcagtatacgtacctgcggatgacttgactgacccgtctccggcaaccacctttgcgcaccttgacgcaaccgtggtactgagccgtcagatcgcgtctctgggtatctacccggccgttgacccgctggactccaccacccgtcaactggacccgctggtggttggtcaggaacactaccacaccgcgcgtggcggttagtccattcctgcagcggttttcaggaactgaaggacttcatggcccttcctggctttcggatgaactgtctgaagaagacaaactggtggtagcgcgtgctcgtaagatccagcgcttcctgtcccagccgttcttcgtggcagaagtattcaccggttctccgggtaaatacgtctccctgaaagacaccatccgtggctttaaaggcatcatggaaggcgaatacgatcacctgccggagcaggcgttttacatggtcggttccatcgaagaagctgtggaaaaagccaaaaaactttaacgccttaatcggagggtgatatggcaatgacttacctcctggacgtcgtcagcgcagagcaacaaatgttctctggtctggtcgagaaaatccaggtaacgggtagcgaaggtgaactgg

SEQ ID NO: 9294 - DNA, 530 bp, Homo sapiens
  SIMILAR (1)..(309): 1001254mologous to Escherichia coli ORF_f282,accession number U18997,Smith-Waterman Score=545.
  misc_feature (1)...(530): n = a,t,c or g
atgccggtagaagccagtcagctctcagccagctggcagaattttggcccgacgcttgaagcacacgacatccgtgcagaactaaaagatggcggcgaattttcggttaaacgcgttactctggcgctggatgtctggcagagcctgttacatatgcgctggcagtttcgcgacctcactttctggcagctgcgctttcgcaccaacactcctatcaccagcggtggtagtgatgacagtctggaagccagtcacatcagcgatctgtttcttcgtcaatttgaccatttcgatcttcgcgacagtgaacacggcgtgatgcaggtgcgcatggatttgcgcgatgatgaggggttgttaagcaatggtcgcgtctggctccaggcggatgacatcgacctgaagccgtggctcggtaaatggatgcaggacaatattgcgctggaaacggcacagttctcccttgaaggctggatgacgatcgacaaaggcgatgtaaccggcggtgacgtctggctgaaacagggcng

SEQ ID NO: 9295 - DNA, 837 bp, Homo sapiens
  SIMILAR (422)..(120): 1001254mologous to Escherichia coli INAA PROTEIN,accession number D90855,Smith-Waterman Score=525.
atcagttaataccgcaagggagggccatcaaatggctgatgaaattgatgcaatggctttatatcgagcctggcaacaactggataatggatcatgtgcgcaaattagacgtgtttcagaatatggcgaacataacaacagccatgctgacgattaatgctatgcattttcttaaacgccagcgccactgctttcaacatggcttgccgtacttcgtcagaataaggcgatactgcatgctgggcataccagtcagcaatgctgatgaaccccgccatatcttcagtcaccagcaacgctcgccattcaccctcaattttcaccgcttcaccaaaaacgatcttcggcacgatgacaccggcccgttccagttctttaattaccgcaacctcacggacaatcgttggtcggccgaacggataactgaagtcagtttcctgacgccatccggtcagcgcgccgagctggcgatcccacaactcacctggctgaacgatccacgtcgacaccgtgcggaaggcctggtaagcctctccagccttaccggacagcacggcgtgatgcaggtgcgcatggatttgcgcgatgatgaggggttgttaaacaatggtcgcgtctggctccaggcggatgacatcgacctgaagccgtggctcggtaaatggatgcaggacaatattgcgctggaaacggcacagttctcccttgaagatcaaaaggaaacaaaaatcattgtaaaccatgccatctttttagagattaccagcagaaaattccttgttcgaaatttagcagtgcaagctatggaaaaacttacaacggaactacactccttaa

SEQ ID NO: 9296 - DNA, 2241 bp, Homo sapiens
  SIMILAR (4)..(798): 811254mologous to Escherichia coli Acriflavin resistance protein F (EnvD protein),accession number D90846,Smith-Waterman Score=1002.
tcggtggcggtcctgagagaataggccccgaaaatccgaatccagctggctacgatgccggaactggcggacgcgagctcggatcagcaggataacggcgcggagatgaatctggtttacgaccgcgacaccatggcgcggctgggaatcgacgtactagccgccaacagtctgttaaataacgccttcggtcagcggcaaatctcgaccatttaccagccgatgaaccagtataaagtggtgatggaagtggatccgcgctatacccaggacatcagtgcgctggaaaaaatgttcgttatcaataacgaaggcaaagcgatcccgctgtcatatttcgctaaatggcaaccggcgaatgccccactatcggtgaatcatcagggattatggcgggccttggaccatttggtttaccctgccgaccggaaaatcgctctgcgaaccccagtgcggcgatcgatcgcgcaatgacccagcttggtgtgccttcgacggtgcgcggcagttttgccggcacggcgctaggtgttccaggagacgatgaactcgcaggtgatcctgattatcgccgccatcgccacggtgtatatcgtgctgggtatcctttacgagagttacgtacatccgctgacgattctctccaccctgccctcggcgggcgttggagcgctgttggcgctggagctgttcaatgccccgttcagcctaatcgccctgatagggatcatgctattaatcggcatcgtgaagaaaaacgccattatgatggtcgattttgcgcttgaagcccaacgggcacggtaacctgacgccgcaggaagctattttccaggcctgtctgctgcgttttcgcccgattatgatgactaccctggcggcgctgtttggtgcgctgccgctggtattgtcgggcggcgacggctcggagctgcggcaaccccctggggatcaccattgtcggcggactggtaatgagccagctccttacgctgtataccacgccggtggtgtatctctttttcgaccgtctgcggctgcgtttttcgcgtaaacctaaacaaacggtaaccgacacccgttggcaattgtggattgtggctttcggcttctttatgcagtcgctggacaccaccatcgtaaacaccgcccttccctcaatggcgcaaagcctcggggaaagtccgttgcatatgcacatggtcattgtctcttatgtgctgaccgtggcggtgatgctgcccgccagcggctggctggcggacaaagtcggcgtgcgcaatattttctttaccgccatcgtgctgtttactctcggttcactgttttgcgcgctttccagcactataaggataatactacgtttcgtcagcctgttacatatgcgctggcagtttcgcgacctcactttctggcagatgcgctttcgcaccaacactcctatcaccagcggtggtagtgatgacagtctgatgaaccagtcacatcagcgatctgtttcttcgtcaatttgaccatttcgatcttcgcgacagtgaagtcagtttcctgacgccatccggtcagcgcgccgagctggcgatcccacaactcacctggctgaacgatccacgtcgacaccgtgcggaaggcctggtaagcctctccagccttaccggacagcacggcgtgatgcaggtgcgcatggatttgcgcgatgatgaggggttgttaagcaatggtcgcgtctggctccaggcggatgacatcgacctgaagccgtggctcggtaaatggatgcaggacaatattgcgctggaaacggcacagttctcccttgaaggctggatgacgatcgacaaaggcgatgtaaccggcggtgacgtctggctgaaacagggcggtgccagctggttgggcgagaagcaaacgcatacgctgtcggtggataatctgaccgcgcatattacgcgtgaaaatccgggctggcagttctctattcccgatacacggatcacgatggacggcaaaccctggccgagcggagcattgacgctggcctggataccggaacaggacatcgcgattaaacagacgaaacagagcaatattcgccatccaggtcatcccgcggtgtttgttttgatgaccctgcggaataggtctgatggggtgaccgctctcttttgcccgccttatgccgtaaccgtagacaaatgtgacgccagcccctgttgcagcgcacgctggtggggaacttaa

SEQ ID NO: 9297 - DNA, 3396 bp, Homo sapiens
tcaaaactctgacgaaaaacaggctgtcgtcagttttgacgtgacgaaacgaaataccgcgtgacagccatcacgcggcagacattttattttttctcgacgacgggacctgcctgatacccgccgcccagcgatttcatcaactgaatgctttggatcacccggcggctgtccagcatcagtaatgacatctcttcggcaagcactgatcgtggcagctttccttgcaggctttgagagcggaacatatcgggcgctgcaaatccatagtgactcgatcaccgtgaaaataccgttcagacgacttctaagcgggattacggttaaccttttaacggtgcctgtcgtacttctttgggctgcttctgactgggaccgtcgcctgcctgtggcctcatcgcgcagccctattattcccacgctcggtgtgatcaacatgccagtaacgaagatatctatctggcttctctctttgcgttgggtttcctggtctttggcccgcaattgttgattgttgtgtctgctgttggctttgtacctgattggtgacagctttgccaagttaggtctgggaatgattgccgatgggacgccggtattcggccttaccggctgggcaggcaccttcgccgcgctggatatcgccgcgattggttgtatctggccgttacgtaccacgcacagcccgacggcatcctgaatcacctgattgaccgccagcgccatctcttcggcaaggactttcaatctatggaaatcttgttgctcgtggatctttctacagacacgaacttgctcgtccaccatactagttacggttgcacggccacgctcggtacttccactacgaccctcgctcaaaacggcacagatggatcgctggattagccagcaagttccgtttttattgatggttgtgcgtacggcatccccgcgaacaaactgcccggtatcaccgttttctgcatccggtcccccttccgccccggtattaacaacggtatccgttgccactgtaccgggcttgacgacctgccagcccttatcattaatgacggttcctgtggctatcgccccctcatgcatccactgttcgccaataacccagcgcactatgcggatgccattcgttataatgctcgaacgcctctgcaaggttcttgccgtctggttgggcatgatactgatgtagtcacgctttatcgttttcacgaagctctctgctattccgttactctccggactccgcaccgccgtgttcttcggttcaagtcccaacatccgggcgaactggcgtgtttcattagcccggtagcatgaaccattatccgtcagccactccactggagacgacggaagatcgttgccgaagcggcgttccaccgctcccagcatgacgtcctgtactgtttcactgttgaagccgccggtagtgaccgcccagtgcagtgcctcacgatcacagcagtccagcgcgaacgtgacacgcagtctctctccgttatcacagcagaactcgaacccgtcagagcaccatcgctgattgctttctttcacggccactctgcctgtatgtgcccgtttcgatggcggtacagcaggttttcgctcaagcaacagcgcattctggcgcatgatccggtaaacacgtttggcattgatcgcaggcataccatcaagttctgcctgtctgcgaagcagcgcccatacccgacgataaccatacgttggcagctctccgataacatggtgtatacggagaagcacatccgtatcatcagtgtgacgactgcggcggccatccatccagtcatcggttcgttccccatccccgggcaataagggcgcgtgcgctatccacttttttgcccgtccatattcaacggcttctttgaggagttcattttccatcgttttcttgccgagcaggcgctggagttctttaatctgcttcatggcggcagcaagttcagaggcaggaacaacctgttctccggcggcgacagcagtaagacttccttcctggtattgcttacgccagagaaataactggctggctgctacaccatgttgccgggcaacgagggagaccgtcatccccggttcaaagctctgctgaacaattgcgatcttttcctgttgtggtacgccgtctgcgtttctccggcccacacaccacgacgtcaggtccgcctttagatgtcggctacaactcgtctccagttcacaaggtaatcccgttactccaatgcttctccgcccaagatcccttgcagattcaccgcagctccactcaagtggacacggcaatattcggcagttgtcaacactccagtcaattccagtagacgccactccatctcgcatcccaataggcggccgaattgctcccatagcggcacaccacagttctcgacatgcaacaagacacaaccaggggtggcaccacgcggtgcccactaaatcgtccagcagaatcactttgccgatatacggcagatgacggtaacgctgtgcgtaatcaatgccgtaacccaccacaaactcatccgggatcgagaaaccgataaattctaccgggacgttcacttcacgacgggacggtttatccagcagcgtacaaatcgccagcgacttcggttcgcgcaggcttaagatctcacgcactttcgacagtgtattccccgagtcgatgatatcttcaacaatcagcacgtccttgccacggatatcttcatccagatctttgaggattttcacatcacgggtggtggacatgccgctaccgtagctggaggcggtcataaagtcgacttcatgagatacctgaacttcacggcacaggtccgccataaacataaatgagccacgcagcagacccaccagcaccatatcgctgccgctgtctttgtaacgctcagtaatctgacgacccagttcggcgatacgcgctttaatctccgcttcggggatcattacttctacagtatgtttcatatctctaaccatatgatttttaaacaaatcacttcgcacgggcaggttttgggggcgcaaaaaaaagggagaaaagcaggatacccgtgaaaaaattcttcgccgggagaaggggataaaggcgcggttagcgaaacggtgatgtggaccaataacatcacttatatgagcattgttggcctgagcgcgacctgggatgtgacgaagaatgtcagtctgaccggcggcgtggacaatctgttcgacaaacgtttgtggcgtgcgggtaatgcccagaccacgggcgatttggcaggggccaactatatcgccggtgccggggcgtatacgtggtatatgagcgtaaacacccacttctgatgctaacgtcagattgttgacaaagtgcgcgtcgttcat

SEQ ID NO: 9298 - DNA, 1116 bp, Homo sapiens
  SIMILAR (1116)..(646): 901254mologous to Escherichia coli K12 hypoxanthine phosphoribosyltransferase,accession number AE000122,Smith-Waterman Score=705.
ttacggctcaaacgggcgtctctggaactggtcatgaccacatttcgggcatagcgtcagcacttccggtgtgtagatcgggagatggaagtgacatttctcgcagaccagatttcccagcccgaccacttctccgctgtgataaaccccatgatgattgaggtcctggaaaacttcgcgccattcaagctgcgttttatcggtgatgtctgccagctcctgccacaagctttctttaatcacccgcataaagacgctgtcagattcttctttcaggctctcttcatagctcatggcgaactcttccaggtcacgtctgacagctcgcgtcagctcatcgacctcggttcgcgttaactccccggtcttgagccgggcgaactctttgttcaccgtaatgttgctaacctggtcattcacactgacctgaactgcctttccgtggttcagtatgcagtggatgtactcgaagttgaacacattattatctgtggccactacggttgcggcggcgtacaagccgcagttgaaaacccggaactggggcttatcaacaactggctgctgcatatccgcgatatcattcacggctgggcctacggcattcacgacggcttgctgcgtgatctggatgttaccgccaccaaccgcgaaacccttgagcaacgttaccgtcacgggatttccaacctcaagcgggacgttcacttcacgacgggacggtttatccagcagcgtacaaatcgccagcgacttcggttcgcgcaggcttaagatctcacgcactttcgacagtgtattccccgagtcgatgatatcttcaacaatcagcacgtccttgccacggatatcttcatccagatctttgaggattttcacatcacgggtggtggacatgccgctaccgtagctggaggcggtcataaagtcgacttcatgagatacctgaacttcacggcacaggtccgccataaacataaatgagccacgcagcagacccaccagcaccatatcgctgccgctgtctttgtaacgctcagtaatctgacgacccagttcggcgatacgcgctttaatctccgcttcggggatcattacttctacagtatgtttcat

SEQ ID NO: 9299 - DNA, 831 bp, Homo sapiens
  SIMILAR (171)..(593): 951254mologous to Escherichia coli K12 putative carbonic anhdrase (EC 4.2.1.1),accession number AE000122,Smith-Waterman Score=721.
gggttttttgagaaactggcacaagccgcaaaaaccgcgctttctatggattggatgttccgacagtcgcgttcctgcagaacgtttaaccggtcttgagccgggcgaactctttgttcaccgtaatgtggctaacttgttcattcacactgacctgaactgcctgtccggtggttcagtatgcagtggatgtactcgaagttgaacacattattatctgtggccactgcggttgcgggggcgtacaacccgcagttgaaaacccgaaagtggggcttatcaacaattggttgctgcatatccgcgatatctggttcaaacatagctcattgctcggctaaatcccgcaagagccccgtctggataccttgtgtgaactgaacgtcatggaacaggtgtataacctgggccactccaccattatgcaatcagcgtggaaacgcgggcagaaagttaccattcacggctgggcctacggcattcacgacggcttgctgcgtgatctggatgttaccgccaccaaccgcgaaacccttgagcaacgttaccgtcacgggatttccaacctcaagctgaaacacgccaaccacaaataaaaatgccatgccggatgcaacacatccggcaacttcacacttactcgtccagcagaatcactttgccgatatacggcagatgacggtaacgctgtgcgtaatcaatgccgtaacccaccacaaactcatccgggatcgagaaaccgataaattctaccgggacgttcacttcacgacgggacggtttatccagcagcgtacaaatcgccagcgacttcggttcgcgcaggcttaa

SEQ ID NO: 9300 - DNA, 1104 bp, Homo sapiens
  SIMILAR (1089)..(862): 801254mologous to Escherichia coli Flagellar biosynthetic protein FlhB,accession number D90830,Smith-Waterman Score=284.
atgcctgcaggtctacctcaggaagaaaagatggaaaaagaagattcatttccccaacgcgtctggcaaatcgtcgccgctattcccgaagctgatgtcaccacttacggtgatgtggcgaaactggcgggatccccgcgccgcgccatggtgggctgtgtgttaaagcgtctccctgaaggcagcaccttaccctggcaccgggtggttaatcgccacggcacaatttcgctaaccggaccggatttacagcgtcagttcaggcattactggcagaagacgtatttgcatccgttgctgcttcgaattatcgcgcttttacctgccaaccgccaacgcaatccaaccgctaaaccctgccatgtgaccagtttcatcaattctcctattaccatccccacggctaatttcctcccgaaagtggttacaaatttactcaccagttaccgggataccatcgagatcaatgtggatccacttgtgggtaagccgggcacttgggtaaacaacaggtcgagtatgaatgcgggcagtggcagcaccatcatcgacaagatcaacaggatcaaaatcggtccggcaaggatctgccattgtgtcgatttcaggtttgcgggcaggcggcagcatcgcggccagattactcatgggtcggctttgtcgttaataaaatgcagggcttccggcaccggaagatgagtaggttgtacagggcgctgtccaccagccagacgccagcgtttcagttgccagacccaggtcagcacttccgccaccgcggcgtacagttgacccgggatttgttgaccaatctccgcatgtcgatacagcgctcgcgccagcggcggcgcttcaagcgtcggggacgttattttcagcgccaattttccgaatgcccagcgcgaccagccctgcacctttagcgaccactttcggggcgctcattttgttttccggctactggaacgctaccgaatagtggcgtcgggtttattgacaattgacctccgcttttggcacatcggcccttatcctacgccgtgcagcagctcgctgcatctgacggatccgccctttaacatgagggtcacttcgccttgttga

SEQ ID NO: 9301 - DNA, 714 bp, Homo sapiens
  SIMILAR (4)..(552): 821254mologous to Escherichia coli o361,accession number L10328,Smith-Waterman Score=812.
acaaggaggctgatccccgccagcgttgaggtttatcacgacagcctgtgcccgaaaaatctggcacggctgggagcaacatattaccgcccgctatctggtcggtgcgatggcgcaaactcgatggtgcggcgacatctctacccggatcatcaaatccgtaaatatgtcgctatccagcagtggttcgcggagaaacatccggtgccgttctactcctgcatctttgataattcgataactaactgttattcatggagtatcagcaaagacggttattttatcttctgcggtgcctatccaatgaaagacggtcagacgcgtttcacgacgctgaaagagaaaatgagcgcctttcagttccagtttggtaagacggtgaaaagcgaaaaatgcacggtgctgtttccctcgcgctggcaggattttgtctgcggtaaggacaacgcctttctgattggtgaagcggcgggatttatcagcgccagctcgctggaggggattagctatgcgctggatagcacagacattctgcgttcggcattgcgaaaaccgattcgaacggagcagggcgctaacggggcgatacgggagctggaaaaattccgccagcagggtttttcacctgagcaggtgattcgacacagcatcgccaatgaataccagggcttgttcgcgccgaaaggtgttcgacctgagacgttactccgacag

SEQ ID NO: 9302 - DNA, 3414 bp, Homo sapiens
  SIMILAR (67)..(867): 981254mologous to Escherichia coli PII Uridylyl- transferase,accession number Z21842,Smith-Waterman Score=1381.
atggtgcaagttggaagagcattacgccaaaggctttggaaggaaatacagttcttgctcggtcccgaatgtctgcatatattgtggcgtattcgctttgccctgcatctggtcgtcagccgttacgataatcgcctgttattcgatcgccagcttagcgtcgcccagcgtctgaattacagtggtgaaggtaacgaaccggtcgagcggatgatgaaggattacttccgcgttacacgccgcgtcagtgaactcaaccagatgctgctgcaactgttcgatgaagccatcctcgcccttcccgccgacgaaaaaccacgtccaatcgacgatgagtttcagctacgcggtacgctaatcgacctgcgtgatgaaacactatttatgcgccagccggaagccatcttgcgtatgttctacaccatggtgcacaacagtgcgatcaccggcatttactccaccacgctgcgccagttacgccatgcccgtcgccatctgcaacaaccgctgtgtaatattccggaagcacgaaaactgtttttgagcattctgcgtcaccccggagcggtgcggcgcgggctattgccaatgcatcgccatagcgtgctcggcgcgtatatgccgcaatggtcgcatatcgtcgggcagatgcagtttgatctgttccacgcctacacggtggatgaacatactatccgcgtgatgctgaaactggagagttttgccagtgaagaaacgcgccagcgccatccgttgtgtgtggacgtctggccgcgcctgccgtcaactgagctgattttcatcgccgcgctgtttcacgatatcgccaaaggacgcggcggcgaccactccattctcgccgttcgccagtgcggtcagcacatgttcctggccgacgacgtcagcaaaggtttgtgggtgcccgtcagcaaacagataatcgagggcgtgctgcatatcacgccaaccaatcaactaccaaccacgatcgccccgagcgggatgaacaacgcgccgcccatcaccaccagtgagcctataagcgtaggcgagatcgccagtccggagtggttattcagcacttcccagccaggaagggataaagacatagaaatcgcggacaattggagccaggccctggaagtcgatgttgtcgtagttctgcaacagcaacgccagattctcccacggcgagaaggtgtcgcgagtgagatagagaaacgtatagaacgcttcatcggcggcagaaaatggcaaaaatcccaggaggccggcgggggaggattcacaggaaatcacaaatacgttgcccagtaccatgataatccgcaacagctgcgccgcgtggtcggcacttcatcagcgatggtacttggtttctctacgctgatggcgctggtttttgtgctggcagctgcgccaatcagccagggattgtttggtaataccgactatcaggggctggtgcgtttagtggcgctggtgcaaatggggatcgcctggggcaacctgttactggcgctgatgaaaggctttcgcgatgccgcaggtaatgcgttatcgctgattgtcggcagcttgattggcgttctcgcgtactacgtcagttaccgtttgggcggttatgaaggggcgttgctgggtctggcgctgattcccgcgctggtgttgagcaaatttacgctcatggcgttgattacgtcggtgaccttgcctgttgcttacatcatgatgcgtaaactgctggcggcgcagtatatattgaaagagctggaaagcggtaaatacagcgacggcgataagcatgccttcgaccagatgctgcacagtatcggcaaacagggcggcgatccgtatctggtgatggcggatttcgcagcctatgtagaggcacaaaagcaggtggatgtgctgtaccgcgaccaggaggcctggactcgcgcggcgatcctcaataccgcccgctgcggaagctcgatggaaagcaaacgtctggataatgccgcgctggcggcggggattagccccaattacatcaatgcccacggtaaaccgcagtcgattagcgccgaaaccaaacggcgtttgcttgacgcgatgcatcaacgtaccgccacgaaagtggcggtaacgccagtcccgaatgtcatggtttataccagcggcaaaaaaatgccgatggtggtggagggcagcggcgaatatagctggctgctgaccaccgaagaaggaacgcagtacaaaggccatgtaacggggggcaaagcgttcaatctaccgacgaagctgccggaaggttatcacacgctgacactcacccaggacgaccagcgcgcgcattgccgggtgattgtcgccccgaaacgctgttacgaaccgcaggcgttgctgaataaacaaaagctctttatacgctgcgatcggaaaaaacgcgcgaacgtccgatggacaaacagcaggcatcggacgaaaaacatcgtcgcttccacgacaaagagtctgactttctcgcgttgtgaatctgtggaattatctggcgagcagcaaaaggcgctttcttccaacgccttccgtcgcctgtgtcgtaccgattatctcaactatctgcgcgtgcgcgaatggcaggatatctacacccagttgcgtcaggtggtgaaagaacttggcattccggttaacagcgaaccggcggagtatcgcgaaattcacattgcgttgctgaccggtttactttcccatatcggcatgaaagatgccgataaacaagaatataccggcgcacgtaacgcgcgtttctccatcttccccggttctggtttattcaaaaaaccgcctaaatgggtaatggtggcggaactggtagaaaccagccgcctgtgggggcgcattgctgcgcgtatcgacccggaatgggtggagccagttgctcagcatttgattaaacgcacctacagcgaaccgcactgggaacgggcgcagggcgcggtgatggcaacggaaaaagtcactgtttatggtttgccgattgttgccgcgcgcaaggtcaactacagccagatcgatccggcgttattacatgatacaatcgagctcggtaccagccccgctttcctaatcacacgttggggcttcggcaggaacctcagcaggacctcggggggacctcggcaggaacctcggcgtaaggagatagcaatggaattagtattgaaagacgcgcagagcgcgctgactgtttccgaaactaccttcggtcgtgatttcaacgaagcgctggttcaccaggttgttgtagcttatgcagctggtgctcgtcagggtactcgtgctccgaagactcgtgctgcagtaactggtggcatgccaactctgtatgctgtcggtcgactctcaaggatccccatggacacgtag

SEQ ID NO: 9303 - DNA, 1113 bp, Homo sapiens
  SIMILAR (1113)..(853): 1001254mologous to Escherichia coli pot. PBP 1A,accession number X02164,Smith-Waterman Score=457.
atgtgtaagcctaaatggcgaactgaatcctacgaattaggtttttcgaaaggattaattgatccgggtgaaagcgtctacgaagccgctaaccgcgagctaaaagaagaggttggatttggagcgaacgatctgacttttttgaagaagctcagcatggcaccgtcttacttttccagcaaaatgaatatcgtggtagcgcaagatctctacccggaatcactggaaggcgatgagcagcagccgctaccacaggtgcgctggccgctggcgcatatgatggatttgctggaagaccctgacttcaatgaagcgcgcaatgtcatgggaactgaatcctacgaattaggtttttcgaaaggattaattgatccgggtgaaagcgtctacgaagccgctaaccgcgagctaaaagaagaggttggatttggagcgaacgatctgacttttttgaagaagctcagcatggcaccgtcttacttttccagcaaaatgaatatcgtggtagcgcaagatctctacccggaatcactggaaggcgatgagccagagccgctaccacaggtgcgctggccgctggcgcatatgatggatttgctggaagaccctgacttcaatgaagcgcgcaatgtcagtgcgctgttcctcgtgcgcgaatggttgaaagggcaggggcgagtgtaaatgcgtgaagtttgcctgatgcacaatgtttatcaggcttatggggtttctgcaatttattgagttttcacgattttgttagccggataacgcgttcacgccgtatccggcataaacaagtgcactttgtcagcaaactgaaaaggcgccgaagcgcctttttaatcagaacaattcctgtgcctcgccattatcgataatggtcgttcccacctcgtgcactgcctgttgtgtcggctgcgtaccttcgatgaaatactcttcgcggctgttgccaccattagctaactgcccggtgctgcgatcgatattcaccgtcacaatacccggtggcggcgtcagcggctgctccggcacaccttcaagaacggctttcatataagcgtcccatgcaggctgggcactcttggcaccgccttcgtaacctga

SEQ ID NO: 9304 - DNA, 1870 bp, Homo sapiens
  SIMILAR (14)..(574): 981254mologous to Escherichia coli ATP-dependent helicase HrpA homolog,accession number D90780,Smith-Waterman Score=971.
acgcactgggaacgcggagggcgcggtgatggcaacggaaaaagtcactgtttatggtttccgaattgttgccgcgcgcaaggtcaactacagccagatcgatccggcgttatgtcgtgaactctttattcgccacgcgctggtggaaggtgactggcagacgcgtcacgcattcttccgtgaaaacctgaaactacgggcggaagtagaagagctggaacacaaatcacgtcgccgcgatattctggttgatgacgaaacgttgtttgagttctacgaccagcgcatcagccacgatgtaatctccgctcgccacttcgacagctggtggaaaaaagtcagccgcgaaacgcctgatttgctcaactttgaaaaaagcatgttgatcaaagagggcgcagaaaaaatcagcaagctggattacccgaacttctggcatcagggcaatctcaagctgcgtttgagctatcagtttgagcccggcgcggatgctgacggtgtgaccgtacatattccgctgccgttacttaaccaggttgaggaaagcgggtttgaatggcagatccccggtctggccgcgaactggtgatgcctgattaatcgtgccaaacggtaaccgaatttgtaccggcaaatagccattcatatgtcttctagaatccaggctacaatttacaagtggtacaactttacaggctgctattgtgcaacatctggaagctttctgttgacagcagcctggtccacttaggcagaggaagtccctctcccccatagtatctggtagaatttgcatgtcgtgcaggacccactctagatgatgccctttatgagccacaggactgagcataatccattttcttaaatccggtgcggccatgcatatggtgtttactatctggccgaagagtgttatacacactaggcgggtggcacgccaataagcgggattgagcttgtctggctgcttcagtaacaccgaacgcggaatgtctgtgctatacaacgcatagataatcccctccagcgagctggcgctgataaatcccgccgcttcaccaatcagaaaggcgttgtccttaccgcatacaaaatcctgcccgcgcgagggaaacagcaccgtgcatttttcgcttttcaccgtcttaccaaactggaactgaaaggcgctcattttatctttcatcgtcaagaaacgcgtctgaccgtctttcattggatatgcaccgccaaaaataaaatacccgtctttgctgatgctccatgaataacagttagttatcgaatcatcaaagatgcaagagtagaacggcaccggatgtttgtccgagaccactgatggatagcgacatatcgaccagatagcgggcggtccagcctgcatgggacgcttatatgaaagccgttcttgaaggtgtgccggagcagccgctgacgccgccaccgggtatagtgacggtgaatatcgatcgcagcaccgggcagttagctgtggtagcggctctggctcatcgccttccagtgattccgggtagagatcttgcgctaccacgatattcattttgctggaaaagtaagacggtgccatgctgagcttcttcaaaaaagtcagatcgttcgctccaaatccaacctcttcttttagctcgcggttagcggcttcgtagacgctttcacccggatcaattaatcctttcgaaaaaacaatcggcacaatcatcactgcttcccggttggttggacgcattcgttcataaacacgccgcacgccattgctgaactccagatccacgctctcgacggtaaacagtcgggaacgggctacagtttcaacattcagaatggtgggtttttgtaatgatttgctcat

SEQ ID NO: 9305 - DNA, 2578 bp, Homo sapiens
  SIMILAR (1)..(348): 1001254mologous to Homo sapiens leucine-rich repeat- containing G protein-coupled receptor 6,accession number AF190501,Smith-Waterman Score=593.
  misc_feature (1)...(2578): n = a,t,c or g
atggacatccaggagtttccagatctcaaaggcaccaccagcctggagatcctgaccctgacccgcgcaggcatccggctgctcccatcggggatgtgccaacagctgcccaggctccgagtcctggaactgtctcacaatcaaattgaggagctgcccagcctgcacaggtgtcagaaattggaggaaatcgggctccaacacaaccgcatctgggaaattggagctgacaccttcagccagctgagctccctgcaagccctggatcttagctggaacgccatccggtccatccaccccgaggccttctccaccctgcactccctggtcaagctggacctgacagacttctcagctgaccacactgcccctggctggacttgggggcttgatgcatctgaagctcaaagggaaccttgctctctcccaggccttctccaaggacagtttcccaaaactgaggatcctggaggtgccttatgcctaccagtgctgtccctatgggatgtgtgccagcttcttcaaggcctctgggcagtgggaggctgaagaccttcaccttgatgatgaggagtcttcaaaaaggcccctgggcctccttgccagacaagcagagaaccactatgaccaggacctggatgagctccagctggagatggaggactcaaagccacacccccagtgtccagtggtagccctactccatgccccttcaagccctgtgagtacctctttgaaagctggggcatccgcctggccgtgtgggccatcgtgttgctctccgtgctctgcaatggactggtgctgctgaccgtgttcgctggcgggcctgcccccctgcccccggtcaagtttgtggtaggtgcgattgcaggcgccaacaccttgactggcatttcctgtggccttctagcctcagtcgatgccctgacctttggtcagttctctgagtacggttagcccgctgggagacggggctaggctgccgggccactggcttcctggcagtacttgggtcggaggcatcggtgctgctgctcactctggccgcagtgcagtgcagcgtctccgtctcctgtgtccgggcctatgggaagtccccctccctgggcagcgttcgagcaggggtcctaggctgcctggcactggcagggctggccgccgcactgcccctggcctcagtgggagaatacggggcctccccactctgcctgccctacgcgccacctgagggtcagccagcagccctgggcttcaccgtggcccctggtgatgatgaaactccttctgttttcctggttcgtgggcccgttgccttaccatcaaaactggtactgtgacctgccgcggggcgactttgaggccgtgtggggactgcgcccatggtgaggccacgtgggcctggcctcatcttcgcaaaacggggctcctctactgtcccgtggccttcctcagcttcgcctccatgctgggcctcttccctgtcacgcccgaggccgtcaagtctgtcctgctggtggtgctgcccctgcctgcctgcctcaacccactgctgtacctgctcttcaacccccacttccgggatgaccttcggcggcttcggaccccgcgcaggaggactcagggccccccctagcccctatgctgcggccgggagaangctggagaaagagcctcctgttgattcctacccccaggccctggtagccccttctctgatgtggatctcattctgcgaagcttcctgaagctgggccggccccctggagctggagacctatggcttcccctcagtgaccctcatctcctgtcagcagccaggggcccccaggctggagggcacccattgtgtagagccagaggggaaccactttgggaacccccaaccctccctggatggagaactgctgctgagggcagagggatctacgccagccagtggaggcttgtcaggggggtggcggctttcagccctctggcttggcctttggcttcacacgtgtaaatatccctccccattcttctcttcccctctcttccctttcctctctccaccctcggtgaatgatggctgcttctaaaacaaatacaaccaaaaactcagcagtgtgatcctattagccaggatggcccaagtacctggcttccaactgatcacctctctccttgtgaccaatcaccaaccgggtgccttctttggcctggcttttcccttggccttttcctcagcttcaccttgattactgggcctcttccctngtcaatgtctgaagctgtggaccagagacctggacttttgtctgcttaagggaaatgagggaagtaaagacagtgaaggggtggagggttgatcagggcacagtggacagggagacctcacagagaaaggcctggaaggtgtatttcccgtgtgactcatggataggatacaaaatgtgttccatgtaccattaatcttgacatatgccatgcataaagacttcctattaaaataagctttggaagagattacacatgatgtctttttcttagagattcacagtgcatgttagtgtaataaagagataagtcctacagt

SEQ ID NO: 9306 - DNA, 510 bp, Homo sapiens
  SIMILAR (238)..(507): 871254mologous to Homo sapiens ribosomal protein L19,accession number X63527,Smith-Waterman Score=390.
atgagtatgctcaggcttcagaagaggctcgcctctagtgtccttcgctgtggcaagaagaaggtgtggttggaccccaataagaccaatgaaatcgccaatgccaattcccatcagcagatctggaagctgatcaaagatgggctgatcatccgcaagcctgtgacggtccattcccgggctcgatgccagaaaaacaccttggcccactggaagggcaggcacataggcatagataaaagatactgtgaatctaagaagattgatcgccacatgtatcacagcctgtacctgaaggtgcaggggaatgtgttcacaaacaagccgattctcatggaacacagccacaagctgaaggcagacaaggctcacaagaagctcctggctgaccaggctgaggcccgcaggcctaagaccaaggaagcacggaagcgcagtgaagagcgcctccaggccaagaaggaggagatcatcaagactttgttcaaggaggaagacaccaagaaataa

SEQ ID NO: 9307 - DNA, 447 bp, Homo sapiens
  SIMILAR (15)..(395): 901254mologous to Homo sapiens ribosomal protein L19,accession number X63527,Smith-Waterman Score=578.
ggcacgaggcagccatgagtatgctcaggcttcagaagaggctcgcctctagtgtcctccgctgtggcaagaagaaggtctggttagaccccaatgagaccaatgaaatcgccaatgccaactcccgtcagcagatccggaagctcatcaaagatgggctgatcatccgcaagcctgtgacggtccattcccgggctcgatgccggaaaaacaccttggcccgccggaaggtcaggcacatgggcataggtaagcggaagggtacagccaatgcccgaatgccagagaaggtcacatggatgaggagaatggagattttgcgccatttgctcacaagataccgtgaatgtgagactatcaatcgggccatgcatcacctgctgaacctgaaggtgatgaggtaatggttttaaatatagttttccagttgctccaccctgacaaccg

SEQ ID NO: 9308 - DNA, 1044 bp, Homo sapiens
  SIMILAR (502)..(1041): 841254mologous to Homo sapiens ribosomal protein L19,accession number X63527,Smith-Waterman Score=787.
atggcttcggcgccccggcccacaggggcggccatcttgggctggagaggcagcctgaaggaggccaccgctggccctgctgtcagattcgaaggtcataataagggagtgacccggcgacgactcgccccaacgatggcgaggcggcgagagctgaagcgctgcctgcagctgctggcgtcctcggcggagccagcgcggcgggctcgggttaggaagaacccgagcgcctgccgcggtcgcccctcccgctacggcggcgctttgcgcggggactctgtggccggaagccgcggaactgaggcggcgcgcgctcccggccaccccaagcgcgagctagagctcgatatggtagatactcttccatgggttccgggatcacatgcattcattatacgtcagttaaacctggaaaatattaagggagctttcctgctacaagaattatgtttaaaaagctccacaggggagctctttcctttcgctgctgtggctgcagccttgagtatgctcaggcttcagaagaggcttgcctctagtgtcctctgctgtggcaagaagaatatctggttagaccccaatgagaccaatgaaatcaccaatgccaactcccgtcagcagatccggaagctgatcaaagatgggctgatcatccgcaagcctgtgatgggcaggcatatgggcataggtaagcggaagggtacagccaatgcccgaatgccagagaaggtcacgtggatgaggagaatgaggattctgcaccggctgctcagaagataccgtgaatctaagaagattgatcgccgcatgtatcacagcctgtacctgaaggtgaagaggaatgtgttaaaaaacaagcagattctcatggaacacatccacaagctgaaggcagacaaggcccgcaagaagctcctggctgatcaggctgaggcccgcagatctaagaccaaggaagcacacaagagctatgaagagcacctccaggccaagaaggaggagatcatcaagactttgtccaaggaggaagagaccaagaaataa

SEQ ID NO: 9309 - DNA, 1914 bp, Homo sapiens
  SIMILAR (637)..(1911): 911254mologous to Homo sapiens voltage-dependent calcium channel beta-1b subunit,accession number AB054985,Smith-Waterman Score=2018.
atgtcccggggcccttacccaccctcccaggagatccccatggaggtcttcgaccccagcccgcagggcaaatacagcaagaggaaagggcgattcaaacggtcagatgggagcacgtcctcggataccacatccaacagctttgtccgccagggctcagcggagtcctacaccagccgtccatcagactctgatgtatctctggaggaggaccgggaagccttaaggaaggaagcagagcgccaggcattagcgcagctcgagaaggccaagaccaagccagtggcatttgctgtgcggacaaatgttggctacaatccgtctccaggggatgaggtgcctgtgcagggagtggccatcaccttcgagcccaaagacttcctgcacatcaaggagaaatacaataatgactggtggatcgggcggctggtgaaggagggctgtgaggttggcttcattcccagccccgtcaaactggacagccttcgcctgctgcaggaacagaagctgcgccagaaccgcctcggctccagcaaatcaggcgataactccagttccagtctgggagatgtggtgactggcacccgccgccccacaccccctgccagtggtaatgaaatgactaacttagcctttgaactagaccccctagagttagaggaggaagaggctgagcttggtgagcagagtggctctgccaagactagtgttagcagtgtcaccaccccgccaccccatggcaaacgcatccccttctttaagaagacagagcatgtgcccccctatgacgtggtgccttccatgaggcccatcatcctggtgggaccgtcgctcaagggctacgaggttacagacatgatgcagaaagctttatttgacttcttgaagcatcggtttgatggcaggatctccatcactcgtgtgacggcagatatttccctggctaagcgctcagttctcaacaaccccagcaaacacatcatcattgagcgctccaacacacgctccagcctggctgaggtgcagagtgaaatcgagcgaatcttcgagctggcccggacccttcagttggtcgctctggatgctgacaccatcaatcacccagcccagctgtccaagacctcgctggcccccatcattgtttacatcaagatcacctctcccaaggtacttcaaaggctcatcaagtcccgaggaaagtctcagtccaaacacctcaatgtccaaatagcggcctcggaaaagctggcacagtgcccccctgaaatgtttgacatcatcctggatgagaaccaattggaggatgcctgcgagcatctggcggagtacttggaagcctattggaaggccacacacccgcccagcagcacgccacccaatccgctgctgaaccgcaccatggctaccgcagccctggctgccagccctgcccctgtctccaacctccagggaccctaccttgcttccggggaccagccactggaacgggccaccggggagcacgccagcatgcacgagtacccaggggagctgggccagcccccaggcctttaccccagcagccacccaccaggccgggcaggcacgctacgggcactgtcccgccaagacacttttgatgccgacacccccggcagccgaaactctgcctacacggagctgggagactcatgtgtggacatggagactgacccctcagaggggccagggcttggagaccctgcagggggcggcacgcccccagcccgacagggatcctgggaggacgaggaagaagactatgaggaagagctgaccgacaaccggaaccggggccggaataaggcccgctactgcgctgagggtgggggtccagttttggggcgcaacaagaatgagctggagggctggggacgaggcgtctacattcgctga

SEQ ID NO: 9310 - DNA, 924 bp, Homo sapiens
  SIMILAR (412)..(921): 581254mologous to Homo sapiens voltage-dependent calcium channel beta-1b subunit,accession number AB054985,Smith-Waterman Score=449.
atgtggcgatcgatcttcttagattcacggtatcttctgagcagccggcgcaaaatcctcattctcctcatccatgtgaccttctctggcattcgggcattggctgtacccttccgcttacctgtggagaagatgagcttcatcttcatgggggacgtgatccatcggatgctcacagctactcagtatgtggcgcccctgatggccaacttcaaccctggctactccgacaactccacagttgtttactttgacaatggtcagcagatccggaagctcatcaaagatgggctgatcatccgcaagcctgtgacggtccattcccgggctcgatgccggaaaaacaccttggcccgccggaagggcaggcacatgggcatagagtttgcctgcttttgttgtgtttttctcacccctgccctgatctgcatggtgtgtgctgtccgtctgctaaccagggacccctaccttgcttccggagaccagccactggaacgggccaccggagagcacgccagcatgcacgagtacgccaggggagcttggtccagcccccaggcctttaccccagcagccacccaccaggccgggcaggcacgctacgggcactgtcccgccaagacacttttgatgccgacacccccggcagccgaaactctgcctacacggagctgtgagactcatgtgtggacatggagactgacccctcagaggggccagggcttggagacccatgcgaggcgcacgcccccagcccgacagggatcctgggaggacgaggaagaagactatgaggaagagctgaccgacaaccggaaccggggccggaataaggcccgctactgcgctgagggttggggtccagttttggggcgcaacaagaatgagctggagggctggggacgaggcgtctacattcgctga

SEQ ID NO: 9311 - DNA, 783 bp, Homo sapiens
  SIMILAR (36)..(482): 341254mologous to Homo sapiens ribosomal protein L19,accession number X63527,Smith-Waterman Score=115.
cggagctctttcctttcgctgctgcggccgcagccatgagtatgctcaggcttcagaagaggctcgcctctagtgtcctccgcatgtggcagagaacgaatggtctgggttagaccccaatgagaccaatgtaatcgccaatgccaactccccgtcagcagatcccggaagctcatcaaagatgggctgatcatccgcaagcctggtgacgggtccattcccgggctcgatgccggaaaaaacacctttggcccgccggggaaggggcagggcaacatggggcattaggtaaggcgggaaggggtacaagccaaatgcccggaatgccaggagaaggtcaacatggattgaggagaattgaggattttggcgccggcttgcttcagaaagataccggtgaaatctaaagaagatcggatcgcccacatgtattcacagcctgttaccttgaaggtgaagggggaatgttgtttcaaaaacaaggcgggtttttcatgggaacacttccacaaggttgaaggcaggacaagggcccgcaaagaagcttcctggctgaccaggcctgaaggccgcagggtctaaggaccaaggaaagcacggaaagcgccagtgaagagcggcttccagggcaaaggaaggaggagatcaatcaaagactttattccaaggagggaaggagacccagaaataagaacctcccacttggatctgtacatacttggcctcttgtgattacatagatcagccattaaaataaaacaagccttaatctgaaaaaaaaaa

SEQ ID NO: 9312 - DNA, 2232 bp, Homo sapiens
  SIMILAR (952)..(1410): 991254mologous to Escherichia coli alternate gene name yibK,accession number U00039,Smith-Waterman Score=808.
atgcagatcccccgtagcccacggcagattgtgatgctccagcgcaaagccagcaaaccaggacaggggttaggcaaaaccaccggctggatccatcgcaccaccctgctctcgcggggtgtgaaaatgatcccaggcgtaagttatcagaagattgacgatgacgggctgcatgtggtgatcaacggcgaaacgcaggtattagcagtggacaatgtggtgatctgcgcagggcaagagccaaaccgcgcgctggcgcaaccgctgattgatagcgggaaaacggtgcatttaattggcggctgcgatgtggctatggagctggacgcacgacgggcaattgcccagggaacacggctggcggacctgcaggcagcaagtcaaggcacttgcattgatgaccaggatatcactatcgatacttatgaattcactactgactatctggagaatcccacctgtggtgaaaaagtagtggaagagacgcttgtcagccacctgctgaaatcaaactgcctgatcacccatcaaccagattggggttcgctccaaattcagtatcgtggacgccaaattgacagagaaaaactgctgcgttacctggtctcattccgtcatcacaacgagttccacgaacagtgcgtggaacgcatctttaatgacctgttacgcttctgccagccagaaaaattgagcgtttacgcacgttatacccgtcgtggcggtctggacattaacccgtggcgcagtaatagcgattttgtcccatcgaccacaagactgctggaagtggatatgcttaaacgcaccgccagcagcgacctctatcaactgtttcgcaactgttcacttgccgtactgaactccggtagtttgaccgataacagcaaagaattgctgtctcgttttgaaaatttcgatattaacgtcttgcgccgtggggggggcagtatgctaaacatcgtactttacgacccagaaattccgccaaatactggcaacatcatccgtctttgcgctaataccggctttcgtctgcatatcatcgaaccgatgggatttgcctgggacgataagcgcttgcgccgcgcggggctggactatcacgagtttaccgccgttacgcgtcatcatgactatcgcgcgttcctcgaagcagaaaatccccagcgcctgttcgccctcaccacgaaaggtacacctgctcacagcgccgtaagctatcaggatggcgattatctgatgttcggcccggaaacacgcggcctgccagcgagcattcttgatgccctgcccgctgaacaaaaaattcgcattccgatggtgccggacagccgcagcatgaatctgtccaatgcggtgtcggtagtggtgtatgaagcctggcggcagttggggtatccgggagcggataccggggcgtatcacatcattccgtggtcttcgataaccacctttgctaactttgtccgcggcattgtttcggtggtggcaaattatgatgttgatcgccatgaagatgctgataaagccaatcaggcactgaaagatgcggtagcggaattaatggaaaacgaagaaattcgcgggctgattattggtgaaccgaattttgccgggattgtcggcttaagcaataccgcgtttacactgcgtgtttcgttcaccacgctgccactcaaacagtggacgagcgacctgcaggcacattgccttggccgcaaatccaaaagaatatcccactcgaagacgaccagggcagtcacttccgtctggtggttcgtgatactgaaggccggatggtctggcgggcatggaactttgagccggatgccggtgaaggtcttaaccgctatatccgcacctcaggcatccgtacagacacggccacccgctgatcgcgaagcatttacccgcattcacctccccgaacacactttatatccccatacgccagccatcgccgctggcgtttttattgacggagacatacccatgacaacacagacgcagcacgacctcgcacccgctaaccaacccgaatttgaactgaccgtcacgccggtccccgatgaacagcgtatcgatttctggccacagtactttggcgctatcccgcagtggctactcctggagccgcatatcttcgcctggatggaccgcttctgtgagggctacagcggtgtatctggtcgttctacggggtcctcaagaggcgacctgcaggcatga

SEQ ID NO: 9313 - DNA, 1563 bp, Homo sapiens
  SIMILAR (709)..(906): 561254mologous to Escherichia coli K12 putative transport protein,accession number AE000183,Smith-Waterman Score=145.
gatccgggccaaacagcttgaaattttatgattggggtgaaacggtgccgcaaccctggccgatttttggtttatccccagcgtttggtttcccgttatgttttccccgtgggctgggggaaaccatcttttcttctcgcccacatataagggtaactatccggagctgcaaaaacggttgaatggctggctgtcggcggcgctgaaaacggcccgtattctgacagtctgcgtggcggtaatgttgctgttgagcgcatggggattgttcgatttctggaactggctgcaaaacggcgcggggcaaaaaaacccgtaaaatatccctgatcccgtatccgcaactcaatccttttccttcctcggcggttggctggacggtgctcgcccagtttgatcgaaaaccggctggcttcggatattccatggccgcccgctaccccagcgcccgcacgcgtaccctgcttacgctgtttcgtaacgcgctggcggtgattatcagtaccatcaccatcatgattgtgttgtcggaaatcggcgtcaatatcgcgccattgctggcaggtgccggggcattaggtctggctatctcgtttggttcgcaaacgctggtgaaagatattatcaccggggtatttattcagtttgaaaacggcatgaacactggagatttggtgactatcgggccgttgaccggcacagtggaacggatgtcgattcgctccgtgggcgtacgacaggataccggggcgtatcacatcattccgtggtcttcgataaccacctttgctaactattgtccgcggcattggttcggtgggagcaaattatgatgttgatcgccatgaagatgctgataaagccaatcaggcactgagagatgcggtagaagatgatgagactcgctttaccagcgagtccagtccgatcttgcggtgctgtcagagggaaggtctagggctgaaggctgttgttcagattcttttgtcccacggcaggaacggcctgccaggggagcccgcgagctcccagggcctttctgctgcttcctctaccccagtatttcacttggctctccaaattgactcagctccagataacattgactgggtagaaatgctatttaataaaaatatggtgactgaacgcttacagaatgtcatggttcttgagcagtgtttcagtgattcttcttctctttatagattcctcacctattcctacctcttggccttcaatgtgtggcttctgcttgcacccgtgaccctgtgctatgactggcaggtcggcagtattcctctggtagagaccatatgggacatgcggaacttagccaccatctttctggcggttgtgatggccttattgagcctgcactgcttagcagcctttaagagcagagttaccgcctctataccagggtgcataaaagcacatgcagttgaaaatgtcttaacgacaaaaagcaaaacaaggatatatccagaggtggtagtgcaaagtggccttcagaaacaaaaaggcaaaggtagtgtaatgttcatagaagcagcaggcctatga

SEQ ID NO: 9314 - DNA, 276 bp, Homo sapiens
  SIMILAR (28)..(276): 731254mologous to Escherichia coli putative arylsulfatase regulator,accession number M90498,Smith-Waterman Score=349.
gggtacgccagtatcggctgggaatatcaccagcagagaatggcagaaatgatcgatgcccggcaacagcaggcgtttggtgaagagggagcgtgctggggaggctgcccgaaacaccgcgtcatgctcgatgccagcggcaaaccgggactgaatgatttgtgtgccgggtatcagcgtgatgtccgccatctaccgcgatatctgaaagcaatggctgatttgctggcgcacggtcgcccggccagcgacattatgcatgcgcatttgctggtg

SEQ ID NO: 9315 - DNA, 916 bp, Homo sapiens
  SIMILAR (136)..(603): 771254mologous to Escherichia coli putative arylsulfatase regulator,accession number M90498,Smith-Waterman Score=682.
atgtcccgtcgtgccagccacttggctgtatggaaccaacgtccccgcgacgaccttaagtgtacatggcgcctgtttatattccgagagcagtgcggtagagatccctgttggcgatattcaaccactggtagcaaacgcgacctccggcaagtttctcgtgtggaatatcaaatgggctttgcgaagttttgccgctccgccggccaaacctctggccgctcggtgattgttgagcacaacggcgagatttacgcctgtgatcactatgtttatccgcaatatcggctggggaatatgcaccggcagagaatggcagagatgatcgattcccggcaacagcaggcgtttggtgaagataaatttaagcagttaccggcgcagtgtcgcagttgtaacgtgttaaaagcatgctggggaggctgcccgaaacaccgcttcatgctcgatgccagcggcaaaccgggactgaattatttgtgtgccgggtatcagcgttatttccgccatctaccgccatatcttaaagcaatggctgatttgctggcgcacggtcgcccggccagcgacattatgcatgcgcataaaaaagtgtttaagcgcggcaccgcgtgctccggtttccaaaaaggaggccccctgtttaggagccgaacgggatactgtcccacgctacggaaaaaggccccttgtcccaagacagggcttttgggcaaaaagtggaccccccaaaggagaaattcttccgggaaatcatgcgccaaaaggaggggtgaccccccattgttggaaaaccgttttaacgggtcccgtgttcaaaggaaaccacagtggaactcttgtacgggacaccccgagaacaattttttccccaattatgggggcaccccttacccccagcgaatgtggcccttag

SEQ ID NO: 9316 - DNA, 1641 bp, Homo sapiens
  SIMILAR (356)..(724): 311254mologous to Escherichia coli Proliferating-cell nucleolar antigen P120 (Proliferation-associated nucleolar protein P120),accession number D90827,Smith-Waterman Score=157.
  misc_feature (1)...(1641): n = a,t,c or g
tggtgggtcggaccgacgccgaatgctatggtcgccacggctggcgtagattaatactatacgagtcgagcggccgtccgggcaagtggacaagaaaggagaaaggaagggagtcttacttggactgctttattcattgacttaaataactttgataccttctggcccatttaggtgtttgccattgtacccccactcagaatgactgatgctgtgccatgcacataataaatgttcctgatgctggggtctgcattggcgtgggactacctgagaattggtctgactccatcagcgccattgctggtggaatgtttcattgggtcatggcctctgaagtatctttatttctataggcaatcttgctgccaatgatctctccccgtcccgaatagccagactacagaagatccttcacagctatgtgcctgaagagatcagggatggaaatcaagttcgagttacctcatgggatggcaggaaatggggagaactggagggggacacctatgaccgggtgctggtggatgtgccctgtaccacagaccgccactcccttcatgaggaggagaacaacatctttaagcggtcaaggaagaaggagcgacagatattgcctgtgctgcaagtgcagcttcttgcggctggactccttgccaccaaaccaggaggccatgttgtctattctacctgctcactctcacacttacagaacgagtatgtggtgcaaggtgccattgagctcctggccaatcaatacagcatccaggtacaggtggaagatctgactcacttccgaagggttttcatggacacattttgtttcttctcaatcctgtccaggttggggagctggtaataccaaaacctcattggccaattttggccctatgtacttctgcaaaatgcgtaggctggacatagtatcnaccccaatccctgaagcaagaataccaaagggtatactctgttggatgcaccagaaactggaaactgggaccagtggcagagatgcactctcggtcctgtctccatcctgttcgtgtctttctgcagttttcggcaataagaagtagaagatttgctgtcctgctgtccaattgtggagcatcagcatggtttccaacgtcactcattaacccctaccccatctccnagggccttgtacttaaagtttgctggcccgcttaggggcttagaaggaggaagcccagtgagcaggcttcacactaagttgtaaacataggagaagcatttggccaataaagaatgttgaaactctatagacctagggctgcagttggggacttcatgtcagtgcaaatgccattagttccatttgtaccagccagttactgagcccctgtcacccttgaagtgagttccacctgaccagtcttgagcagccaacaggctcaattaagcccgcctggtttttccatatggctcatgatctaatttaaggaacaagtaactaaaaatgttaagccagtgcaaaataatctgcttacctactcacattggaaaagccctctgagctgaataattctggccattcctgctgtcaacaatactgctgcccaaatgtggcttatgaggctgcttctgccacaaaaccgtcatactcttgtgcgtgccttg

SEQ ID NO: 9317 - DNA, 831 bp, Homo sapiens
  SIMILAR (300)..(58): 361254mologous to Homo sapiens Fragment of human secreted protein encoded by gene 70,accession number Y41495,Smith-Waterman Score=97.
  misc_feature (1)...(831): n = a,t,c or g
acatgatccacgncngtntggatgaactgtgggaagacatcactcacagccttcatgaccagggccactgttcatctgggggacccctgaggatctacgcggcccaggcccattcccagctccttgtctggggagccttggctctgagcctctagcatggttcagtccttgaaagtggcctgttgggtggagggtggaaggtcctgtgcaggacagggaggccaccaaaggggctgctgtctcctgcatatccagcctcctgcgactccccaatctggatgcattacattcaccaggctttgcacnnnnnnnnnnnnnnnnnnnnnnnnnnnnnnnnnnnnggggggccccctttttaaaaacccctgggggggcccaatttttccgggggagaagannnnnnnnnnnnnnnnnnnnnnnngggggtttttaaacccccgggggggattttgagaaaacacctttttttgggggggggcacttttgggcannnnnnnnnnaaaaaattttagcctccgggggagcaaaaaaatttttttggggggaggggggaaaaaaaccccccaattttctcggcgtaaaaaaagttccnncacgaggaccgccacgcaccagcgccatagtaggcgttttgtggtttccttgggcacctattatctcgctattgctcttgcggggacggctacctcggtcgaactagcctcctatttttgtccctctccttcggccttcctcctgacttacatcgagattttccttcccctcatttggcacatttgctccaccctgtcttgcgccgttacacctctccctttcgtcaggcaaactacg

SEQ ID NO: 9318 - DNA, 2049 bp, Homo sapiens
  SIMILAR (958)..(1410): 531254mologous to Homo sapiens 10-JUL-1998 Nucleotide sequence of the 1867 bp cDNA sequence of human RAP3 gene,accession number Z45875_cd1,Smith-Waterman Score=369.
atgatcgaccatcacatcaaagacacaatagatgaggaagaggcacttcagaatggtgagtggctggatgtggacatggtggtaggcactgtgcaaaacatactagtggatatagagatgaataagaaaaagcccctgcactcaaagagctctcggattcatcaacaaattattgtgcagttagatagcctccctccacctgtcttctcagagcaggtaatggcaagcatggctgccgtgctcacctgggctctggctcttctttcagcgttttcggccacccaggcacggaaaggcttctgggactacttcagccagaccagcggggacaaaggcagggtggagcagatccatcagcagaagatggctcgcgagcccgcaggatcagtgcgcgatgacttggggacaaaggagatgatgggggctagcagtctgacggcctggatatctgtccccttctccaggaccctgaaagacagccttgagcaagacctcaacaatatgaacaagttcctggaaaagctgaggcctctgagtgggagcgaggctcctcggctcccacaggacccggtgggcatgcggcggcagctgcaggaggagttggaggaggtgaaggctcgcctccagccctacatggcagaggcgcacgagctggtgggctggaatttgtatgggcttgcggcagcaactgaatcgctaggcgatggatctgactggagcaggtggccctgcgcgtgcaggagctgcaggagcagttgcgcgtggtgggggaagacaccaaggcccaggtgctggggggcgtggacgaggcttgggctttgctgcagggactgcagagccgcgtggtgcaccacaccggccgcttcaaagagctcttccacccatacgccgagagcctggtgagcggcatcgggcgccacgtgcaggagctgcaccgcagtgtggttccgcacgcccccgccagccccgcgcgcctcagtcgctgcgtgcaggtgctctcccggaagctcacgctcaagggcaagggcctgcacgcacgcatccagcagaacctggaccagctgcgcgaagagctcagcagagcctttgcaggcactgggactgaggaaggggccggcccggacccccagatgctctccgaggaggtgcagccagcgatttcaggctttccgccaggacacctatctgcagatagctgctttcactcgcgccatcaaccaggagacttgggaggttcaacaccagctgggggcccccttccccaagccacaggggcctttgcccccagagtttcaacaaacagacagtggcaaggttctgagcaggctgcaggcccgtctggatgacctgtgggaagacatcactcacagccttcatgaccagggccacagccatctgagggacccctgaggatctacctgcccaggcccattcccagcttcttgtctggggagccttggctctgagcctctagcatggttcagtccttgaaagtggccttggtgggtggagggtggaaggtcctgtgcaggacagggaggccaccaaaggggctgctgtctcctgcatatccagcctcctgcgactccccaatctggatgcattacattcaccaggctttgcaaacccagcctcccagtgctcatttgggaatgctcatgagttactccattcaagggtgagggagtagggagggagaggcaccatgcatgtgggtgattatctgcaagcctgtttgccgtgatgctggaagcctgtgccactacatcctggagtctgacactgagcccctgcgagtgaccgtgagcacacagttccgtagcggggcccatacgagactcgacgcgcgcgcaccacgaggtcccgagggaggacactcgacggacacgagtgacgggaaatgtgcatctacactagcgcgcgacagctagagcgatgacggcgaggacgtctcgcagcctaccagcaacgcgaagacgtgcctcccggcgtcgtatggattaacaagctccaagtagggtgtacaacgccgcagcatgaactcccagg

SEQ ID NO: 9319 - DNA, 1278 bp, Homo sapiens
  SIMILAR (85)..(1014): 1001254mologous to Homo sapiens nuclear autoantigenic sperm protein autosomal variant,accession number AF035191,Smith-Waterman Score=1549.
cctgagtgagtctctggcgtcccaaattgcctgtttttctcgcaggctctattccgttcgctggttcgccacctcaggggaacgatggccatggagtccacagccactgccgccgtcgccgcggagctggtttctgccgacaaaattgaagatgttcctgctccttctacatctgcagataaagtggagagtctggatgtggatagtgaagctaagaaactattgggtttaggacagaaacatctggtgatgggggatattccagcagctgtcaatgcattccaggaagcagctagtcttttaggtaagaagtatggagagacagctaatgagtgtggagaagccttctttttctatgggaaatcacttctggagttggcaagaatggagaatggtgtgttgggaaacgccttggaaggtgtgcatgtggaagaggaagaaggagaaaaaacagaagatgaatctctggtagaaaataatgataacatagatgaaactgaaggctcggaagaggatgataaagaaaatgataagactgaagaaatgccaaatgattcagtccttgaaaacaagtctcttcaagaaaatgaggaggaggagattgggaacctagagcttgcctgggatatgctggatttagcaaagatcatttttaaaaggcaagaaacaaaagaagcacagctttatgctgcccaggcacatcttaaactcggagaagttagtgttgaatctgaaaactatgtgcaagctgtggaggagttccagtcctgccttaacctgcaggaacagtacctggaagcccacgaccgtctccttgcagagacccactaccagctgggcttggcttatgggtacaactctcagtatgatgaggcagtggcacagttcagcaaatctattgaagtcattgagaacagaatggctgtactaaacgagcaggtgaaggaggctgaaggatcgtctgctgaatacaagaaagaaattgaggaactaaaggaactgctacccgaaattagagagaagatagaagatgcaaaggagtctcagcgtagtgggaatgtagctgaactggctctgaaagctactctggtggagagttctacttcaggtttcactcctggtggaggaggctcttcagtctccatgattgccagtagaaagccaacagacggtgcttcctcatcaaattgtgtgactgatatttcccaccttgtcagaaagaagaggaaaccagaggaagagagtccccggaaagatgatgcaaagaaagccaaacaa

SEQ ID NO: 9320 - DNA, 1308 bp, Homo sapiens
  SIMILAR (301)..(819): 821254mologous to Homo sapiens PRO1999,accession number AF113699,Smith-Waterman Score=694.
atggagtgtgtgtgtgtgaaagagaaagagagagaagaaaaagaaggaaaggaggaagaggaggaagatgaagcagtagcagaaagaggaggaaaaggagaaaggagaggagagagaaggggagaaaggaagagagagaaggagacatacacagagaaaaacagatacagagacacaaagagagacagagacagagagaggaaggagccctatgaaataccaagttctttaatagggcatggagatcccaaagatgaattagacagaaatcttgcccttaagcaggtcaaaacctactgggtgatccagttcagcaaatctattgaagtcattgagaagagaatggctgtactaaacgagcaggtgaaggaggctgaaggatcgtctgctgaatacaagaaagaaattgaggaactgaaggaactgctacccgaaattacagaaaagacagaagatgcaaaggagtctcagactactgggaatgtagctgaactggctctgaaagctactctgtggaggaggctcttcagtctcctgattgccagtagaaagccaacagatggtgcttcctcatcaaattgtgtgactgatatttctcactttgtcagaaagaagaggaaaccggaggaacagagtccctggaaagatgatgcaaagaaagtcaaacaagagctggaggtgaacggaggcagtggagatgctgtccccagtggaaatgaagttttggaaaacatggaggaggaggctgagaatcgggttgaaagccgggcggcagtggaggggacagtggaggctggagctacagctgaaagcactgcatatatgtatgacatacctgccatgtaccaggagaatacagcagtgagcaaaacagatgaagtttctgacctcatacacaaactagcacaaacagatttgctagcacaagagagagctggaaagagagccagtccccaggatggaggctctgcagaagggcaggctcagagtgaccgccaggaagcaacaaagcagcgacacaaacaggaagctggcgacaggcattatgacaagcaaatgcttgaataccaaggagcacatgagctttacagcagcagggaaaaaagaaaagaaaagaaaaaaaagcccccacatggacgcctgcctccaactccagtggccctgcacggtgcaaaaaggagattgctaacaaaaaggttattcaacgcttctccgaataaacccaaaggccactccacacagttcagtgtgatgagtcaagctgagcagcagcctgttttgaaacatgctgatatctttcacaaataa

SEQ ID NO: 9321 - DNA, 458 bp, Homo sapiens
  SIMILAR (215)..(457): 971254mologous to Homo sapiens similar to protein U28928 (PID:g861306),accession number AC005154,Smith-Waterman Score=406.
ggccccagtgttgcgctctctggccgttccttacactttgcttcaggctccagtgcaggggcgtagtgggatatggccaactcgggctgcaaggacgtcacgggtccagatgaggagagttttctgtactttgcctacggcagcaacctgctgacagagaggatccacctccgaaacccctcggcggcgttcttctgtgtggcccgcctgcaggcaagaaggggttaaaagtggaatgtatgttgtaatagaagttaaagttgcaactcaagaaggaaaagaaataacctgtcgaagttatctgatgacaaattacgaaagtgctcccccatccccacagtataaaaagattatttgcatgggtgcaaaagaaaatggtttgccgctggagtatcaagagaagttaaaagcaatagaaccaaatgactatacaggaaagggctcagaagaaaatgaaa

SEQ ID NO: 9322 - DNA, 712 bp, Homo sapiens
  SIMILAR (145)..(342): 901254mologous to Homo sapiens similar to protein U28928 (PID:g861306),accession number AC005154,Smith-Waterman Score=314.
gaccggcccacgcttcccgccagtcccctaaccctgaggctgccgcgcggcggtcactgcgccggggtagtgggccccagtgttgcgctctctggccgttccttacactttgcttcaggctccagtgcaggggcgtagtgggatatggccaactcgggctgcaaggacgtcacgggtccagatgaggagagttttctgtactttgcctacggcagcaacctgctgacagagaggatccacctccgaaacccctcggcggcgttcttctgtgtggcccgcctgcaggattttaagcttgactttggcaattcccaagggcaaaacaagtcaaacttggcatggagggatagccaccatttttcagagtcctggcgatgaagtgtggggagtagtatggaaaatgaacaaaagcaatttaaattctctggatgagcaagaaggggttaaaagtggaatgtatgttgtaatagaagttaaagttgcaactcaagaaggaaaagaaataacctgtcgaagttatctgatgacaaattacgaaagtgctcccccatccccacagtataaaaagattatttgcatgggtgcaaaagaaaatggtttgccgctggagtatcaagagaagttaaaagcaatagaaccaaatgactatacaggaaaggtctcagaagaaattgaagacatcatcaaaaagggggaaacacaaactctttag

SEQ ID NO: 9323 - DNA, 1234 bp, Homo sapiens
  SIMILAR (295)..(642): 911254mologous to Homo sapiens similar to protein U28928 (PID:g861306),accession number AC005154,Smith-Waterman Score=571.
atggccaactcgggctgcaaggacgtcacgggtccagatgaggagagttttctgtactttgcctacggcagcaacctgctgacagagaggatccacctccgaaacccctcggcggcgttcttctgtgtggcccgcctgcagcttctaattgaaagccccagaatgtcccgattggctaagttttggccacgtacccatgccgtgattttaagcaaaactgagagaaccagcttctggcctttgaagcctcaaaaatgggagtcaggctctgatactccctattcccaaactcgtaaggattttaagcttgactttggcaattcccaaggcaaaacaagtcaaacttggcatggagggatagccaccatttttcagagtcctggcgatgaagtgtggggagtagtatggaaaatgaacaaaagcaatttaaattctctggatgagcaagaaggggttaaaagtggaatgtatgttgtaatagaagttaaagttgcaactcaagaaggaaaagaaataacctgtcgaagttatctgatgacaaattacgaaagtgctcccccatccccacagtataaaaagattatttgcatgggtgcaaaagaaaatggttttgcggttgaagtatcaagagaagttaaaagcaatagaaccaaatgactatacaggaaaggtctcagaagaaattgaagacatcatcaaaaaggggggaaccaccaaactctttagaacataacagaattttatctaagggtacttctatgggctaatattaaaatatttttaacacttgagaacagggatctgggggatctccacgtttgatccattttcagcagtgctctgaaggagtatcttacttgggtgattccttgtttttagactataaaaaaaaactgggataggagttagacaatttaaaaggggtgtatgagggcctaaaatatgtgacaaatgaatgtgagtaccccttctgagaacactaaaagctattcttctgaattaatcttaaagcgttcccttgctctggtaaaagatagaatttgtagctccacttggatgatggtagctgagtgaattgctctgctcctggtcctgagatttttaaaaaatccagccttaatgagagtaatctggcagaccaattggataataaccattttgaaaattggaaagatggtatactgtttttagaggaatacaccgtatttgtggtttaataaaaaaaaaaaaaaaa

SEQ ID NO: 9324 - DNA, 336 bp, Homo sapiens
  SIMILAR (44)..(67): 751254mologous to Homo sapiens RNA helicase,accession number X98743,Smith-Waterman Score=36.
atggccaacacggctaaacccaattcaaagggctcagtgaatgttctgcaacacagatttgggaacacattgtgtacggatgtggtggcaagaggactggacattcctcaagtcaactggattgttcactatgaccatccggatgaccctaaggaatatattcatcgtgtagtgcctgcctttgttgatctgaatgtcaatggcaatgaaggcaagcagaaaaagcgaggaggtggtggtggatttgactaccagaaaatcaagaaagttgagaagtccaaaatctttaaacacattagcaagaaatcatccgatagcaggcagctctctcattga

SEQ ID NO: 9325 - DNA, 3157 bp, Homo sapiens
  SIMILAR (1393)..(1851): 881254mologous to Homo sapiens DEAD/H (Asp-Glu-Ala-Asp/His) box polypeptide 18 (Myc-regulated),accession number BC001238,Smith- Waterman Score=682.
  misc_feature (1)...(3157): n = a,t,c or g
aatcaaaacaaaagcccatgaatgtgggcttatcagaaactcaaaatggaggcatgtctcaagaagcagtgggaaatataaaagttacaaagtctccccagaaatccactgtattaaccaatggagaagcagcaatgcagtcttccaattcagaatcaaaaaagaaaaagaagaaaaagagaaaaatggtgaatgatgctgagcctgatacgaaaaaagcaaaaactgaaaacaaagggaaatctgaagaagaaagtgccgagactactaaagaaacagaaaataatgtggagaagccagataatgatgaagatgagagtgaggtgcccagtctgcccctgggactgacaggagcttttgaggatacttcgtttgcttctctatgtaatcttgtcaatgaaaacactctgaaggcaataaaagaaatgggttttacaaacatgactgaaattcagcataaaagtatcagaccacttctggaaggcagggatcttctagcagctgcaaaaacaggcagtggtaaaaccctggcttttctcatccctgcagttgaactcattgttaagttaaggttcatgcccaggaatggaacaggagtccttattctctcacctactagagaactagccatgcaaacctttggtgttcttaaggagctgatgactcaccacgtgcatacctatggcttgataatgggtggcagtaacagatctgctgaagcacagaaacttggtaatgggatcaacatcattgtggccacaccaggccgtctgctggaccatatgcagaataccccaggatttatgtataaaaacctgcagtgtctggttattgatgaagctgatcgtatcttggatgtggggtttgaagaggaattaaagcaaattattaaacttttgccaacacgtagacagactatgctcttttctgccacccaaactcgaaaagttgaagacctggcaaggatttctctgaaaaaggagccattgtatgttggcgttgatgatgataaagcgaatgcaacagtggatggtcttgaacagggatatgttgtttgtccttctgaaaagagattccttctgctctttacattccttaagaagaaccgaaagaagaagcttatggtcttcttttcatcttgtatgtctgtgaaataccactatgagttgctgaactacattgatttgcccgtcttggccattcatggaaagcaaaagcaaaataagcgtacaaccacattcttccagttctgcaatgcagattcgggaacactattgtgtacggatgtggcagcgagaggactagacattcctgaagtcgactggattgttcagtatgaccctccggatgaccctaaggaatatattcatcgtgtgggtagaacagccagagggcntaaatgggagagggcatgccttgctcattttgcgcccagaagaattgggttttcttcgttacttaaaacaatccaaggttccattaagtgaatttgacttttcctggtctaaaatttctgacattcagttctcagcttgagaaattgattgaaaaagaattactttcttcataagtcagccccaggaagcatataagtcatacatacgagcctatgattcccattctctgaaacagatctttaatgttaataacctaaatttgcctcaggttgctctgtcatttggtttcaaggtgcctcccttcgttgatctgaacgtcaacagtaatgaaggcaagcagaaaaagcgaggaggtggtggtggatttggctaccagaaaaccaagaaagttgagaaatccaaaatctttaaacacattagcaagaaatcatctgacagcaggcagttctctcactgaacacatgccttcctttcatcttgaataactttgtcctaaaatgaattttttttccccttgatttaacaggatttttgtagactttagaatttggaacttccctacaaagagtataaattgacttggggttgcaagcactgaggcactgttacttctatcaccgtctctccttttatttctggggatattaaaacagggctttaagtttcttgggttggccccaagggcaggagccaagggaatatctgggtgttttccttgtggatgataataattttaattttaaatatccctccctccatacaagtggtatggtaccattttaatcataattctaattagtacctttccttcttgttttgtgaagatttttgtggcatggattgctgtgctcactgctgtaaaaggtgacctagtgtactgggcagctggtggcggtgcagaaaagagtctcaggttattttagatttgtttaattcaaggtggtttggatttggtaagcctttgcactctgtagagtacttagaagacaagggcaacttacttggagttagagccaagctgtcagacggtgcccagcacacattaatgttagcttctttctgagaaaaaaatacctcttccaggccctgaaacaaaaaatacatttgctgtgaagattgaaaatgaacaaagttagaaaaaaaaacagcaaaatcagtgatttagtcasatgagtttttcgttgtaggagcacttgatttctagtgtgttttgtacagtatataactacaagatagtacattttgtagcagttcaaagccaaagttgctagcatcattttgctgttgtgccagttaatcataggatcccattaaataagtgtgctaacatcgaatatagagaaaactggtaaagaacattccagtaggaaaagaaaagaacaatcttccatttctgggcttggccaccatcaccctggtcggacctgtcctggacttccaaccttgactgctgagctcctggcttagcttcttgggttcctaattcctggtgtttaataattctctccacgatcatgtttttctgattttttttttcagaaataatgttttttaaaagacaaaaacaaagggaagaatatttaattactgagcagaagtaaatactgttggtattttgtacataaacctaatttttatatgcatgtttatgctttttaatttttttatcaaaaattaagtcatctacctactacttgtaaccagcttgtttcataacatgttattttcctgtgtcattaaataattacttcaaaaaaaaa

SEQ ID NO: 9326 - DNA, 2706 bp, Homo sapiens
  SIMILAR (764)..(832): 601254mologous to Rattus norvegicus APC protein,accession number D38629,Smith-Waterman Score=69.
atggctcagcaggctacgctgtgttctatgaaaggctgcatgagagcacttgtggcccagttaaaatctgagagtgaagacttacagcagacagtgcaggccaagagagaggtgccaaaaagtaaagtccctgctgctgagaagagagagagtgggcctaagcaggctgctgtaaatgctgccgtgcagagggtgcaggtccttccagacgtggatactttgttacacttcgccacagaaagtactccagacgggttttcttgttcctccagcctaagtgctctgagcctggatgagccatttatacagaaagatgtagaattaagaatcatgcctccagttcaggaaaacgacaatgggaatgaaactgaatcagaacagcctgaggaatcaaatgaaaaccaggataaagaggtagaaaagcctgactctgaaaaagacttattagatgattctgatgacgatgatattgaaatattagaagaatgtattatttcagccatgccaacaaagtcatcacgcaaagccaaaaaactagcccagactgcttcaaaattacctccacctgtggcaaggaaaccaagtcagctacctgtgtataaacttctgccagcacagaataggctgcaggcacaaaaacatgttagctttacaccaggggatgatgtgccccgggtgtactgtgtagaagggacacctataaacttttccacagcaacgtctctaagtgatctgacaatagagtcccctccaaatgaattggctactggagatgggtcagagcggtatacagtcaggaaaaagccacaagcctttccgagtgaaaaagatatggaccaagtccaacaagcatcctcgacttcatctggagctaacaaaaatcaagtagacactaagaaaaagaagcctacttcaccagtaaagcccatgccacaaaatactgaatatagaacgcgtctacctaacaatgaagacagagtgcgggggagcttcgccttggactcaccgcatcactacacccctattgaggggacgccgtactgcttttcccgaaatgactccttgagttctctggattttgatgatgacgatgttgacctttccagggaaaaggccgagttaagaaagggcaaagaaagcaaggattccgaagccaaagttacctgccgcccagaaccaaactcaagccagcaggcagctagtaagtcacaagccagtataaaacatccagcaaacagagcacagtccaaaccagtgctgcagaaacagcccactttcccccagtcctccaaagacggaccagatagaggggcagcaactgacgaaaaactgcagaattttgctattgaaaatactccagtttgcttttctcgaaattcctctctgagttcccttagtgacattgaccaggaaaacaacaataacaaagaaagtgaaccaatcaaagaagctgaacctgccaactcacaaggagagcccagtagacagctgagccaacaaaatcttaccaaacaagcaagtttatccaagaatgccagcagtatccccagaagtgagtcggcatctaaaggactgaatcagatgagtaacggcaatgggtcaaataaaaaggtagaactttctagaatgtcttcaactaaatcaagtggaagtgaatcagacagatcagaaaggcctgcattagtacgccagtctactttcatcaaagaagccccaagcccaaccctgaggaggaaactggaggaatctgcctcatttgaatccctttctccatcttctagaccagattctcccaccaggtcgcaggcacagaccccagttttaagcccttcccttcctgatatgtctctgtccacacatccatctgttcaggcagagtccagtgaaaaagcaaaaagtgaggatgaaaggcatgtgagctccatgccagcacccagacagatgaaggaaaaccaggtgcccaccaaaggaacatggaggaaaatcaaggaaagtgacatttctcccacaggcatggcttctcagagcgcttcctcaggtgctgccagtggtgctgaatccaagcctctgatctatcagatggcacctcctgtctctaaaacagaggatgtttgggtgagaattgaggactgccccattaacaaccctagatctggacggtcccccacaggcaacacccccccagtgattgacagtgtttcagagaagggaagttcaagcattaaagattcaaaagacacccatgggaaacagagtgtgggcagtggcagtcctgtgcaaaccgtgggtctggaaacccgcctcaactcctttgttcaggtagaggccccagaacagaaaggaactgaggcaaaaccaggacagagtaacccagtctctatagcagagactgctgagacgtgtatagcagagcgtacccctttcagttccagtagctccagcaagcacagctcacctagcgggactgttgctgccagagtgacaccttttaattacaaccctagccctaggaagagcagcgcagacagcacttcagcccggccgtctcagatccctacgccagtgagcaccaacacgaagaagagagattcgaagactgacagcacagaatccagtggagcccaaagtcctaaacgccattccgggtcgttctgtgtttcctttatgtcttctgcctccaagcttttttccacaagcagttcctga

SEQ ID NO: 9327 - DNA, 387 bp, Homo sapiens
  SIMILAR (228)..(91): 421254mologous to Main Drain virus NSs protein,accession number X73469,Smith-Waterman Score=71.
tcagagcagtgaataaaacatccaaggtccctgcaatgtgtggagttcacggtagagatgggaaagaagtaaaggaaggcggcatttgtccagtgcaagtcgtccgttgagtgctctgagcactttacgttttacatcagtatcacagcatgcagccaagcgggtggtcgttattaggccacagggccaatgagatgaaagacacttttgatgagaattctgggacaaaggtctgcgctttttctctttggctacaaagctggatgcttccaggtcagagctattgctcaggttgtcaactgagatgtcttcttctgtctgctttgttctagctgcactggcagccgattggatggtgcccacgtgcattgagggagagtgggtcat

SEQ ID NO: 9328 - DNA, 1027 bp, Homo sapiens
  SIMILAR (572)..(760): 901254mologous to Mus musculus Sox6 protein,accession number AJ010605,Smith-Waterman Score=295.
atgacccactctccctcaatgcacgtgggcaccatccaatcggctgccagtgcagctagaacaaagcagacagaagaagacatctcagttgacaacctgagcaatagctctgacctggaagcatccagctttgtagccaaagagaaaaagcgcagacctttgtcccagaattctcatcaaaagtgtctttcatctcattggccctgtgtaccttgtttcctagatcctgtgtcttctttcactatctactctcttgttttgccggagcagttccagatgcttattgagaaagggtgcatgaaagacgtggagagtaaaggaagctcctgtgtccatacttggggcaaacacggggagaaaagggaagggtccacagaagcagggacagcgatagagcatgcagaagaagcccaggcctatagctcacagacagaggtgtcgagcagcaatggctgcaggcaacagcctcagattccaatcaccacaggaacaggtgttgtgtatcctggtgctatcactatggcaactaccacaccatcgcctcagatgacatctgactgctctagcacactcggccagcccggagcccagcctcccggtcatccagagcacttatggtatgaagacagatggcggaagcctagctggaaatcaaatgatcaatggagaggatgaaatggcaatgtatgatgactatgaagatgaccccaaatcagactatagcagtgaaaatgaagccccggaggctgtcagtgccaactgaggagtttttgtttgctgaattaaagtactctgacatttcacccccctccccaacaaagagttattaaagagcccgcatgcatttgtggctccacaattacatcagcagaatggtcttaattgtttcgtaaagtgtgagacagattaagttttccctgatttttcatgaacttgagttttttgttgttattgttattgttgttgttgttgtttttttaatttaggtgaagacatattaaatatgagacaccaggacttgaaactt

SEQ ID NO: 9329 - DNA, 487 bp, Homo sapiens; identical to SEQ ID NO: 4418
  SIMILAR (1)..(474): 1001254mologous to Homo sapiens basic transcription factor 3a,accession number M90357,Smith-Waterman Score=812.

SEQ ID NO: 9330 - DNA, 1212 bp, Homo sapiens
  SIMILAR (135)..(590): 641254mologous to Homo sapiens general transcription factor,accession number X53280,Smith-Waterman Score=403.
cggccccttattcgctccgacaaggtacaaaaaggctctggacggcggcgtggtaggaggacgggagcgggggcgggaagttccctgaaggagcgagacagggagggacagggcagaggaggagaaggaaggcgatgcgacggacaggcgcacccgctcaggctgactctcgggggcgaggtcgagccaggggcggctgccctgggggcgaggcgacgctgtctcaacctccacctcgcggcggaacccgaggacaggagcctcagatgaaagaaacaatcatgaaccaggaaaaaactcgccatacctgcaggcacaaagtgcgcattggtgggaaaggaactgctcgcagaaagaagaaggtggttcatagaacagccacagccagatgacaaaaaacttcagtttctccttaaagaagttaggggtaaaccattatctctggtattgaaggaggtgaatatgtcttacaaaccaaggaaccagtggatccacttttaacaacccctaaaaggttcaggccatctcttgggcagcgaacacttttcacccattaccaggcccatgctggagaccaaagccagctgacaagaaatggctaccccagccatccttaaacccaagcttgggtgccggatagtcctgacttaggtttaagggaagactggcccgaagcttcttgcccccaaacaatcctggtggatggaaaagccacccacttgcctactggcagaggatgatgatgatgaaagttcccagatccttgtggagaattttgatgaggcttcccaagaatgagggcaaacttgaattgaggtcaacttcctgaagataaaaccttgaagaagttacttgggagccgctattttaaaataatgactgctttttaagaaatttttgtttatggatctgataaaatctagatctctaatatttttaagccccaagcccccttgggacactgcagcccttttccagtttttgcttatacacaattccattctttgcagctaattaaggccgcaagaagcctgggaactcaagtttgaaacaaagattaataaagttctttgcctagtatacagttttatttttttatttcattgacaccgatctgtacacagtaaaaaaaattgcttatagaaagctaatcatggcatgtaatatggctgataacctttggaatttgattaaagatttaaaatcaaaaaa

SEQ ID NO: 9331 - DNA, 370 bp, Homo sapiens
  SIMILAR (102)..(311): 831254mologous to Homo sapiens putative nuclear protein,accession number AJ245877,Smith-Waterman Score=332.
  misc_feature (1)...(370): n = a,t,c or g
aggtgcggcaagtctactgcgggctggtccgggctcctcaggttcagacccgaccgttatccagtcggttcgtggagaggagaggtgcactttacaggtccccgatgaaccaagagaaccctccaccatatccaggccctggtccaacggccccatacccacagtacggctggcagggtggacctcaggagcctcctaaaaccacagtgtatgtggtagaagaccaaagaagagatgagctaggaccatccacctgcctcacagcctgctggacggctctctgttgctgctgtctctgggacatgctcacctgaccagaccagcccagccgtcctgtcctgccagctctgctgccacctctgacaggtgn

SEQ ID NO: 9332 - DNA, 738 bp, Homo sapiens
  SIMILAR (289)..(609): 331254mologous to Homo sapiens synapsin Ib,accession number M58378,Smith-Waterman Score=89.
atgaccattctcaatgaatgtggtgagaaggtgatcgggggcaaccctcacttgcaaaccgaggcttttaaaaggcaaaatagaatgttctacataaagtacctgaccaaaacagatttctctatccccaagaagatggaaaaatccaagggcatctttgagtctacgtcccttagtgtcatgaccacactgtcatcacatgacactcagatccacgctggtgcagtcattagggagaccatcattgaagtgctggacctgactgttacttccagcactagttacttccgctccgctcccacccgcgggactcgcgacctgcccctgcccccggctggcccagctcggaataggcagagcagcgcctcagaaacgcagcccaaggcgaagaaatccagaagcctcccgcggacgtcccccggacggggtgtggcgagccccgctccgagcccgccgactcctcgtgagacggaaccgcagcgacgcggagaccctgggctgcgcaacccctgcctgagccaggccagcccgggtgccccccagttctcagggcctccccagggagcccggggacgcgccctgtccgtgcctgatccccgcccggtcccagctgggtcgggccaggtccgctgcacctcacctctcctctcccgaaccgactggataacggtcgggtctgaacctgaggagcccggaccagccgcagtagacttgccgcacctgtctcagagcaagtga

SEQ ID NO: 9333 - DNA, 871 bp, Homo sapiens
  SIMILAR (141)..(365): 661254mologous to Homo sapiens putative nuclear protein,accession number AJ245877,Smith-Waterman Score=285.
gtcaggcgcccggttgctcctcacttgctctgagacaggtgcggcaagtctactgcgggctggtccgggctcctcaggttcagacccgaccgttatccagtcggttcgtggagagcagaggtgcactttacaggtccccaatgaaccaagagaaccctccaccatatccaggccctggtccaacggccccatacccaccttatccaccacaaccaatgggtccaggacctattgggggaccctacccacctcctcaagggtacccctacccaaggatacccacagtacggctggcagggtggacctcagggagcctccttaaaaccacagtgttattgtgggtaggaagaccaaaggaagagatgaagctagggaccatccacctgccttcacagcctgctgggacgggtctttgtttgttgctgtctctggggacatggttcaccttgaccaggaccaggcccaggccgttcctgttcctggccagctctgctgccaacctcttgacaggtgtgccttgcccccatctcttctgattgctgtttaacaaatggactagctttgcacagacacctctaccttcagcactatgggattttagaattaatggggggttgctactggtttaattcagtggacttggatctttttaatggtccaaaaatcccatttcttattggaatctttaaagatgtgctaaatgacttttttggccaaaggcttagttgtgaaaaatataatttttaaattatacattcaaggtagtggccaaatgtaacacatcaatcatggaatgatttctctgcttaacagccgccctgtatggtttcaataaattgtgtccaaagccccaaaaaaaaaaaaaaaaaaa

SEQ ID NO: 9334 - DNA, 524 bp, Homo sapiens
  SIMILAR (3)..(113): 911254mologous to Homo sapiens ribosomal protein L23a,accession number U02032,Smith-Waterman Score=171.
cgccgaaagcgaagaaggaagctcctgcccctcctaaagctgaagccaaagcgaaggctttaaaggccaagaaggcagtgttgaaaggtgtccacaaccacacacacaaaaaagaagatccacacacccctcaccttccagcggcccaagtcactgcgactccggagacagcccaaatatcctcggaagagcgctcccaggagaaacaagcttgaccactatgctatcatcaagtttccgctgaccactgagtctgccatgaagaagatagaagacaacaacacacttgtgttcattgtggatgttaaagccaacaagcaccagattaaacaggctgtgcagaagctgtatgacattgatgtggccaaggtcaacaccctgattcggcctgatggagagaagaaggcatatgttcgactggctcctgattacgatgctttggatgttgccaacaaaattgggatcatctaaactgagtccagctgcctaattctgaatatatatatatatatcttttcaccata

SEQ ID NO: 9335 - DNA, 1197 bp, Homo sapiens
  SIMILAR (520)..(837): 851254mologous to Mus musculus CysRS protein,accession number AJ276796,Smith-Waterman Score=452.
atgctttaccaggttctcatggttgatacctgtgggacacgaggagaaggggcctttctgaagtacagaaagcctgcctgcccaactgccctgggcttcatgtttcccagaagccacggactcaccgctgatactgtcttggtgtccagtctgagtcgctggttcctttggcggcggctgctgctgctgctgctgctgctgctgctgaatctgcccttgcagaaagcggtccatcggaaggcgactccggaaagtgccattgcggactgcagtggcccgcgcgactgtgcgccttgggtaaaatttgctatgctagaattacactccttcaaatgtcccgctggtgaatactggtctaaagacgtctgttgcaagaactgttctgcaggtacatttgtcaaggcgccctgcgaaatcccccatactcaaggacaatgtgagaagtgtcacccaggaacattcacagagaaagataattacctggatgcttgtatactttgctccacctgtgataaaggtgacttctatggcaagaagaccgcagttcacgaagccttgtgtgataacattgacacccggactgtcatggaagagatgcgggctttggtcagtcagtgcaacctctacatggcagccaggaaggctgaacggaggaggcccaaccgggctctgctggagaacattgccatgtacctcacccacatgctgaagatctttggggccatagaggaggagagccccctggggttcccagttggtgggcctggaaccaacctgaaccccattgaaaatggtggtatggacaagtttctgacaactgtgtctgttctgaggaaaacacatcgtgtcagcaacggacagaatagtgtctgccgaagtgtatcctattggaagcccaaatgtaccttttgctccctgacccacatcacctatattaggtacttggagctaaggttgacgctcgagtcaacagtcatgccctaccttcaggtgttatcagaattcagagagggagtacgaaagattgcccgagagaaaaaagttcttgaggttctacagctcagtgatgccctccgggatgacatcctgcctgagcttggggtccggtttgaagaccatgaaggagccctgtctgctcttctgaacgtcctgagttcaaatcccaacaaccacatggtggctcacaaccacccgtaa

SEQ ID NO: 9336 - DNA, 642 bp, Homo sapiens
  SIMILAR (151)..(384): 601254mologous to Homo sapiens putative p150,accession number U93574,Smith-Waterman Score=202.
atggacggtgatgaaaaaacatcttttatctgtgctgtccacaatgggatttttagagaatggaagcaaaccggtacatgtagtcctatcaaaaaggggcagctgcttttacgagtagaatgccatgggaaaataaaggcccagggtggccagatgtatattaaagcagcactgttcacaagagcaaagacatggaatcaacctaaatgcccatcaaatgatagactggataaagaaaatgtgggtccatatataccgtgtgaatactacacagccataaaaaagaagatcatgtcctctgtggaaacatggatggagctggaggccattatcctcagcaaactcacacaggaacagaaaagcaaattccgcacgttctcactttatagcagcagagttttccagaggacacaagacgtgccatatcacaataaactgaatgaagaagcagataaaccaaccacaaacaaaaagggactgatcctaaacctgagactggtgaatacaccaattggcaggaaaaatacaggtaaactttctgctataaaggaaaagttgctcaagaggccaaagaggaaacacctaagtaaaatctatacacttaaaaatgacagcgacttaataaaggacaaaaatatctga

SEQ ID NO: 9337 - DNA, 825 bp, Homo sapiens
  SIMILAR (277)..(729): 771254mologous to Homo sapiens DC38,accession number AF265440,Smith-Waterman Score=557.
atgatcgaatttggatttaattatgtgcctataaagataaccaagaagcaaataagaagcctggagatagttatacccaatgaagacgtaaaagcaccgggtctctggattgatgggaatggtacagttgagggaccaaccctgagaaaggaactgattttgtcttcaaatattggacaacatgatttggacacaaagactaaacagattcagcagtggattaagaaaaaacacctagtccagattaccataaagaaaggaaaaaatgtagacgtgtcagaaaatgaaatggaggagatatttcatcaaatactccagactatgcctggaatagctacattctcatctaggccacaagctgttcaaggaggaaaagctttaatactctccttcctaattcatgcaaaagcctttagtaccgctgaagacacccagaatgaaggaaaaaagacaaaaaagaataaaacagcttttagtaacgttggaagaaaaattagtcagcgagttattcacttatttgatgagaagggcaatgatttgggaaacatgcaccgagcaaatgtgattagacttatggatgagcgagacctgcgactggttcaaaggaacaccagcacagaacctgcagagtatcagctcatgacaggattgcagatcctccaggagcggcagaggctgagggagatggagaaggcgaaccccaaaactggtggttgtcttacccgtgacttcgcctccctcagcgactgccacagaaagacatttgcttatggtagcggtgacaatggagtaaacctgcatcgagtccatatcccacaggattga

SEQ ID NO: 9338 - DNA, 1889 bp, Homo sapiens
  SIMILAR (1202)..(549): 521254mologous to Homo sapiens DC38,accession number AF265440,Smith-Waterman Score=407.
tcatgaggaaaaccgcccttttgtgtgtgaacatgtggctgtggcaaaacattgcaaataaaccaagtctcactagcgatgctgttgtacatgtcctggcaagaagaaaatgaagctcaaagtcaaaaaatctcgtgaaaaacggagtttggcctctcatctcagtggatatatccctcccaaaaggaaacaagggcaaggcttatctttgtgtcaaaacggagagtcacccaactgtgtggaagacaaaatgctctcggcagttccagtacttacccttggctaagaactgccctgctttgtttaaaggactgcagaccaaggagcgagctttctctcagaggcatatttttccgtattaaaattactgatgcagaacatttgattccttatcatttccatggtctttgttcaaagggtctctttcctgggtctcttgagtttctcgatatgccttctcttcctttttgctcaaaggacaaagaacccacattaaagcttttcctccttgaacagcttgtggcctagatgagaatgtagctattccagggcatagtctggagtatttgatgaaatatctcctccatttcattttcttgacccggttacacttttttcctttctttatgggtaatctgggactagggtgttttttcttaatccactggctgaatctgtttaggtctttgtggtccaaatcatggttgtccaatatttggaagaccaaaatccagttcctttctcaggggttgggtcccagttttgggggttccgccttctccatctccctcagcctctgccgctcctggaggatctgcaatcctgtcatgagctgatactctgcaggttctgtgctggtgttcctttgaacccagtcgcaggtctcggtcatccataagtctaatcacatttgctcggtgcatgtttcccaaatcattgcctttctcatcaaataagtgaaataactcgctgaactaatttttccttcccaacgttactaaaagctgttttattccttttttgtcttttttccttcattcctgggtgtcttccagcggtacttaaaggcttttgccatgaattaggaaggagagtcttggggcagaagcaataggggacaactgtgctggtgctgtcttttgcaggatgtgtttaccaaaaacatctaatgcaactattttcaggactttacaggtttgtaggtgttaacctctttagaaaaagagcagccatccttttttaggaagaactgtaatcatccccagttgatgaggagaagctcttctgtagagaagaatgacagttgaaactgagacttctcagtaagagaacttcgtttacttggttcaagtcttaagccacggagcccactaaatgacgaatgagaaaaaaaatcccagtcacttcgcgaccttcccccataaggcctcctcccgcaacagcaggcagcaagaacaacgcatttgtccagcatgtcctgcgcaggcgcccttcgcctggctcgctctgccccacctgtgccaggcagtaagccgcaagagcacttccgggagcccccgacccggttgttggctattgatttgttctttaaaaatgtattaattattgaacacccgtataaccataacctagatttagcaaatgctgccaccaccctggcagaccttccacacccttatcctggacctataaaaacccgagaccctagcaggcagacacacaagccgctgtacgtggagaaaaacaaatcgatgaaagaagacaagcggctgacatcgagagacatcaaggggagcatgccggcagaagagcactcagacagatgctggcaggccattgacccgcggaaggaggcggagtttggacggggcagtctgaggagagcctag

SEQ ID NO: 9339 - DNA, 2712 bp, Homo sapiens
  SIMILAR (1154)..(1306): 581254mologous to Homo sapiens guanine nucleotide-binding regulatory protein 1,accession number M60165,Smith-Waterman Score= 104.
gacccctgccagctgccgcgagtctccgctgctggaatcttgttagcggctgtctttttggagggttctggtttcccgacatttttgtttccagcccaggagaggatatcgtgattttccccccttgagcccaggctctgctctctgggggggtggggggcgctccaagccggggagccgtgccagccgagtcgtgcgggctgtggcagggaaggggccaccatgggatgtactctgagcgcagaggagagagccgccctcgagcggagcaaggcgattgagaaaaacctcaaagaggatggcatcagcgccgccaaagacgtgaaattactcctgctcggggctggagaatcaggaaaaagcaccattgtgaagcagatgaagatcatccattgaagatggcttctccggagaagacgtgaaacagtacaagcctgttgtcttacagcaacactatccagtccctgggcagccatcgtacgggccatggacactctgggcatcgaatatggtgataaggagagaaaggctgacgccaagatggtgtgtgatgtggtgagtcggatggaagacaccgagcccttctctgcagagctgctttctgccatgatgcggctctggggcgactcaagaatccaagagtgcttcaaccggtcccgggagtatcagctcatcgactctgcccaatactacctgggacagcctgggatcggattggggccgccgacttaccagcccaccgagcaggacatcctccgaaccaggggttcaaaaccacttggcatcgtagaaacccacttcacattcaagaacctccacttcaggctgtttgacgtcggaggccagcgatctgaacgcaagaagtggatccattgcttcgaggacgtcacggccatcattttctgtgtcgcgctcagcggctatgaccaggtgctccacgaagacgaaaccacgaaccgcatgcacgagtctctcatgctcttagactccatctgtaacaacaagttgttcatcgatacctccatcattctcttcctcaacaagaaagatctctttggcgagaagatcaagaagtcacccctgaccatctgctttcctgaatacacaggcaacaatacctatgaagacgcagccgcctacatccaaacacaattttgaaagcaaaaaccggctaacccaaacaaaagaaatatattggcaacaatgacttgtgcccacagacacgaaataacatccccaggtggtgttcgacgccgtcaccgacatcatcattgcccaaccaacctccggggctgcgggcttgtacttgacctcttgttcctgtattagcaacctatttgactgcttcacgggactctttgcctgttgacgttgatctccctggtagcatgaccttttggcctttgtaagacacacagcctttctgtatcaagcccctgtctaacctacgaccccagagtgactgacggctgtgtatttctgtagaatgcttgtagaatccgggttttagttgagtcttcacatttagaatttgaaaggaaaaacagaacatttctgcatgtgctttgtagcttaaaaaaaggaaaactcaccatttcatccatatttctttttcttggcaaaacaaacatacccatctggcaccgacggcctgcccccgtcccacctcgcggcgcagcccctggagctcctgctggggggcagggcccatctgccgcctggggctccggtgcggtgcactggtccgaggagtgtgctcaggccgggctttccagaaggccacaggcatctggcaaaccctgcttgcctgccggccgcccagacaccacagacgccacctggcggccctgaaggccactcccgccacacggttcactccaggttcgtatagaaaaagcacagctctcactggccagtagctgccaaaaagaacacccatcgtataaggaaatccagcccccatagaaaacaatctgcccaccgaccccctttctaaggatagccctttgtaggggttttttggttcctttttttttttttttcagtttttgtttttacttttgtcccgcccgagtactatgtattaccagcccccccaccccacagatcagttttcctagtctttgggaaacgggttgtgtttttttttcctttgccgtgttggatttccggtcccggctgacacctcccttcgtgtgtgcgcccccttcccccacccctgccttttgtttcggtgccctgtgtcccgtctctctcatgtggggatgtttgtgctgcagacaaaaagaacaaaaaaaaatttttaaataccacaagatggaaaaaaaaaacaaaaaaattttaaaaagatggaatgtagtgtttacattaaagcccgcccgttttccatgaccaatccctatgtcatttctactttgactaatacccaaaccctaaacctcttcacggtttcacttttaagacttaatctttgctgaagaagaccagtcacagccatttcaaataaagaggaggcaaaaagacaaaacacacaaaaaattaaaaaaaaaaacttaaaaaaaaaaggaaaaaagaaaaaaaagcccacgggtctttgtaagcctttctattcccaatcggtgaggtttctgtgatatcttacacactgccagtctacttctctgactaatggaaaattcctgtgtagctcaataaaagagaatgtttgtctgt

SEQ ID NO: 9340 - DNA, 412 bp, Homo sapiens
  SIMILAR (3)..(185): 951254mologous to Homo sapiens glutathione peroxidase,accession number M83094,Smith-Waterman Score=278.
ccatgtgtgctgctcggctagcggcggttgcggttgcccagtcggtgtatgccttctcggcgcgcccgctggccggcggggagcctgtgagcctgggctccctgcggggcaaggtactacttatcgagaatgtggcgtccctctgaggcaccacggtccgggactacacccagatgaacgagctgctgtctcaagggctcagctgtgcctagggcgcccctcctaccccggctgcttggcagttgcagtgctgctgtctcggtggggttttcatctatgaggggggttcctctaaacctacgagggaggaacacctgatcttacagaaaataccacctggagatgggtgctgggttctgttattccatattttcccaaaccaatgctgtcttcctcattattatatggcttt

SEQ ID NO: 9341 - DNA, 289 bp, Homo sapiens
  SIMILAR (137)..(81): 841254mologous to Homo sapiens glutathione peroxidase,accession number Y00433,Smith-Waterman Score=82.
  misc_feature (1)...(289): n = a,t,c or g
aggggcgccctaggcacagctgggcccttgaaaacagcagggcttcgatgtcaggctcgatgtcaatggtctggaancggggggtcggtnataagcncggtgncgtcgtcgctgggagctggcagggcctcccgcagctganacttgtggcctcttggcggggctgtgcctcggacccgtagatggaccnagataggtcgggccccgagcnagagctnagatccctctggggctgggaccaaacccgcctttcccaggtgtacggtactccactggatatgctctcagg

SEQ ID NO: 9342 - DNA, 987 bp, Homo sapiens
  SIMILAR (333)..(749): 571254mologous to Homo sapiens glutathione peroxidase,accession number M83094,Smith-Waterman Score=329.
  misc_feature (1)...(987): n = a,t,c or g
agtgtggtggaattcccgccgccggccagttaaaaggaggcgcctgctggcctccccttacagtgcttgttcggggcgctccgctggcttcttggacaattgcgccatgtgtgctgctcggctagcggcggcggcggcggcccagtcggtgtatgccttctcggcgcgcccgctggccggcggggagcctgtgagcctgggctccctgcggggcaaggtactacttatcgagaatgtggcgtccctctgaggcaccacggtccgggactacacccagatgaacgagctgcagcggcgcctcggaccccggggcctggtggtgctcggcttccccgtgcaaccagtttgggcatcaggagaacgccaagaacgaagagattctgaattccctcaagtacgtccggcctggtggtgggatcgagcccaacttcattgctcttccataagagcgaggtgaaccggtgcgggggcgcaccctctcttcgccttcctgcgggaggccctgccagctccccagcgacgacgccaccgcgcttatgaccgaccccaagctcatcacctggtctccggtgttcgcaaaaancccggaaaaattaagttttttttgggcccccctgggaacttctttgagaagttcctcggtgggccctgcacggtgttgcccctacgcaggtacagccgccgctttccagaccattgacatcgagcctgacatcgaagccctgctgtctcaagggcccagctgtgcctagggcggcccctcctacccacggctgcttggcagttgcagtgctgctgtctcgggggggttttcatctatgaagggtgtttcctctaaacctacgagggaggaacacctgatcttacagaaaataccacctcgagatgggtggtggtccctgttgatcccagtctctgccaagaccaaggcgaagtttccccactaataaagtgccgggtgtcagcagaaaaaaaaaaaaaaaaaaa

SEQ ID NO: 9343 - DNA, 1131 bp, Homo sapiens
  SIMILAR (140)..(12): 811254mologous to Homo sapiens Human secreted protein, SEQ ID NO: 7217,accession number G03136,Smith-Waterman Score=178.
atggaatactatgcagccgtaaaaaaggatgagttcttgtcctttgcagggacatgggtgaagctggaaaccatcattctcagcatactaacacaggaacagaaaaccaaacacctcatgttcgcactcataagtgggaggaacctattcaatcctgggaatggaaaaattcctccaacccccaacccgggcttctacactgatacagagagccacccagagtttttgtggaggcaaacactcaagtccacaggggcctccacaagccttagaccctggagcagcccagtctcggctgccatatccccaaaagaggccgcggctgtggtgcccgggagcagaagcaccctgacggtggatcagacgactccacccatccacactgttccctccgccgggaaggccatgcctgctggggctaacagcacagtaggcctgcttctgcctgaactctgctggcaggcacagccccatgatttcccgggaagcacctggatggtggattggctgtggctcttgcatgagggagccctgcagaccagaacacctaacaaaggaaatgcaggcatggagtcagtgatcagaggtgctctccaaggcccaggagcagacaagaccataaattcaaaggagagagctgacatgaccaagcaacattttatggaagagctggaaatcgaggggaaccttgaaataaggacaagacatcctcttccccatggctatgtgttaacaaagcggcagcaagcatgtgtatccatcaggtattcagtgaacagtagagactatttttgctgtagtgcggacttttgcataggcaaacaacagaagcgcactgacgtctctccctactggctgctgatgcatgctgatgctgacgctacctgtgggtgttctcacctccaaggacccagaatctcgtttgctagagggagaggcaggtgccaagagcagtggggcttgtgtggagtcgatgtgacatcagccttagtgaccaatagctctggccaacttatagggccatgtctgaaccttggggacaccttgtctgatggttgcactcagattgcatgccatagggattggttatttctacagaacaatgtagaggctgcctctctggaggggtaa

SEQ ID NO: 9344 - DNA, 438 bp, Homo sapiens
  SIMILAR (435)..(271): 601254mologous to Homo sapiens vacuolar H+ ATPase E subunit,accession number X76228,Smith-Waterman Score=145.
tcatgagcccgttgtgaccacccgacagcattcgtcgtgtgctatagattttatccttggcctgctggacatgttgatgccgctgtccattgatatgtatgtgcccgcgctaccgatagtttcatcgcagtttggcgtaccttgctcaagggcacgattatcatcttgcatgagtcttcgatccatgataacttcaatctgacctcccaaaagctgtgggcattcgtaccaaacaaggctccccggacttctggcatcatctgctggcctgagatccagtctgcttttcagggtggtggaaacctttattttacaatccccattgtggatcgtaactccaccaactatgttctcaggcaggtacgactcctgggcaattgagacattaacaatcgtgtgtggtgcggatcttgtacatagagactgtctttgcaccat

SEQ ID NO: 9345 - DNA, 734 bp, Homo sapiens
  SIMILAR (732)..(244): 981254mologous to Homo sapiens vacuolar H+ ATPase E subunit,accession number X76228,Smith-Waterman Score=794.
cggctggacactgtcacactttcagaagaactggaggtgggtcctgatcatattacatgaagctttccaccattgtgaacaattaggcaaggcatgagtgacagaggggcatcgctgataaatacagagcaatactggggcagtgaagaggaagctacagagacattcgtgtttcttcaaatatcagaagcttccacatcacagcaggagagctgacgacgagctcctcctcctgaaggcttagtccaaaaacttcctgttggcatttgcaccaaacaaggctccccggacttctggcatcatctgctgggctatgagatccagccggctttccagggtgttggaaacctttattttacgatctccattatagatctcaactccaccagctatgtcttcaggcaggtaggactcctggtcaatttggacatcaacatcgtttttggtggcaattttgtacataggaattgccttctgcactgcagcctttaccagagggaaatcttgtttcctgcaacgaacaatcattcggggctccagcaactggtacaaaccctggagaaccagtccatccagcagcacttggtacctggttgtatcttttaccaccttgctgagtctctgttttgcttcatttagtaggtctgtgataaggtcatctcttgctctgaggacaatagatctcgcttgattcatcaaattggacatctgaattttcttctgctgctcaatcg

SEQ ID NO: 9346 - DNA, 1065 bp, Homo sapiens
  SIMILAR (965)..(991): 661254mologous to Homo sapiens PRO1546,accession number AF116638,Smith-Waterman Score=42.
atggaatactatgcagtcataaaaaaggatgagttcatgtcctttgcagggacatggatgaagctggaaaccatcattctcagcaaactaacacaggaaccagaaacccacccccctcatgttctcactcataagtgggagctgaacaatgagaacacatgggcacagggaggggaacatcacacactgaggcctttcagggagtgggggcccaggggagtgatagcattaggagaaatatctaatgtagatgatgggttgatgggtgcagcaaagagaggtggagaaaacaggagaagggataactacgacttttgtcctcaaataccaggaaaactacctgtgaatacgggacctttcatgacaaagggactttgcagatgtgattcagttaaggatctgtggatgggaagcttatctggacacagccagtgtaatcataagagtccttataataaaggggcaggagagtttacagcagagagaaggcgaggtggcagtagcagcaggggtcggagtaatgccattgctgaagagggctggaaagttattttgctgcctaaacagtttaaagcagtggttctaaacctctttcagcaattaggcaaggacattagtgacagaggggcatccactgaaaaagacagagcaatactcgaacagcaaagaggaagccacttagacattcttgtttcttcaaatatcagaagcttccacatcatagcaggagggctagggatggacttcacctcccaaaagctgttggcatttggaccaaacaaggctccccggacttctggcatcatctgctggcctgagatccagtcggcttttcagggtgttggaaacctttattttacaatccccattgtggatctcaactccaccaactatgtcctcaggcagaagcatagagaggaagctattgcttatgaaaaggcacaggacgaggaaatagctcaaggggccaatgacagggtggggaacagggactcaaagaagtccatgggtagcaggacagtgtgtcagtgtcttcagaatatatctacaatgcatgctgtctaa

SEQ ID NO: 9347 - DNA, 2055 bp, Homo sapiens; identical to SEQ ID NO: 3400
  SIMILAR (1274)..(1357): 531254mologous to multiple sclerosis associated retrovirus polyprotein,accession number AF009668,Smith-Waterman Score=63.

SEQ ID NO: 9348 - DNA, 352 bp, Homo sapiens; identical to SEQ ID NO: 3402
  SIMILAR (2)..(193): 871254mologous to multiple sclerosis associated retrovirus polyprotein,accession number AF009668,Smith-Waterman Score=292.

SEQ ID NO: 9349 - DNA, 1446 bp, Homo sapiens; identical to SEQ ID NO: 3409
  SIMILAR (238)..(645): 841254mologous to multiple sclerosis associated retrovirus polyprotein,accession number AF009668,Smith-Waterman Score=614.

SEQ ID NO: 9350 - DNA, 177 bp, Homo sapiens
  SIMILAR (76)..(165): 401254mologous to Canis familiaris homeodomain protein,accession number AF126157,Smith-Waterman Score=59.
gcacaaaaatagagcattaaaccaccaaagctaagaaccctcacggagtccattgcacccaccccttgccacctccaccagaacaagcactggtatccacagctgagagacccatagacagttcacatcacaggactctgtgcagacaacccccagtatcagcccagagccaggtag

SEQ ID NO: 9351 - DNA, 3021 bp, Homo sapiens
  SIMILAR (1)..(1569): 821254mologous to Homo sapiens putative p150,accession number U93574,Smith-Waterman Score=2287.
atgagtgaactcccattcacaattgcttcaaagagaataaaatacctaggaatccaatttacaagggatgtgaaggacctcttcaaggagaactacaaaccactgctcaacaaaataaaagaggacacaaacaaatggaagaacattccatgctcatggataggaagaatcaatatcgtgaaaatggcccatactgcccaaagtaatttatagattcaatgctatccccatcaagctaacattgactttcttcacagaattagaaaaacctgctataaatttcatatggaagcaaaaaagagcctttatagccaagacaatcctaagccaaaagaacaaagctggaggcatcacactacctgacttcaaactatactacaaggctacagtaaaaaaaaaacagcatggtaccagtaccaaaacagagatatagaccaatggaacagaacagagccctcagaaataatgctacacatctacaaccatctgatctttgagaaacctgagaaaaacaaacaatggggaaaggactccctatttaataaatggtgttgggaaaactggctagccatatgaagaaaactgaaactggatcccttccttacaccttatacaaaaattaattcaagatggattaaagacttaactgttagacctaaaaccataaaaaccctagaagaaaacctaggcaatacaattcaggccataggcatgggcaaggacttcatgactaaaacaccaaaagcaatggcaacaaaagccaaaattgacaaatgggatctaattaaactaaagagcttctgcacagcaaaagaaactaccatcagagtgaacaggcaacctacagcatgggagaaaatttttacaatctactcatctgacaaagggctaatatccagaatctacaaagaactcaaacaaatttacaagaaaaaaacaaacaaccccatcaaaaagtgggcgaaggacatgaacagacacttctcaaaagaagacatttatgcagccaaaaaacacatgaaaaaattctcatcatcactggccatcagagaaatgcaaatcaaaaccactatgagatatcatctcacaccggttagaatggtgatcattaaaaagtcaggaaacaacaggtgctggagaggatgtggagaaataggaacacttttacactgttggtgggactgtaaactggttcaaccattgtggaagtcagtgtggcaattactcagggatctagaactagaaataccatttgacccagccatcccattactgggtatatacccaaatgactataaatcatgctgctataaagacacatgcacacgtatgtttattgcggtattattcacaatagcaaagacttggaaccaagccaaatgtccaacaatgatagactggattcagaaaatgtggcacatatacaccatggaatactatgcagccataaaaaaggatgagttcatgtcctttgtagggacatggatgaaattggaaatcatcattctcagtaaactatcgcaagaacaaaaaaccaagcaccgcatattctcactcatagcttctaatagagctgtaacactcatcacatggcccaagattccattccttggaatccgtgaggccaagaaccccaggtcagagaacacgaggcttgccaccatcttggaagtggcccaccgccatcttggaagtggctcgccaccatcttgggagctctgtgagcaaggacccccggtaacattttggcgatcacaaagggacctccaaagtgctgtacctagcccttatactctgctttcccaaataccagaggaagcagagtggtttacagtcctggacgttaaggatgcctttttctgcatccctgtacatcctgactctcaattcttgtttgcctttgaagatccttcaaacccaacgtctcaactcacctggactgttttaccccaagggttcaaggatagcccccatctatttggccaggcattagcccaagacttgagccaattctcatacatggacactcttgtcctttggtatggggatgatttaattttagccacccattcagaaaccttgtgccatcaagccacccaagtgctcttaaatttcctcactacctgtggctacaaggtttccaaacgaaaggctcagctctgctcacagcaggttaagtacttagggctaaaattatccaaaggcaccacggccctcagtgaggaatgtatccagcctaaactggcttatcctcatcccagaaccctaaagcaactaagagcattccttggcataacaggcttctgccaaatgtggattcccaggtacagcaaaatagccaggccattatatacactaattaaggaaactcagaaagccaatacccatttagtaagatggacacctgaagcagaagcagctttccataccctaaagaaggccctaacccaagccccagtgttaagcttgccaacagggcaagacttttctttatatgtcacagaagaaaaaggaatagctctaggagtccttatacaggtccgagggacgagcttgcaacctgtggcatacctgaataaagaaaatgatgtagtagcaaagggaactagtgctcagctggcagaactaatagccctcactcgggcactagaattaggagaagggaaaagtgtaaatatatatacagactctaagtatgcttacctagtcctccatgccaaggaagcaatatggagagaaagggaattcctaacttccaaggaaacacctatcaaacatcaggaagccattaggagattactactagctgtacagaaacctaaagaagtgacagtcttacactgcccgggtcaccagaaaggaaaggaaaaggaaataggaaggaaccaccaagcggatattgaagccaaaagagccacaaggcaggactctccattagaaatgcttatagaaggacccttagtatggggtaatcccctccaggaaaccaagccccagtactcagaagaagaaatagaatga

SEQ ID NO: 9352 - DNA, 1966 bp, Homo sapiens
  SIMILAR (1190)..(1879): 841254mologous to multiple sclerosis associated retrovirus polyprotein,accession number AF009668,Smith-Waterman Score=1009.
ctatattagtctccttgatctggccaatagagattccacctcagggcttgtttcctctgcttgaagctctcctttcccacatggctgcatggctcatgcctctttcaggtcacctttatgagagaggacaggcactggtatccacggctgagagacccacagatggttcacatcacaggactctgtgcagacaacccccagtaccagaccagagccaggaagccacatccataggaagagggggagagtactacatcaagagaacacgcagagggacaaaagaatctgaacaacagccttcaaccctagaccttccgtctgacggagcctacccaaatgagaagaaaccagaaaaccaatcctcataatatgacaaaacaaggctcttcaatacccccccaaaaaaatcacactagttcaccagcaatggatccaaaccaagaagaaatccctgatttacctggagaagaattcaggagtgaataaaatacctaggaatccaacttatgagggatgtgaaggaccttttcaaggagaactacaaaccactgctcaacaaaataaaggaggacacaaacaaacggaagatcattccatgctcatggataggaagaatcaatattgtgaaaatggccatactgcccaagctgtacctaacccttacactctgctttcccaaataccagaggacgcagagtggtttacagtcctggaccctaagcatgccgttttctgcatccctgtacatcctgactctcaattcttgtttgcctttgaagatccttcaaacccaatgtctcaactcatctggactgttttaccccaagggttcaggaatagcccccatctatttggccaggcattagcccaagacttgagccaattctcctacctggacactcttgtccttcggtacatggatgatttacttttagccacccattcagaaaccttgtgccatcaagccacccaagcactcttaaatttccttgctacctgtggctacaaggtttccaaaccaaaggctcagctctgctcacagcaggttaaatacttagggctaaaattatccaaaggcaccagaaccctcagtgaggaacgtatccagcctatactgggttatcctcatcccaaaaccctaaagcaactaacagcgttccttggcataacaggtttctgccaaatatggattcccagcatactcactgctaaaggagacttgtggctgtcagataaccatttacttaaatatcaggttctattacttgaagggccagtgctgcaactgcgcacttgtgcaactcttaacccagccacatttcttccagacaatgaagaaaagatagaacataactgtcaacaagtaattgctcaaacctacgccactcgaggggaccttttagaggttcccttgactgatcccgacctcaacttgtatactgatggaagttcctttgtacaaaaaggacttcaaaaagcgggatatgcagtggtcagtgataatggaatacttgaaagtaatcccttcactccaggaactagcactcagctggcagaactggtagccctcacttgggcactagaattcggagaaggaaaaagggtaaatataaatacaggctctaagtatgcttacctagtcctccatgcccatgcatcaatatggagagaaagggaattcctaacttccgagggaacacctatcaaacatcaggaagccattaggagattattattggttgtacagaaacctgaagaggtggcagtcttacactgctggggtcatccgaaaggaaaggaaagggaaatagaagggaactgccaagcggatattgaagccaaaagagcctcaaggcaggaccctccattagaaatgcttatagaaagacacctagtatggggtaatcccctctgggaaaccaacccccagtactcagcagaagaaatagaatggggaacctcatga

SEQ ID NO: 9353 - DNA, 474 bp, Homo sapiens
  SIMILAR (369)..(133): 671254mologous to Homo sapiens Partial seqeunce of the clone 9 protein,accession number W42400,Smith-Waterman Score=227.
tcagatgttgcccttgtccacgtgtccatcacatgcacatttctgccagagcggagataaggccccctcctcggccccctccttttctgctgctgcttgtttttctttttcagacagggccttgcagtcacccaggctgttctcctcctccagctcatccttcctgttcatcatggccacagtggcctggcgcagttcacctgtttcggttttgctggcaaagcccgctgcctgcttgatcgctgccgctgtgagtgccaatcctcgactcctcttcaagccatgctgcaggacggcttcaaactgggcacacagacaggtgaccctctgccagtggtcagaactttcttcttgcttctggccagagtaaaagcaactgtcagtgttggctgacagtggcttgctcgggcagttgttgcctgggggtggggatgccgtagctgggacattgccgtggcatttgtaaactgtcat

SEQ ID NO: 9354 - DNA, 1587 bp, Homo sapiens
  SIMILAR (707)..(1069): 331254mologous to Hemicentrotus pulcherrimus=Japanese sea urchins, embryos, Peptide, 407 aa spicule matrix protein,accession number S48755,Smith-Waterman Score=225.
tcacttggactcggaatcaggaaaccaggggttgtaacccagactctgccaccaaccaacaacgttgcttagagaaattacttctgccttcaggatctcagtgtcctcgtctacaatcatccatgcaccacgtgggacaacagaggaattttcaatgcccaatgtagttagtgatagagctaacggctgagagtggccggagggtggtggccggtacagcagtgtacccagtgcagtccaccacgcccgcacttgtctggcagcagagttgagcggcacttccaggccccaggaaccacgggcacttcctcctgaaactggggtggctacagctgaagctgagaagagcaaccagcctgctgctatttccaaaaccaaatgggcagggggctccgctgcagagggctcgccgaggctctcgccttcacccggcgccgcgcaggtgcccgctctccccatgcaggacatgtcagaagggtcctcttccccttctccaccgggggggcacatttggttggcgagtttgacgccctgcagcctggctctgtggaacagttgctgccaaagcccggggagccagccacgggggcgagatgaaggagattgtctggtgagagccacagagccatctgccaccggccccgacccccgcaggacgcgcctgtgctccatttctgcatctctcgtggtccgtaatactccagatccaggaatttctgacaggagaccagggatttctgacaggagaccaggaacttctgacaggagaccagggacttctgacaggagaccagggatttctgacaggagaccaggaacttctgacaggagaccagggacttctgacaggagaccagggacttctgacaggagaccaggaacttctgacaggagaccagggatttctgacaggagaccaggaacttctgacaggagaccagggatttctgacaggagaccagggacttctgacaggagaccagggatttctgacaggagaccagggacttctgacaggagaccagggacttctgacaggagaccagggatttcacgtctaccacgtgactggattcctgcggccgccgcgagccgggagaattctaatagcgcagatgcccggaaccgctgcagcagcccgagccggaagtgccagactcctacttcccaccggatgcggggctcggcaggctcggtaggctcctccgcaggccacacagccggcggcacaggcctcccaactccttccaggtgttcccaggccttgcaggtgttcccagcggtactggggaagaggggcttcttatcatgggagagatctctgaagcagagggacatcaggggccctgatttctcaagcacggcgctcatataaccctcaagccctttgagggcagctccagaatccagctctgcctgcttggtctttgaattcctagagcctgctctcaggaatggccttgacagagccgacttcccgctggaaggatactgggggctcctccagcacattctctcacagggggcagcacttagagcccaaaacgggaagggaaggagggtctggctcgagtggcaggaccccat

SEQ ID NO: 9355 - DNA, 524 bp, Homo sapiens
  SIMILAR (81)..(521): 871254mologous to Homo sapiens cyclin B2,accession number AB020981,Smith-Waterman Score=659.
agaaatttacaattgagtatctggtcatgaagttcctaaaagctgttagccatgcaatttccaaatccaagaaatggaaactaattttgaaagaactgaaatttgaggtgggtggacccttgccactacacttcttaaggcaagcatcaaaagccaggaaggctgatgttgaacagcacactttagccaaatatttgatggagctgactctcattgactacgatatgatgcattatcatccttctaaggcagcaacagctgcttcctgcttgtctcagaaggttctgggccaaggaaaatggaacttaaagcagcagtgttatacaggatacacacagaatgaagtattggaagtcatgcagcacgtggccaaaaatgtgctgaaagtaaacgaaaacttaactaaattcatcgccatcaagaataagtatgcaagcaacaaattcctgaagatcagcatgatccctcagctgaactcaaaagccatcaaagaccttgccttccctctgatgggagggtcctag

SEQ ID NO: 9356 - DNA, 849 bp, Homo sapiens
  SIMILAR (406)..(846): 871254mologous to Homo sapiens cyclin B2,accession number AB020981,Smith-Waterman Score=667.
atgctgtgtgacttccaagatgggtcaactagcagacatgtgaatgagccttcaaataatcccagccctcagccttggagcgaagaccagggccaagccagcgctacagtgccctgtgcgaaatctgtaatgcacagactcaagaaatttacaattgagtatctggtcatgaagttcctaaaagctgttagccatgcaatacagatggaaatgttggctccaaagggtccttctcccatacctgaggatgcctccgtgaaagaagagaacatctgccgagctttttctgatgctttgctctacaaaattgaggatattgataacaaagattggaataaccctcagctctgcagtgactatttaaggacaatgcttatactagtttccaaatccaagaaatggaaactaattttgaaagaactgaaatttgaggtgggtggacccttgccactacacttcttaaggcaagcatcaaaagccgggaaggctgatgttgaacagcacactttagccaaatatttgatggagctgactctcattgactacgatatgatgcattatcatccttctaaggcagcaacagctgcttcctgcttgtctcagaaggttctgggccaaggaaaatggaacttaaagcagcagtgttatacaggatacacacagaatgaagtattggaagtcatgcagcacgtggccaaaaatgtgctgaaagtaaatgaaaacttaactaaattcatcgccatcaagaataagtatgcaagcaacaaattcctgaagatcagcatgatccctcagctgaactcaaaagccatcaaagaccttgccttccctctgatgggagggtcctag

SEQ ID NO: 9357 - DNA, 1526 bp, Homo sapiens
  SIMILAR (775)..(1338): 591254mologous to Homo sapiens cyclin B2,accession number AB020981,Smith-Waterman Score=445.
gaggctacagcgtcgaagatccccagcgctgcgggctcggagagcagtcctaacggcgcctcgtacgctagtgtcctcccttttcagtccgcgtccctccctgggccgggctggcactcttgccttccccgtccctcatggcgctgctccgacgcccgacggtgtccagtgatttggagaatattgacacaggagttaattctaaagttaagagtcatgtgactattaggcgaactgttttagaagaaattggaaatagagttacaaccagagcagcacaagtagctaagaaagctcagaacaccaaagttccagttcaacccaccaaaacaacaaatgtcaacaaacaactgaaacctactgcttctgtcaaaccagtacagatggaaaagttggctccaaagggtccttctcccacacctgaggatgtctccatgaaggaagagaatctctgccaagctttttctgatgccttgctctgcaaaatcgaggacattgataacgaagattgggagaaccctcagctctgcagtgactacgttaaggatatctatcagtatctcaggcagctggaggttttgcagtccataaacccacatttcttagatggaagagatataaatggacgcatgcgtgccatcctagtggattggctggtacaagtccactccaagtttaggcttctgcaggagactctgtacatgtgcgttggcattatggatcgatttttacaggttcagccagtttcccggaagaagcttcagttagttgggattactgctctgctcttggctccaaagtatgagaaaatgttttctccaaatattgaagacttttgtttacatcacagacaatgcttatcccagtttcccaaatccgagaaatggaaactctaattttgaaagaattgaaatttgagttgggtcgacccttgccactacacttcttaaggcgagcatcaaaagccggggaggttgatgttgaacagcacactttagccaagtattttgatggagctgactctcatcgactatgatatggtgcattatcatcctttctaaggtagcagcagctgcttcctgcttgtctcagaaggttctaggacaaggaaaatggaacttaaagcagcagtattaccacaaggatacacaagagaatgaagtattggaagtcatgcagcacatggccaagaatgtggtgaaagtaaatgaaaacttaactaaattcatcgccatcaagaataagtatgcaagcagcaaactcctgaagatcagcatgatccctcagctgaactcaaaagccgtcaaagaccttgcctccccactgataggaaggtcctaggctgccgtgggccctggggatgtgtgcttcattgtgccctttttcttattggtttagaactcttgattttgtacatagtcctctggtctatctcatgaaacctcttctcagaccagttttctaaacatatattgaggaaaaataaagcgattggtttttcttaaggtaaaaaaaaaaaaaaaaaa

SEQ ID NO: 9358 - DNA, 1878 bp, Homo sapiens
  SIMILAR (1)..(1452): 961254mologous to Homo sapiens dJ1167H4.4 (novel protein similar to neural precursor cell expressed developmentally down- regulated protein 9 (NEDD9) (enhancer of filamentation 1, HEF1), accession number AL121914,Smith-Waterman Score=2392.
gagccagagaagcagcagttatatgacataccagccagccccaagaaggcaggactccatcccccagacagccaagcaagtgggcagggtgttcccctgatatcagtgactaccttaagaagaggcggttacagcacattaccaaatcctcagaaatcggaatggatttatgacactccagtgtctccaggaaaggccagcgtcagaaacacgcctctcaccagctttgcggaagaatcaaggccccacgctctccccagttccagctccactttctacaatcctccaagtggcagatccaggtccctcactccacaactgaataacaatgtgcccatgcagaaaaaactcagccttccagaaattccttcttatggctttcttgtacccagaggcacatttcctttggatgaagatgtcagctacaaggttccttcaagctttctgattccccgagtggaacagcagaacaccaagcccaatatttatgacatccctaaagcaacgtcgagtgtttctcaggctgggaaggagctggagaaagccaaggaggtgtcagagaattccgcgggccataattcctcatggttctccagacggacaacttccccatctcctgaaccggacagattatcaggttccagttctgacagcagagctagcatcgtttcctcgtgctccaccacatccaccgacgactcctccagctcttcctcggaggagtcagcaaaggagctctccttggacctggatgtggccaaggagacagtgatggctctgcagcacaaggtggtcagctctgtcgctggcctgatgctctttgtcagcaggaagtggagattccgagactatctggaggccaacattgatgcaatccacaggtccactgatcacatagaagaatctgtaagagaatttctggattttgcccgaggagtccatgggactgcctgtaacctcactgacagtaaccttcagaacagaattcgggaccagatgcagaccatctccaactcctaccgcatcctgcttgaaacaaaggaaagcttggataatcgcaattggcctctggaagttcttgtgactgacagtgtccagaacagcccagatgaccttgagaggtttgtcatggtggcacggatgcttccagaagacatcaagaggtttgcctccattgtcattgccaatggaaggctcctttttaagcggaactgtgaaaaggaagagactgtgcagttgaccccaaatgcagaatttaagtgtgaaaaatacatccagcctccccaaagagaaactgaatcacaccaaaagagtaccccttccactaagcaaagggaagatgaacactcttctgaactattaaagaaaaatagggcaaatatctgtggacagacattgcctaacttagaagagaaagataaacctatcttggaacaaaggttagatgaaaacaaagacttaggaaccatgaatcctggccctcttatacctcagccttcgagtcaacagactcctgagaggaaaccccgcttatctgaacactgccggctctactttggggcgctcttcaaagccatcagcgcatttcacggcagcctcagcagcagccagcccgcggagatcatcactcagagcaagctggtcatcatggtgggacagaagctggtggacacgctgtgcatggagacccaggagagggacgtgcgcaacgagatcctccgtggcagcagtcacctctgcagcctgctcaaggacgtagcgctggccactaagaatgccgtgctcacgtaccccagccctgccgcgctggggcacctccaggcggaggctgagaagctggagcaacacacgcggcagttcagagggacactgggatga

SEQ ID NO: 9359 - DNA, 2016 bp, Homo sapiens
  SIMILAR (157)..(2013): 991254mologous to Homo sapiens dJ1167H4.4 (novel protein similar to neural precursor cell expressed developmentally down- regulated protein 9 (NEDD9) (enhancer of filamentation 1, HEF1), accession number AL121914,Smith-Waterman Score=3156.
atgggcctgaagtcatggggaggaatgggccttgggacagcatttggaaagggtctgcggggggagaaagcttggtgtgtttctgggaggtaccactggcggtacagccagtggtccgggacactcactcaaggtccctgggtgtggcgggtgcatagcttgtcagaccgggtgtatgacgtgcctacccagcaccggggccccgtggtcctgaaggagccagagaagcagcagttatatgacataccagccagccccaagaaggcaggactccatcccccagacagccaagcaagtgggcagggtgttcccctgatatcagtgactaccttaagaagaggcggttacagcacattaccaaatcctcagaaatcggaatggatttatgacactccagtgtctccaggaaaggccagcgtcagaaacacgcctctcaccagctttgcggaagaatcaaggccccacgctctccccagttccagctccactttctacaatcctccaagtggcagatccaggtccctcactccacaactgaataacaatgtgcccatgcagaaaaaactcagccttccagaaattccttcttatggctttcttgtacccagaggcacatttcctttggatgaagatgtcagctacaaggttccttcaagctttctgattccccgagtggaacagcagaacaccaagcccaatatttatgacatccctaaagcaacgtcgagtgtttctcaggctgggaaggagctggagaaagccaaggaggtgtcagagaattccgcgggccataattcctcatggttctccagacggacaacttccccatctcctgaaccggacagattatcaggttccagttctgacagcagagctagcatcgtttcctcgtgctccaccacatccaccgacgactcctccagctcttcctcggaggagtcagcaaaggagctctccttggacctggatgtggccaaggagacagtgatggctctgcagcacaaggtggtcagctctgtcgctggcctgatgctctttgtcagcaggaagtggagattccgagactatctggaggccaacattgatgcaatccacaggtccactgatcacatagaagaatctgtaagagaatttctggattttgcccgaggagtccatgggactgcctgtaacctcactgacagtaaccttcagaacagaattcgggaccagatgcagaccatctccaactcctaccgcatcctgcttgaaacaaaggaaagcttggataatcgcaattggcctctggaagttcttgtgactgacagtgtccagaacagcccagatgaccttgagaggtttgtcatggtggcacggatgcttccagaagacatcaagaggtttgcctccattgtcattgccaatggaaggctcctttttaagcggaactgtgaaaaggaagagactgtgcagttgaccccaaatgcagaatttaagtgtgaaaaatacatccagcctccccaaagagaaactgaatcacaccaaaagagtaccccttccactaagcaaagggaagatgaacactcttctgaactattaaagaaaaatagggcaaatatctgtggacagaatcctggccctcttatacctcagccttcgagtcaacagactcctgagaggaaaccccgcttatctgaacactgccggctctactttggggcgctcttcaaagccatcagcgcatttcacggcagcctcagcagcagccagcccgcggagatcatcactcagagcaagctggtcatcatggtgggacagaagctggtggacacgctgtgcatggagacccaggagagggacgtgcgcaacgagatcctccgtggcagcagtcacctctgcagcctgctcaaggacgtagcgctggccactaagaatgccgtgctcacgtaccccagccctgccgcgctggggcacctccaggcggaggctgagaagctggagcaacacacgcggcagttcagagggacactgggatga

SEQ ID NO: 9360 - DNA, 648 bp, Homo sapiens
  SIMILAR (181)..(645): 841254mologous to Homo sapiens mas product homolog modulating intracellular angiotensin II actions=mrg,accession number S78653,Smith-Waterman Score=625.
atgacttccacacaaacaagtgtgtgtgaggagatccccattatcctcagcaagaagctccacaacaggagagcaggctgcgtcacgcatctgacgaaccagattcagagaggtccagtgagaggtatctccatcaagctacaggaggaggagaaagaaaggagggacaattatgtccccaaggtctcagccctggatcaggagatcatcgaagtagatcctgacactaaggaaatgctgaagcttttggactttggcagcctgtccaacctgcagcagcaaaaggccaccagggtctatgcggtggtgcagatctcggcccccatgttcctactctgggccctacccctgagcgtggcacccctcataacagatttcaaaatgtttgtcaccacctcctatttaatttccttgttcctcattataaacagcagcgccaaccctatcatttatttctttgtggggagcctcagaaagaaaaggctgaaggaatctctcagagtgattctccaacgggcgttagcagataagccagaggtggggaggaacaaaaaggcagctggcatcgacccaatggagcaaccacactctactcagcatgtggagaaccttcttcccagggagcacagggtcgatgtggaaacataa

SEQ ID NO: 9361 - DNA, 829 bp, Homo sapiens
  SIMILAR (376)..(693): 841254mologous to Felis catus ribosomal protein S17,accession number U22230,Smith-Waterman Score=446.
ggtctaatctttgttgcctgctctggaggtagcaggagcctcaacggttcagagaagtcctatctccttcctgtaggcagcagaaattcatttctcatgaacatcaaagtcttcttaatagaagccactcattggccagaagaaaaacaaggagcacatgggaatcttgatcaaagttgctcaaggtccagtaacctctggaagcccaagagagagctcatattcagaggacaggaagacaattccagaccattggtccacagaggtgtcacctgtccttctgtgtctgtgtcagcctcactgccccctgacttacccctgcccccaggaaaaatgtcacagaaaagtactacatgtgcctgggcaatgacttccacacaaacaagtgtgtgtgaggagatccccattatcctcagcaagaagctccacaacaggagagcaggctgcgtcacgcatctgacgaaccagattcagagaggtccagtgagaggtatctccatcaagctacaggaggaggagaaagaaaggagggacaattatgtccccaaggtctcagccctggatcaggagatcatcgaagtagatcctgacactaaggaaatgctgaagcttttggactttggcagcctgtccaacctgcaggtcactcggcctacagttgggatgaatttcaaaatgcctcgtggagctgtttgaattttttctgtagtgctgtattattttcaataaatctgggacaacacgccagaaaaaaaaacaaaactcgaggggggccccggtccccatttcgccttattgggagccgacatacattgcatgtgccggctgt

SEQ ID NO: 9362 - DNA, 726 bp, Homo sapiens
  SIMILAR (3)..(152): 521254mologous to Homo sapiens KIAA0313,accession number AB002311,Smith-Waterman Score=104.
caaaagaccctgcactgaatacaagtttacctcagaaagttttaggaacaactgaagaaataagtggtaagaagcatacagaagacactatttctgtggcgtcatctttacattctagtcctcctgcatctcctcaaggctcccctcacaaagttggcagtatcatatctgatcacagcagcaagatcagtggccagagctgccccggaataggtggggcttacttgcaaaagaaaatccttcagattaccaggagcacagccaaaagaacagacagtactgagaaggccactgaggagaatagagacaggacaagttgtgagaacacaaccagaaaaagaatgacatccccgtttagaagacttagggaaagaatgctttaaagggagagactagtcaacagccaaaaagaggacacagatcacaatcaagctacagaaagctgtgagaaggtgaaggatgttggaagcaacatcaaagatgcgaaagggagtgccatcttaaattcaattagccaaggcaacagtaacactttaaactggttgtatacgcgattcaagtctaaaaggaggaagacactctgatgaagttccttatttaattttagtgttaagtttgttttcagttattaaggtaaagatggcttaaagtaaaccatttgtcaaaggttaggcagacaacttagtaaaatgcgatttttaaacacttgaaaaaaaaaaaaaaaaa

SEQ ID NO: 9363 - DNA, 2052 bp, Homo sapiens
  SIMILAR (642)..(1376): 391254mologous to Homo sapiens Polypeptide fragment encoded by gene 140,accession number W88983,Smith-Waterman Score=361.
ttggcagtatcatatctgatcacagcagcaagatcagtggccagagctgccccggaataggtggggcttacttgcaaaagaaaatccttcagattaccaggagcacagccaaaagaacagacagtactgagaaggccactgaggagaatagagacaggacaagttgtgagaacacaaccagaaaaagaatgacatccccgtttagaagacttagggaaagaatgctttcaagggagagactagtcaacagccaaaaagaggacacagatcacaatcaagctacagaaagctgtgagaaagtgaaggatgttggaagcaacatcaaagatgagaaagggagtgccatcttcaattcaaatagccaaggcaacagttacacacttattccatcagctaaatctgacaacttgtctgactccagccatagtgagatttcttcacggtccagcatcgtgagcaattgttctgttgactccatgtctgcagctctacaggatgaacggtgttcctctcaggccctggcagtccctgaatccactggggcattggaaaagacagagcacgcttcagggataggagatcatagtcaacatggccctgggtggacactcttgaagccatctctaatcaagtgtttagctgtctcatcgtctgtgagcaatgaagagatttctcaagagcatatcattatagaagcagctgacagtgggtcgtgggaagttgggacttcgtgttcaagcagctcccatgacaacttccaaagccttccaaacccaaaaagctgggattttttgaactcttacagacatacccatttggatgaccccattgctgaagttgaacccactgactctgagccctattcctgttctaaaagctgctctagaacttgtgggcagtgtaaaggaagcctagagagaaagagttggacctcctccagttctctgtctgacacgtatgaaccaaactatgggacagttaaacggagagtattggagagcaccccagctgagtcatctgaaggcttggaccccaaggatgccactgacccagtttataaaactgtcacttcaagtacagaaaagggcttgattgtgtactgtgtcacctcacccaagaaggacgataggtatagggagccacctcccactcctccaggatatttggggatttctttagcggacctaaaggaaggaccccacacacacctaaaacctccagattatagtgtggcagtgcagaggtcaaagatgatgcataacagcctctctagactgccaccagcttctctcagtagcaacctcgtggcctgtgttccatcgaagattgtaactcagcctcagaggcataatttgcagccattccatcctaaactaggagatgtgactgatgcagatagcgaagcagatgcaactctaggaaacaaatgcaagttactatatatgtctgatgtcagaaatccagtccctgcagttaaggatgtgttggtccagaaatacacttcctttaacttcttccacccccaagaagcacttgatagacgaagagaagaactggctctcccagaaggtgcctctggagaagcctgtctatccacaagatctctgaagagatcaggtgtccaagctttggcccagcaaacacattctagaaacttcttgccagagaagcagccattctcagctcaggcagcaggaattctgcatggctctataaaccataacacacggggtccttgtttgcttgagggcactaagatgatgactggtgttttatacagagcatacttgctgtgcatcgcatatagcagggacttaatagtggatgagcagatcatgaatggcttgagaaaagccatttgataatttcaactgaaacctcagacacaaatcttgatgtagcatcgcatgtggaaaacaccacgtgccaaaccctgtgacatggacattggactttcctagcctgccaggcgctaaggaaggggacaacccattgcagccaagccaggaagtcaatgagaggcaaacacagcatggtctatgattaaacaaa

SEQ ID NO: 9364 - DNA, 1338 bp, Homo sapiens
  SIMILAR (64)..(243): 711254mologous to Mus musculus Pro-Pol-dUTPase polyprotein,accession number Y12713,Smith-Waterman Score=234.
atgacatttaagaaccccaaatacccttttgtgtcaaaccttgccaaacaaaaaggaatgtctgtaattaaggtcaatgggaaactacaacaatccaatccaaacaggactacaaatggcccagacccttcaggaatgaaagtttgggtcagtccacaaggtaaaaatccacaacccactgaggtgcttgctgaaggcaaagggaatacagagtgggtagtagaagaagatactagaaactttggttttgggatccagaaacacaccgatataggtatcaaatatgactcaagcactggtatctatgacctggacttcaatgtggtgctggacaggcgtgcgagtgaggaaggcatcacactgactgcagccctggccgctgacagagagaccccaagtgagaactgcctgccgagcccagtcaaccccacagctcaaggagaggaaggcatccacccagatcccatcatcgtcttggaacaggaagaccccactacagcacctcatccccagaggttatgccaacagcagcagtgtcagaggcctctgtgcaggctacaacctgtatggccacacattgtggacctgacaccactgactgaaatagggagtgaggagccagttggtgagctgaattttaagcatattaggtttgaggtgtctgaagacaatatgacatttgatgccagtgaccagggaccattctttgagaactactggcaactggtgttgtctgctaccccaggtgatgtcacctggaatggagcccttggccttcatactcctaagtcctcatccccagatacctgctcagcccagcaggccagccagtgctgggaactctcacctgggggccggagaatagggacactgctcctccctcaggagtctggggcttcctggctgccaccaggtgtcaccagcagcttggcagcagtgagagttatcatgaactgtggagacaaggccacccctaggaatggtggagtgaggacccttaagaagctgagctccctgccactaagcaaagcaggaggcaaggtcctctatggagaaatcaatccagagcaggaagtgcaggccagtctaagttttgctgcccttctagaaagttatgggatctttatggaaacagaatttctggtggcctgcctgatatctcagggtggccagctgagaaatcaggacttctccagctccatttacagtctggctcctgggcctttggatcccagcagtgtccgagcaggagctcaaaggacagccccaccatgggggatcagccctagaagctgtcactacatctccaacggacgcaactattttccaggtgaatga

SEQ ID NO: 9365 - DNA, 411 bp, Homo sapiens
  SIMILAR (404)..(3): 1001254mologous to Rattus rattus ribosomal protein L11,accession number X62146,Smith-Waterman Score=692.
cccagcaccacatagaagtccaggccgtagataccaatgcttgggtcatatttgatacccagatcgatgtgttcctggatcccaaaaccaaagtttccagtatctgagaagttgttttttcttaactcatactcccgcacctttagacccttctccaagatttcttctgccttggcccctcgaactgtgcagtggacagcaatcttttcatttctccggatgccaaaggatctgacagtgtatctagctttggaaaacacaggggtctgccctgtgagctgctccaacaccttggctgctcgcgtcagtctgtctccactctccccaacacagatgttgagacagagtttgcggatgcgaagttcccgcatggggttctccttttcaccttgatcctgcgccatgatggag

SEQ ID NO: 9366 - DNA, 515 bp, Homo sapiens
  SIMILAR (1)..(513): 911254mologous to Homo sapiens D53,accession number U44427,Smith-Waterman Score=809.
gatgcattttccagtgctgacttctctagcatgctctctgaggaggaaaaggaagagttaaaagcagagttagttcagctagaagacgaaattacaacactacgacaagttttgtcagcgaaagaaaggcatctagttgagataaaacaaaaactcggcatgaacctgatgaatgaattaaaacagaacttcagcaaaagctggcatgacatgcagactaccactgcctacaagaaaacacatgaaaccctgagtcacgcagggcaaaaggcaactgcagctttcagcaacgttggaacggccatcagcaagaagttcggagacatgaggaattctcctactttcaaatcatttgaggagagggttgagacaactgtcacaagcctcaagacgaaagtaggcggtacgaaccctaatggaggcagttttgaggaggtcctcagctccacggcccatgccagtgcccagagcttggcaggaggctcccggcggaccaaggaggaggagctgcagtg

SEQ ID NO: 9367 - DNA, 1362 bp, Homo sapiens
  SIMILAR (390)..(830): 911254mologous to Homo sapiens 18-SEP-1996 Human tumour protein, TUPROA, coding sequence,accession number V24111_cd1,Smith- Waterman Score=662.
tttcgtgtggactggaaggggcggaggtaaccacaagcggctagtggcggctgcctgcgtccccaaccccctccgcgcagcgctcgcgacacgcgtgccaggagtgggagcgagcggcggggccagctgcgttctgagcctgggcgcagctgccatctgctctgggaagcaccagggtgtccccgccgccctcagctcgaagtcagccaccatggaggcgcaggcacaaggtttgttggagactgaaccgttgcaaggaacagacgaagatgcagtagccagtgctgacttctctagcatgctctctgaggaggaaaaggaagagttaaaagcagagttagttcagctagaagacgaaattacaacactacgacaagttttgtcagccgaaagaaaggcatctagttgagataaaacaaaaactcggcatgaacctgatgaatgaattaaaaccagaacttcagcaaaagctggcactgacagtgcagactaccactgcctacaagagaacacatgataccctgagtcacgcagggcaaaaggcaactgcagctttcagcaacgttggaacggccatcagcaagaagttcggagacatgagttactccattcgccattccataagtatgcctgctatgaggaattctcctactttcaaatcatttgaggagagggttgagacaactgtcacaagcctcaagacgaaagtaggcggtacgaaccctaatggaggcagttttgaggaggtcctcagctccacggcccatgccagtgcccagagcttggcaggaggctcccggcggaccaaggaggaggagctgcagtgctaagtccagccagcgtgcagctgcatccagaaaccggccactacccagcccatctctgcctgtgcttatccatataagaagaccaaaatcccgctgggaaaaaacccaggccttgacattgttattcaaatggcccctccagaaagtttaatgatttccatttgtatttgtgttgatgatggaccacttgacccatcacatttcagtattcatagatgactgtcacattttaaaatgttcccacttgagcaggtacacaactggtcataattcctgtctgtgtaattcgatgtatatttttccaaacatgtagctattgtttgctttgatttttgcttggcctcctttatgatgtgcatgtccttgaaggctgaatgaacagtccctttcagttcagcagatcaacaggatggagctcttcatgactgtctccagcaataggatgatttactataaatttcatccaactacttgtgatctctctcacctacatcaattatgtatgttaatttcagcaattaaaagaattgatttt

SEQ ID NO: 9368 - DNA, 1984 bp, Homo sapiens
  SIMILAR (3)..(377): 701254mologous to Homo sapiens tumor protein D53,accession number AF004427,Smith-Waterman Score=399.
gtttgttggagactgaaccgctgcaaggaacagacgaagatgcactagccagcgctgacttctctagcatgctctatgaggaggaaaaggaagaggttaaagctgagctagttcagctagaagacgaaattacaacactacgacaagttttgtcagcgaaagaaaggcatctagttgagataaaacaaaaactcggcatgaacctgatgaatgaattaaaacagagacttcagcaaaagctggcatgacatgcagactaccactgcctacaagaaaacacatgaaaccctgagtcacgcagggcaaaaggcaactgcaagctttcagcaacgtttggaacggccatcagcaagaagttcggagacatgagacgaaagtaggcggtacgaaccctaatggaaggcagttttgaggaggtcctcagctccacggcccatgccagtgcccagagcttgggaggagggctcccggcggacccaaggaggaggagctgcagtgcttaagtccagccagcgtgcagctgcattccagaaaccggccattacccagcccctttttgcctgtgctaatccagataagaagacccaaaattccgctgggaaaaacccaggccctggacatggttattccaaatggccccctcccagaaaggtttaatggatttcccattggtatttggtgttggatgatggaccacttgacccatcacattccagtattccatagatgactgtcacattttaaaatgttcccacttgagcaggtacacaactggctcataattcctgtctgtgtaattccgatgtatatttttccaaacatgtagctattgtttgctttgatttttgcttggcctcctttatgatgtgcatgtccttgaaggctgaatgaacagtccctttcgagttcagcagatcaacaggatggagctcttcatgactgtctccagcaataggatgatttactataaatttcatccaactacttgtgatctctctcacctacatcaattatgtatgttaatttcagcaattaaaagaattgattttaatgactttgaattcttaatttctttgtcttaaaagttgctagttatgattttacagatgcaattttaaatcaacttttagccaggtgcggcggctcacacctgtaatcccaactattttggatgccaaggtgagaggattgcttgaggccaggagttaaagatcagcctgggcaacacagaccctgtctctacaaaaaaagaaaaaaattagccagacatagtgttgcttgcctgtagtcccagctactctagaggctgaggcaggaggattgcatgagcctaggagttcgaaactgcagtgagctatgattgcaccactgcactactccagcctgggtgacagagtgagacactgtctccaaaaatagtaataataagtagtcaacttttactgctaatttggtgaacatgagagaggatatgaaaataaatattacctcagctatcctaggatgttaaaatcatctccaattttaaaattctctccaatctacatacagtagtagttagtcagataaaggatatccaaaaaagagatagctagaaaatgggagaagcagagttctgcaacccctttcagtttgtaaattgttcacatgtatgaaaataactggtatttatcaatccactcagatttcctgcacctaacttttatccttatatatcatatgtatcctcttttctttttcctaaatgggaacatatatttgttattaggtggcagagatatagccttaagatatatttgtaaaatgccccctgaatagacatccaacctaaaaaaaatccctatttaaaaagcccatataatatatacatatttgttagcatgctaattgttcatgttttgtgtttattaaatagaagtgatatatatgacattttgaagtaaagcacatctgaaaaattctcctcaaaaaaaaaaaaaaaaaa

SEQ ID NO: 9369 - DNA, 473 bp, Homo sapiens
  SIMILAR (1)..(471): 981254mologous to Homo sapiens vacuolar proton pump 116 kDa accessory subunit,accession number AF245517,Smith-Waterman Score= 797.
  misc_feature (1)...(473): n = a,t,c or g
tttctgtttaactacagtgactcttccaacgcacccctctacaaacatcagcaagaagtccaaagtttctttgtggttatggctttgatttctgtgccgtggatgcttctgattaagccgtttattcttagagccagtcatcggaaatcccagctgcaggcatccaggatccaagaagatgccactgagaacattgaaggtgatagctccagcccttctagccgttctggccagaggacttctgcagatacccacggggctctggacgaccatggagaagagttcaactttggagacgtctttgtccaccaagccatccacaccatcgagtactgcctgggctgcatttcaaacacagcctcctacctgcggctctggggccttcaccttgctcatgcacaactgtctgaagtgctctggactatggtgatgaacagcggccttcagacgcgaggctgnggaggaatcgtcgg

SEQ ID NO: 9370 - DNA, 570 bp, Homo sapiens
  SIMILAR (10)..(570): 981254mologous to Homo sapiens vacuolar proton pump 116 kDa accessory subunit,accession number AF245517,Smith-Waterman Score= 999.
cgtggtggaattcatgagagacgcttgctctcccagaagacagacaatgagatttggaacaccttcttccacgggcgctatctgatcctacttatgggcatcttctccatctacacgggtttgatctacaatgactgcttctccaagtccttgaacatctttggctcttcttggagtgtccaacccatgttcagaaacggcacatggaatactcatgtaatggaggaaagtctatatctgcagctggacccagccataccaggagtgtattttggaaatccatacccgtttgggattgatccgatttggaacttggcttcaaacaaactcacatttctgaactcgtataaaatgaagatgtcggtgatcctgggaattgtccagatggtttttggtgtcatcctcagccttttcaatcacatatacttcagaagaactctcaacatcattctgcaatttatccctgagatgatttttatcctgtgtctgtttggatacctggttttcatgatcattttcaaatggtgctgctttgacgtccatgtatctcagcacgcccccagcatcctc

SEQ ID NO: 9371 - DNA, 2024 bp, Homo sapiens
  SIMILAR (127)..(1350): 841254mologous to Homo sapiens vacuolar proton pump 116 kDa accessory subunit,accession number AF245517,Smith-Waterman Score= 1749.
atgttggagagcgtcaatgtgaggctggaagatttaatcaccggcccttgctgggaggctggctggaatgctggctatgcctttctggttgtggctgtggaagatttcacaattgggaaactgttcgataagctagagggaacgaagctgtgtcttaagaatgctttgcccagggtcataacacaaacagagtctcaccgccagcgcctgctgcaggaagccgctgccaactggcactcctggctcatcaaggtgcagaagatgaaagctgtctaccacatcctgaacatgtgcaacatcgacgtcacccagcagtgtgtcatcgccgagatctggttcccggtggcagatgccacacgtatcaagagggcactggagcaaggcatggaactaagtggctcctccatggcccccatcatgaccacagtgcaatctaaaacagcccctcccacatttaacaggaccaataaattcacagctggcttccagaatattgttgatgcctatggtgtcggcagctaccgggagataaacccagccccctacaccatcatcactttccccttcctgttcgctgtgatgtttggagactgtggtcatggaaccgtgatgctcctggctgcactttggatgattctgaatgagagacgcttgctctcccagaagacagacaatgagatttggaacaccttcttccacgggcgctatctgatcctacttatgggcatcttctccatctacacgggtttgatctacaatgactgcttctccaagtccttgaacatctttggctcttcttggagtgtccaacccatgttcagaaacggcacatggaagacaggtacacatgatccccacctggcagtgctgtttaaaatgggccatgtagaaggcagggactgtgtcttacgcatcgtgcttgcaaagattggctacaggaacggcttcttgagaaagatttggaacttggcttcaaacaaactcacatttctgaactcgtataaaatgaagatgtcggtgatcctgggaattgtccagatggttttcggtgtcatcctcagccttttcaatcacatatacttcagaagaactctcaacatcattctgcaatttatccctgagatgatttttatcctgtgtctgtttggatacctggttttcatgatcattttcaaatggtgctgctttgacgtccatgtatctcagcacgcccccagcatcctcatccacttcatcaacatgtttctgtttaactacagtgactcttccaacgcacccctctacaaacatcagttcaactttggagacgtctttgtccaccaagccatccacaccatcgagtactgcctgggctgcatttcaaacacagcctcctacctgcggctctgggccctcagcctggctcatgcacaactgtctgaagtgctctggactatggtgatgaacagcggccttcagacgcgaggctggggaggaatcgtcggggtttttattatttttgccgtatttgctgtcctgacagtagccatccttctgatcatggagggcctctctgctttcctgcacgccctgcgactgcactgggttgagttccagaacaagtttctatgtcggggatggttacaagttttctccattctcctttaaacacatcctggatggcacagccgaggagtaggctgagggctgcacctcccacggtggtcaccatgccaatgaaggaagttcagtcttgtctttgatatcagcccctgcaaggcgctcaatgggaaggttgttcttggctcacctgaagcatgaaactgtgtattatttggacgtcagcctgtggatttgatacgacttaaccacgtcagaggaaggactttggcaagtgatattgtcttcatgtggggtattaattctcaaataataaaataattgacaaatgaggggagaatgctaaacagatgtcttcttgcaatattttaaatattgtatttgagaaaataaacatctgagtcattcaaaaaaaaaaaaaaaaa

SEQ ID NO: 9372 - DNA, 936 bp, Homo sapiens
  SIMILAR (3)..(59): 731254mologous to Homo sapiens cytokeratin 18 (424 AA),accession number X12883,Smith-Waterman Score=70.
atggcacctggccggtcagcagcgcagccagcatctatgcaggcactggggggcttgggatcccagatctccatgtcctgttctaccagtttctggggcggcttggggtctgggggcctggccacagagatggctgggggtctggcagaaatggggggcatccagaatgagaaggagaccatgcaaagcctgaacgaccacctggactacctggacagagtgaggaacctggagaccgagaactggaggctggagagcaaaatccaggagtatctggagaagagaccccatgtcagagactggggccattacttcaagaccatcaaggaactgagggctcagatcttcgcaaatactgtggacaatgtccacatcattctgcagatcgacaatgcccagtcaagtatgagacaagagctggccatgcgccagtctgtggagagcaacatccatgggctctgcaaggtcattgatgacaccaatgtcactctgctgcagctggagacagagatgggcgctctcaaggaggagctgctcctcatgaagaagaaccatgaagaggaagtaaaaggcttgcaagtccagattgccaactctgggttggccgtggaggtagatgcccccaaatctcaagtcctcgccaagatggagcagctcaacagaatcctgctgtacttggagtcaaagctggcacagaactgggcagagggccagcgcaaggtccaggagtacaaggacttgctgaacatcagggtcaagctggaggctgagatcgccacctaccgccgcctgctggaagacagcgagggcctcaatcttggtgatgccctggacagcagcaactccatgcaaaccatccaaaagaccaccacccgccagatagtggatagcaaagtggtgtctgagatcagtgacaccaaagttctgagacattaa

SEQ ID NO: 9373 - DNA, 729 bp, Homo sapiens
  SIMILAR (3)..(617): 991254mologous to Homo sapiens cytokeratin 18 (424 AA),accession number X12883,Smith-Waterman Score=1022.
caggaatgggaggcatccagaacgagaaggagaccatgcaaagcctgaacgaccgcctggcctcttacctggacagagtgaggagcctggagaccgagaaccggaggctggagagcaaaatccgggagcacttggagaagaagggaccccaggtcagagactggagccattacttcaagatcatcgaggacctgagggctcagatcttcgcaaatactgtggacaatgcccgcatcgttctgcagattgacaatgcccgtcttgctgctgatgactttagagtcaagtatgagacagagctggccatgcgccagtctgtggagaacgacatccatgggctccgcaaggtcattgatgacaccaatatcacacgactgcagctggagacagagatcgaggctctcaaggaggagctgctcttcatgaagaagaaccacgaagaggaagtaaaaggcctacaagcccagattgccagctctgggttgaccgtggaggtagatgcccccaaatctcaggacctcgccaagatcatggcagacatccgggcccaatatgacgagctggctcggaagaaccgagaggagctagacaagtactggtctcagcaggtgcgtgaggggaggggatggctgccaaggtgtgggagggaggcagacggaatgaggggcctgatggactgtccccatcctgcagattgaggagagcaccacagtggttcaccacacagtt

SEQ ID NO: 9374 - DNA, 554 bp, Homo sapiens
  SIMILAR (5)..(316): 971254mologous to Homo sapiens cytokeratin 18 (424 AA),accession number X12883,Smith-Waterman Score=481.
  misc_feature (1)...(554): n = a,t,c or g
cccacgcgtccgggagagcaccacagtggtcaccacacagtctgctgaggttggagctgctgagacgacgctcacagagctgagacgtacagtccagtccttggagatcgacctggactccatgagaaatctgaaggccagcttggagaacagcctgagggaggtggaggcccgctacgccctacagatggagcagctcaacgggatcctgctgcaccttgagtcagagctggcacagacccgggcagagggacagcgccaggcccaggagtatgaggccctgctgaacatcaaggtcaagctggaggctgagatcgncccacctaccgccgcctgctggaagatggcgaggactttaatcttggtgatgccttggacagcagcaactccatgcaaaccatccaaaagaccaccacccgccggatagtggatggcaaagtggtgtctgagaccaatgacaccaaagttctgaggcattaagccagcagaagcagggtaccctttggggagcaggaggccaataaaaagttcagagttcaaaaaaaaaaaaaaaa

SEQ ID NO: 9375 - DNA, 755 bp, Homo sapiens
  SIMILAR (1)..(204): 891254mologous to Homo sapiens glycolipid transfer protein,accession number AF209704,Smith-Waterman Score=322.
gccgaacacttgctgaagccgctgcccgcggacaagcagatcgagaccgggcccttcctcgaggcggtgtcccacctgccgcccttcttcgattgccttgggtccccagtgtttactcccatcaaggcagacataagcggcaacatcacgaaaatcaaagctgggtacgacaccaacccaacccaggttccgaaccttgaaaaccattctggagggggaaaaggaaatgtatggagcaaaggggcccaaagtaggggccacactggcgctgatgtggctgaaaagaggcctccgattcatccaggtcttcctccagagcatctgcgacggggagcgggacgagaaccaccccaacctcatccgtgtcaacgccaccaaggcctacgagatggccctcaagaagtaccatggctggatcgtgcagaagatcttccaggcagcactgtacgcagcaccctataagtctgacttcctgaaagcgctctccaaggggcagaatgttacggaggaggagtgcctggagaaaatccgcctcttcctagtcaactacacggcgaccatcgatgtcatctacgagatgtacacccagatgaacgctgagcttaactacaaggtgtaggcatgcccactgctggacacgtccccgactcgtggccacatggagaaacaggcaaaccagaatcactgtgaatcaagtcggtgaactgcccctggcctgtgtcccccagagcagcccagggtcctgccagagtctg

SEQ ID NO: 9376 - DNA, 1572 bp, Homo sapiens
  SIMILAR (70)..(267): 901254mologous to Bos taurus glycolipid transfer protein,accession number AF209701,Smith-Waterman Score=304.
atggcctgcggtggccctgaaaaatcactcttgctgcgaatctcaatctgtcttctcattttgtccccagattgccttgggtccccagtgtttactcccatcaaggcagacataagcggcaacatcacgaaaatcaaagctgtgtacgacaaccaacccaagccaagttcccggaccctgcagaacatcctggaggtggagaaagaaatgtatggagcagagtggcccaaagtaggggccacactggcgctgatgtggctgaaaagggagggagcagagcagctcatctggggaccccagtgggacagtgaggggcagcaaaggaaagagcctgctggggcctgtgggggtcatgtggacacagaaatggacaaggcaggcccagacccacccctcgtggatcttacagccagtgtgacttgtcatgggccagcaccaggcctggaggagagaagaggcctccgcttcatccaggtcttcctccagagcatctgcgacggggagcgggacgagaaccaccccaacctcatccgtgtcaacgccaccaaggcctacgagatggccctcaagaagtaccatggctggatcgtgcagaagatcttccagctccctctgcctgcccaccctggcggccatgagaacgaggggctgacgggccctgtacagtgttcctgtggggtacagtctgcaagcaggctggggcagaagccagtatggttccagagaggaagagctggtcatagggaggttatatggggacacgacccttcagttttgctggttggttggtggatgggttcccgggttcacgccggccccacagccctgcgcctgcgcattgagcgcctgcgcttgagcccctgcagctcccacgggcccgaaaggtccctgtggctgcagagtgggaaagattggaggagctcagacagagaggctggccccaaggctggggaagtcatccaagctctgagtggagagcggcagctggaaggagatgtaggagggaaggaaacacacaagactgagcctcatgtgcctggcacataccccttcctgagcattggtttcccctttctgccccgagccctggccactgccggctgtgtgaccccaaggaggttacatcacttctctgagcatgtttcctcatcgcaacctccagctggtggccctgagccccagtccctcttagagatgggcttgggggagctgctcagtgcttcaacgtgctttgaatgtgagtgccttcagcatgactggctgtttggcactgctggttttgggttagtacacagctacagtaaccagaacagcagggcatgggactatgagtggcaagatgcagcggcacctagcttggacagggtggtcagcaaagaagcctcctctgataatgtggctttggagtacagattggagggaggccaggcactgtgccaaaccctcatggccttgcccttccgcagtccttgtggcagccccgtgcttcagaagaggtcagacgttcaaggagtagagtgtcaagcgggggtcacaaacaaatgcctagagaggacagatggcagggactga

SEQ ID NO: 9377 - DNA, 515 bp, Homo sapiens
  SIMILAR (515)..(306): 1001254mologous to Mus musculus deadenylation factor EDEN- BP,accession number AJ007987,Smith-Waterman Score=357.
tttttgttttcttttttcttttttatttttattttttgcatttatttaaaaaatcccatcatgaccctggaagcctttagaacagttttatcctttgaaacacaggacacatttctcccagtgcgcagaatttcaagtttacgtggttcagcttaagaagtgtatgtttcacgttccttagaggacaacagacccaagttatcactatgagaaaggaacagcttgtcccagcttcaatgggataatccaacaccaccagctaccagaagaccctctcactccagtctcagaggggagcacgctcagtagggcttgctgtcattcttcgaacgtttgagctgcactttaagccgcttcatgccaatctgaaagccgttcatggactggatggcagcttgggccgaaacaggattgtcgtaacttacaaaaccaaaacacttgctcaggtttgtctgcttgtctatgaaaaccttggcagacacgacattcccaaagggcataaacatctgcagcag

SEQ ID NO: 9378 - DNA, 1856 bp, Homo sapiens
  SIMILAR (1214)..(1447): 961254mologous to Homo sapiens CUG-BP/hNab50,accession number U63289,Smith-Waterman Score=388.
atgaacggcaccctggaccacccagaccaaccagatcttgatgctatcaagatgtttgtgggccaggttccaaggacctggtctgaaaaggacttgcgggaactcttcgaacagtatggtgctgtgtatgaaatcaacgtcctaagggataggagccaaaacccgcctcagagcaaagggtgctgttttgttacattttacacccgtaaagctgcattagaagctcagaatgctcttcacaacatgaaagtcctcccagggatgcatcaccctatacagatgaaacctgctgacagtgagaagaacaatgcagtggaagacaggaagctgtttattggtatgatttccaagaagtgcactgaaaatgacatccgagtcatgttctcttcgtttggacagattgaagaatgccggatattgcggggacctgatggcctgagccgaggttgtgcatttgtgacttttacaacaagagccatggcacagacggctatcaaggcaatgcaccaagcacagaccatggagggttgctcatcacccatggtggtaaaatttgctgatacacagaaggacaaagaacagaagagaatggcccagcagctccagcagcagatgcagcaaatcagcgcagcatctgtgtggggaaaccttgctggtctaaatactcttggaccccagtatttagcactccttcagcagactgcctcctctgggaacctcaacaccctgagcagcctccacccaatgggagggttgaatgcaatgcagttacagaatttggctgcactagctgctgcagctagtgcagctcagaacacaccaagtggtaccaatgctctcactacatccagcagtcccctcagcgtgctcactagttcagggtcctcacctagctctagcagcagtaattctgtcaaccccatagcctcacttggagccctgcagacattagctggagcaacggctggcctcaatgttggctctttggcaggaatggctgctttaaatggtggcctgggcagcagtggcctttccaatggcaccgggagcaccatggaggccctcactcaggcctactcgggtatccagcaatatgctgctgctgcgctccccactctgtacaaccagaatcttctgacacagcagagtattggtgctgctggaagccagaaggaaggtccagagggagccaacctgttcatctaccacctgccccaagaagtttggtgatcagaccctgctgcagatgtttatgccctttgggaatgtcgtgtctgccaaggttttcatagacaagcagacaaacctgagcaagtgttttggttttgtaagttacgacaatcctgtttcggcccaagctgccatccagtccatgaacggctttcagattggcatgaagcggcttaaagtgcagctcaaacgttcgaagaatgacagcaagccctactgagcgtgctcccctctgagactggagtgagagggtcttctggcacagcttgccctgaagactcggctactgccttctgtgggagtttcgcttcgtacagaggacaagtttgtgctttggtttccagtgttttactttggagtttaggtagctggtggtgttggattatcccattgaagctgggacagctgttcctttctcatagtgataacttgggtctgttgtcctctaaggaacgtgaaacatacacttcttaagctgaaccacgtaaacttgaaattctgcgcactgggagaaatgtgtcctgtgtttcaaaggataaaactgttctaaaggcttccagggtcatgatgggattttttaaataaatgcaaaaaataaaaataaaaaagaaaaaagaaaacaaaaa

SEQ ID NO: 9379 - DNA, 1315 bp, Homo sapiens
  SIMILAR (412)..(735): 671254mologous to Mus musculus Tat binding protein- 1,accession number D49686,Smith-Waterman Score=340.
atgaagaactacaactgctggcgtagagtattcctgtttgtggtgactccaattcccatgggtcacattaagcacagacaagggccaaacaagcagcagaggggacagaagagagatgaacagcgcatgaggaaagaaaacagaggacacaggaaagggtgcacatggtgtgggggcggcacagaaggcacaggatgggggaagtatgagaaatctgaagtagaaaggggcttggtgagatatgagagaaagcgcagggcgtattctggtatccagcaatatgctgctgcagccctccccactgtgtacaaccagaatttattgacacagcagagtattggtgctgctggaagccagaaggaagcctgtgcttatgccgtgatgtcactggcatctcgggctcctgtgtaccgcagcttcgacagtgaaaaggcaggagaccgagaggtgcagaggaccatgctggagctactgaaccagctggacggctttcagcccaacactcaagtgaaggtaattgcagccactaacagggtggacatcctggatccagccctgctgcgctcaggccgcatagaccgcaagattgagtttccaatgcccaacgaggaggccagaggccagaatcatgcagatccactcacggaagatgaatgtcagcatgacactaccctggttgctctgcaaatggcattgaatgtctacaatgggaagcaagctccctatgcttcctgccacatatttgaactgtaccaggaagataatgggtttctgcttgaacacacaggttttgtaagttatgacaatcctgtctcagctcaagctgccatccagtccatgaacggctttcaaattggaatgaagaggcttaaagtgcagctcaaacgttcgaagaatgatagtaagccctactgagcgtgctcccctctgagactggagtgagagggtcttctggtaagtgggggaggagcacccttaatgattcgaagccctgaggcatgtgtgttgacagccctggaccctgatccctgccactctcgcaggcacagcttgccctgaagactcggctactgccttctgtgggagtttcgcttcgtacagaggacaagtttgtgactttggtttccagtgttttactttggagtttaggtgccatatcctgaggttttttttgtttttgtttttgtttctcctttatttaaagtttgctgtgtttgtaaccagtgttgtgtttgagaaggaccaacaccaaaccaccctggggggaagggggacaggggaaacattttaacaacagacggatgatccaggattt

SEQ ID NO: 9380 - DNA, 438 bp, Homo sapiens
  SIMILAR (320)..(204): 331254mologous to Amsacta moorei entomopoxvirus AMV208,accession number AF250284,Smith-Waterman Score=67.
cgccagaatgcgactgtgcttttgagccagactacgctgtcccgccactttcagtgagtgaatgtatgcagcacattcggattatggagggcaggtctcgctctcttccatcctcccccttactcacacatcagtctatcagtgttcggctccagcctgtgaagaagttaactggtgatgctgaacaggagcttggcccccctccatctgtagatgaggcagcaaacacactcatgactcgtctgggtttcctccttggagagaaagtcacagaagttcagccaggtgaccaatacagcatggaagtacaggatgaaaatcagacctcagcaatcacccaacggataagtccttgttccactctgactagcagcactgcctctccaccagccagtagccccctgctttacactcccacccatcagtacaaatgcaacg

SEQ ID NO: 9381 - DNA, 1374 bp, Homo sapiens
  SIMILAR (1111)..(1314): 271254mologous to Trypanosoma cruzi mucin-like protein,accession number AF027871,Smith-Waterman Score=89.
gctatagctgccatagatagtgattcctctgatggatctaggcaaagtgaatggaaattctggaaaggattcaccattctagatgccattaagaacatttatgattcatgggaggaggtcaaaatgtcaacattaacagaagtttggaagaagttgattccaaccctcatggatagctttgaagacttcattggaggaagtaactgtcgatgtgtgggaatgcactgtgctccagacacagatatagtcatgaagtacatgcagagcaaggttactatagccctaggtttgtcagggtaccaaaagaggagtcttagggaaatggaaagtgctgaaaagattgctgtgaggggcacctcaaagtcaaccccattaagtttttatgagctcctggagtcacccctgaacttcacagatggagggagcgaggaaccaccggatcgaagacagtcaagtgtagactctcgccaaagccgctctgggcaaggtggcatctccacagaaagcgactgtgcttttgagccagactacgctgtcccgccacttccagtgagtgaaggtatgcagcacattcggattatggagggcatgtctcgctctcttccatcctcccccttactcacacatcagtctatcagtgttcggctccagcctgtgaagaagttaactgtcatctcagagcaacatccagaagactatagagagagtaccattacgacaattctatgcattggtgctttcactggctccctcttctcctgtgataccgtttggaagctatcctactatcccctggaagggggagctcttcctaattcctgggagacttgtgatggtaaacactttacaactgaggctagaacccctctgaggaaggcaaagtttgttgagagcccacgaattccagaatccgagcttggctcaccaaccctcacttcagctcagaaactggacgtggatgcatactgccctggtgatgctgaacaggagcttggcccccctccatctgtagatgaggcagcaaacacactcatgactcgtctgggtttcctccttggagagaaagtcacagaagttcagccaggtgaccaatacagcatggaagtacaggatgaaaatcagacctcagcaatcacccagcggataagtccttgttccactctgactagcagcactgcctctccaccagccagtagcccctgctctacactcccacccatcagtacaaatgcaactgccaaggactgcagctatggggctgttactagtccaacctctacccttgaaagcagagatagtggcatcattgaagtagttcagaaaaagttcattccttactggtatagtcgagagttttatgaaagaaagatttga

SEQ ID NO: 9382 - DNA, 1020 bp, Homo sapiens
  SIMILAR (244)..(519): 551254mologous to Homo sapiens Similar to hypothetical protein,accession number BC002910,Smith-Waterman Score=207.
  misc_feature (1)...(1020): n = a,t,c or g
ggctgtgtgctgtgttaattgatattagagccccctccagatttgaactgggaccatttctccccatcccctacctgcacagggattgttaaacaagtctgggcctgtccttgtgtcccaggcaatgtaagcgttgtccccacctctcactccagcaggaagaaccggacccggcgaacctggaagtggaccatgatttcttccaggacaaggtgtggccccatttggccctgagggtcccaggcttttgagactctgaaggttcagagcgcctgggccggctatttacgactacaacacctttgaccagaatggcgtggtgggcccccacccggttagttgtcaacatgtactttgctactgccttcagtggtcacgggctccagcaggccccctggcattgggcgagctgtagcagagatggtactgaagggcaggttccagaccatcgacctgagccccttcctcttttacccgcttttacttggggagagaagatccagggagaacaacatcatcttgaggcatgtgtgctctggcattgggcttccactggcttgcaacccctggctgtgtttaaaaagccttgtttgctggcttccaatcttccccaaagtactgtgcccaggccttctttccccctccccagtgtcctcttcctctcaggcaggccattggcaccccatatgggctgggcaagggacaggcagtgaggccgagggccaatagcgaagtgatgancggggatccgtaggactgatctgtagcccatgctgatgtcgacccaccagggcaatccatctggaggcctgagcaccctggcccaggactggcttcatccctggcactgacccaggaaagactgcctctgaccctcttagcagacagagcccaggcatggtagcactctggggcagcctggctcaggtttattgattttcgtctgtttaccctatccattaatcaatacatgtaattaactcctaaaatttaaaaaaaaaaaaaaaaaaaaaataaacc

SEQ ID NO: 9383 - DNA, 852 bp, Homo sapiens
  SIMILAR (1)..(480): 961254mologous to Homo sapiens laminin-binding protein,accession number J03799,Smith-Waterman Score=781.
atgtccggagcccttgatgtcctgcaaatgaaggaggaggatgtccttaagttccatgcagcaggaacccacttaggcggcaccaatcttgacttccagatggaacagtacatctataaaaggaaaagtgatggcatctatatcataaatctgaagaggacctgggagaagtttctgctggcagctcgtgctgttgttgccattgaaaaccctgctgatgtcagtgttatatcctccgggaatactggccagagggctgtgctgaagtttgctgctgccactggagccactccaattgctggccacttcactcctggaaccttcactaaccagatccaggcagccttccgggagccacggcttcttgtggttactgaccccagggctgaccaccagcctctcacggagtcatcttatgttaacctacctaccattgctctgtgtaacacagattctcctctgcgctatgtggacattgcaacaacaagggagctcactcaagatcctgaagagattgaaaaagaagagcaggctgctgctgaaaaggcagtgaccaaggaggaatttcagggtgaatggactgctcctgctcctgagttcactgccactcagcctgaggttgcagacttgtctgaaggtgtacaggtgccctctgtgcctattcagcagttccctactgacgactggagcactcagcctgccacggaaaactggtctgcagctcccactgctcaggccactgaatggaagatgcagcaacaaagcaccatcttggaagcagagagcagccctcaccagacaccaaacctgccagcaccttggtctaggacttctcagcctccagaactgtga

SEQ ID NO: 9384 - DNA, 1578 bp, Homo sapiens
  SIMILAR (697)..(1575): 861254mologous to Homo sapiens laminin-binding protein,accession number J03799,Smith-Waterman Score=1310.
atggcagaaggcaaaggagaagaaaggcatcttctttacaaggcagcaagaatgggaaatgccgagcaaagggagcctgaacctctaggacttttaattgataccagtggtctccgctctgaaacagtccaccagaatgagggtaccaaactgacctcagaggtttccagtactgtcagggaaaaaccacctactcaagcctcagtaattgcagatgcccctccccctaccaagcccaatggtccaaggtcaatttcagactgttgtgctggcagtgagaatgttaagccagtggttcttagcttactgggctccgtgggagtgggaccctctaagcaagaccactggatgattcaacagccacacaaagcagcaacattttttggatgcattgggatagataaatttggggagatcctgaagagaaaagctgctgaagcccatgtggatgctcattactacgagcagaatgagcagccaacaggaacttgtgctgcatgcatcactggtgacaacagtgatattgttgagatgatatgggactcaaaaattggggagaaatcttcagtatctaaatcattatctaaattctggaagctaatacagttggatcaattgttttggataggtccagtaacctttgctgccactatcaaaaactcagaaattggccggcttaaagcgaaacttttcaccatgtctggagcccttgatgtcctgcaaatgaaggaggaggatgtccttaagttccttgcagcaggaacctgcttaggtggtaccaatcttgacttccagatggaacagtacatctctataaggaaaagtgatggcatccacatcgtaaatctgaagaggacctgggagaagcttctgctggcagcttgtgccattgttgccattgaaaaccctgctgatgtcagtgttatatcctccaggaatattggccaaagggctgtgctgaagtttgctgctgccactggagccactccaattgttggccacttcactcctggaaccttcactaaccacatccaggcagccttccaagagccacggcttcttgtggttactgaccccagggctgaccaccagcctctcacagaggcatcttacgttaacctatctaccgttgctttgtgtaacacagattctcctctgcactttgtggacattgccattctatgcaacaataagggagctcactcaatgggtttgatgtggtggatgccagcccgggaaggtttgcgcgcgtgtggcaccatttcccatgaacacccatgggaattcatgcctgatctctacagagatcctaaagagactgaaaaagcagagcagcctgctgctgaaaaggctgtgaccaaggaggaatttcagggtgaatggactgctccagctcctgagttaactgctactcagcctgaggttgcagactggtctgaaggtgtgcaggtgccctctgcgcctattcatcagttccctactgaagactggagtgctgagcctgccacggaaggctggtccacagctcccaatgctcaggccattgaatgggtaggagcaaacactgaaaggtcttaa

SEQ ID NO: 9385 - DNA, 2328 bp, Homo sapiens
  SIMILAR (1171)..(2325): 901254mologous to Homo sapiens putative p150,accession number U93572,Smith-Waterman Score=1829.
atggagacagagattgtagtgatgatgccacaggggacctctgggccaccagaagctggaagagaagaggaaggatctcccctagagctttcagaggaagtgcagctcgctgacaccttgatttcagacttccagcctccagaactaggggtccatacggcgttctggattcccatcgtaacttcaaggaaaactttcacaatgtgcggagcccttgatgtcctgcaaatgaagaagaaggatgtccttaagttccttgcagcaggaacccacttaggtggcaccaatcttgacttccagatgaaacagtacatctataaaaggaaaagttatggcacctacatcacaaatctgaagaggacctgggagaagcttctgctggcagctcatgccattgttgccattgaataccctgctgatgtcagtgtcatattctccaggaatactggccagagggccgtgctgaagtttgctgctgccactggagccactccaattgctggccgcttcactcctgcaaccttcactaaccagatccaggcaaccttccgggagccacggcttcttgtggttaccgaccccagggctgaccaccagcctctcacggaggcatcttatgttaacctacctaccatcgctctgtgtaacacagattctcctctgcactgtgtggacattgccatcccatgcaacaacaagggagctccctcagtgggtcagatatggtggatgccagctcgggaagttctgcacatgcgtggcaccatttcctgtgaacacccgtgggaggtcatgcctgatctctacttctacagagatcctgaagagattgaaaaagaagagcaggctgctgctgaaaaggctgtgaccaaggaggaatttcagggtgagtggactgctctagctcctgagttcactgctactcagcctgagattgcagactggtttgaagaaatacaaactaccatcagagaatactataaacacctctacgcaaataaactagaaaatctagaagaaatggataaattcctcgacacatacatcctcccaagactaaaccaggaagaagttgaatctctgaatagaccaataacaggctttgaaattcaggcaataattaatagcttaccaaccaaaaaaagtccaggaccagatggattcacagccgaattctaccagagggcaatcaggcagaagaaggaaataaaggttattcaattaggaaaagaggaagtcaaattgtccctgtttgcagatgatatgatggtatatctagaaaaccccatcgtctcagcccaaaatctccttaagctggtaggcaacttcagcaaagtctcaggatacaaaatcaatgtgcaaaaatcacaagtattcttatacaccaataacagacaaacagagagccaaatcatgagtgaactcccattcacaattgcttcaaagagaataaaatacctaggaatccaacctacaagggacatgaaggacctcttcaaggagaattacaaatcgctgctgaatgaaataaaagaggatacaaacaaatggaagaacattccatgctcatgggtaggaagaatcaatattgtgaaaatggccatactgaccaaggtaatttatagattcactgccatccccatcaagctaccaatgacttccttcacagaattggaaaaaactactttaaagttcatatggaaccaaaaaagagcccacattgccaagtcaatcctaagccaaaagaacaaagccagaggcatcacgctacctgacttcaaactatactacaaggctacagtaaccaaaacaggatggtactggtaccaaaacagagatatagaacaatggaacagaacagagccctcagaaataatgccacatatctacgactgtctgatctctgacaaaaacaagaaatggggaaaggattccttgtttaatgaatggtgctgggaaaactggctagccatttgtagaaagctgaaactggatcccttccttacaccttatacaaaaattaattcaagatggattaaaaacttaaatgttagacctaaaaccgtaaaaactctagaagaaaacctaggcaataccattcaagacataggcatgggcaaggacttcgtgtctaaaacaccaaaagcaatggcaacaaaagccaaaattgacaaatgggatctaattaaactaaagagcttctgcacagcaaaagaaactaccatcagaatgaacaggcaacctacagaatgggagaaaatttttgcaatctactcatctgacaaagggctaatatccagaatctacaatgaactcaaacaaatttag

SEQ ID NO: 9386 - DNA, 1152 bp, Homo sapiens
  SIMILAR (766)..(1149): 891254mologous to Homo sapiens laminin-binding protein,accession number J03799,Smith-Waterman Score=625.
atgctgacgatgatgatgccgacagggacaggtgtcttggtaccctttgggtgctcagtcgtgcttaccaatggtgacaatgaggacaaggaagaggaaagcccgctagggccgctcgcccgtcgccgcctgcggaacgcggaggggcagcacggccacgcccggccactcgaacctgctccccggcgccgcgtgaccgtgtcaggtccccgtcggcctcgccgtgccgaccccgggcgcctccacagtggctcggaggccgctgctgcccggatgcccgggttccacgaggctctcccagcccgacaagcccgccgatcccacgggcacgggcggaggagagggaaccgccgcgcccgccccgcgcgccgtcgccgaccccgggaaattttcacagtgtccggagcccttgatgtcctgcaaatgaagaaagaggatgtccttaagttccttgcagcaggaacccagttaggtggcagcaatcttgacttccaggtggaacagtatgtctataaaaggaaaagtgatggcatctacatcataaatctgacgaggacctggaagaagcttctgctggcagctcgtgccattgttgccattgaaaacgctgctgctgtcagtgttatatcctccaggaatactggccagagggtcgtgctgaagtttgctgctgccaccggagccactccaatcgctggccccttcactcctggaaccttcactaaccagatccaggcagccttctgggagccacggcttcttgtgggagctcgctcagtgggtttgatgtggtggatgctggctcgggaagctctgtgcatgcgtggcagcatttcccgtgaacacccctgggaggtcatgcctgatctctacttctacagagatcctgaagagattgaaaaagagcaggctgctgctgaaaacactgtgaccaaggaggaatttcagggtgaatggactgctccagctcctgagttcactgctactcagcctgaggttgcagactggcctgacggcgtgcaggtgccctctgtgcctattcagcagctccctactgaagactggagcactcagcctgccacggaagactggtctgcagctcccactgctcaggccactgaaggggtaggagcaaccactgaatggtcctaa

SEQ ID NO: 9387 - DNA, 1204 bp, Homo sapiens
  SIMILAR (891)..(1037): 751254mologous to Homo sapiens laminin-binding protein,accession number X61156,Smith-Waterman Score=190.
ggttcggttttgccgggccgacccacgcgtccgacctgcagaggggtccatacggcgttgttctggattcccgtcgtaacttagagggaaattgtcacaatgtccggagcccttgatgtcctgcaaatgaaggaggaggatgtccttaagttccttgcagcgaggaacccacttaggtggcaccaatcttgacttccagatggaacagtacatctataaaaggaaaagtgatggcatctatatcataaatctcaagaggacctgggaagaagcttctgctggcagctcagtgcaattgttgccattgaaaaccctgctgatgtcagtgttatatcctcccaggaaatactgggccagaagggctgtgctgaaagttttgctgctgccactgggagccactccaatttgctgggcccgcttcactccctggaacctttcactaacccagatccagggcagcccttccggggagccacgggctttcttgttggttactgacccccaggggctgaaccaccagccctctcacgggggcaatcttaatgtttaacctaccctaccattggcgctggttaacccggatttccccttcggcgctatgtggacatttgccatcccatgcaacaaccaagggagctcactccagtggggtttgatgtggtggaatgctggcctcgggaagtttctgcgccatgcgtggcacccatttcccgtgaacaccccatgggaggtcaatgcctgaatctgtacttctacagagatcctgaagagattgaaaaagaagagccaggctgctgcttaagaagccaggtgaccaaggaggaatttcagggtgaatggactgctcccgctcctgagttcacttgttactcagcctgaggttgcagactggtctgaaggtgtacagggtgccctctggtgcctattcagcaattccccctactgaagactggagcgctcagcctgccacggaagactggtctgcagctcccactgctcaggccactgaatgggtaggagcaaccactgactggtcttaagctgttcttgcataggctcttaagcagcatggaaaaatggttgatggaaaataaacatcagtttctaaaagttgtcttcatttagtttgctttttactccagatcagaatacctgggattgcatatcaaagcataataataaatacatgtctcgaaaaaaaaaa

SEQ ID NO: 9388 - DNA, 1083 bp, Homo sapiens
  SIMILAR (379)..(762): 901254mologous to Homo sapiens glyceraldehyde 3-phosphate dehydrogenase (EC 1.2.1.12),accession number J02642,Smith-Waterman Score=585.
  misc_feature (1)...(1083): n = a,t,c or g
atggggaaagtgaaggttggagtcaatggatttggttgtattgggcgcctggtcatcaggactgcttgtaattctggtaaagtagatattatcgccatcaatgacccattcattgacctcagctacatggtctacatgttccagtatgatcccacccatggtaaattccatggcaccgtcaaggctgagaacgggaagcttgtcatcaatggaaatcccatcactatcttccaggagccagatccctccaaaatcaagtggggtgatgctggcactgagtatgtcatggagtccactggcatcttcaccaccatggagaatgctggggctcacttgcagtggggagccaaaaggccacagggctctccagaacatcatccctgccactactgggctgccaaggctgtgaggaaggtcatccctgagctgaatggtaagctcactggcatggccctccgtgtccccactgccaacgtgtcagtggtggacctcacctaccatctggaaaaacctgccaaatatgatgacatcaagaaggtggtgaagcaggcatcagagggccccctcaaaggcatcctgggctacactgggcaccaggtggtctcctccgacttcaacagtgacacccactcttccaccttcaatgctggggctggcactgccctcaacgaccactttgtcaagctcatttcctggtatgacaatgaatttggctacaacaacagggtggtggacctcatggcccacatggcctccaaggagtaagacccctggaccaccagccccagcaagagcacaagaggaagagagagaccctcactgctggggagtccctgccacactcagtcccccaccacactgaatctcccctcctcacagttgccatgtagaccccttgaagaggggaggggcctagggagccgcaccttgtcatgtaccatcaataaagtaccctgtgctcaaccnnnnnnnnnnnnnnnnnnnnngggggcccgttttaaagaatccttagggggcccaaacttaacccggccttccaacggaaaagttttttccttaaagggaggcgaataaaaaccaacc

SEQ ID NO: 9389 - DNA, 671 bp, Homo sapiens
  SIMILAR (163)..(624): 671254mologous to Homo sapiens glyceraldehyde-3-phosphate dehydrogenase,accession number X01677,Smith-Waterman Score=447.
  misc_feature (1)...(671): n = a,t,c or g
cccatcgaccgcctgcaggaattcggcacgaggcctgttcgacagtcagccgcatgcttcttttgcgtcgccagccgagctcacatcgctgagacaccatggggaaggtgaaggtcggagtcaacggatttggtcgtattgggcgcctggtcaccagggcatgcttttaactctggtaaagtggatattgttgccatcaatgaccccttcattgacctcaactacatggtttacatgttccaatatgattccacccatggcaaattccatggcaccgtcaaggctgagaacgggaagcttgtcatcaatggaaatcccatcaccatcttccaggagccgagatccctccaaaatcaagtggggcgatgctgggcgctgaagtacgtcgtggagtccactgggcgtcttcaccaccatggagaaaggctgggggctcatttgcagggggggagccaaaagggtcattcatctcttgccccctcttgcttgatgccccccatgttcgtcatgggtgtgaacccatgaaaaagatgacaacagcctcaaggatcatcagcaatggcctcctgcaccaccaactgcttagcacccctggccaaaggtcatccatgacactttggtgtccggggaaggactcaaggaccacagggcattgccttanattggcaacc

SEQ ID NO: 9390 - DNA, 992 bp, Homo sapiens
  SIMILAR (341)..(658): 341254mologous to Homo sapiens SIB 121 intestinal mucin,accession number R12603,Smith-Waterman Score=90.
  misc_feature (1)...(992): n = a,t,c or g
ataattncccctccagcatcctaatttgtatgtgagatatacacatcatcatatgcaccagagacttgatggctccggaaactgcggcgtgatggccgcggggctcttcagtaacatcatccctgggcctctaactggcgctgcccaaggcttgtggccaaggtcatcctgaagcttgaaccgggaaagcttcactgggcatggcccttccggtgtcccccactgcccaacgttgtcagtgggtggacttggaccctgccgttctagaaaaaccctggccaaaatatgatgaacatcaagaaaggtggtgaaagcaaggcgtcggaagggcccccttcaaaggggcatccctgggcttaccacttgagccaccagggtgggtctcccttctgactttcaacaagcggacaccccactccctcccacctttcgacggctggggcctggcattgcccctcaaacgacccacttttgtcaaagctcactttcctgggtattgacaacgaattttgggctacagctaccagggtgggtgggacctcaatggccccacatgggctttccaagggagttaagaccccctgggatcacccagcncccagcaaggaggcacaagagggaaggagagagaccctcacttgcctggggagtccctgccgacactcagttcccccaccacactgaatcttcccctccttcacagtttgccatgtagacccctgaaaaagggggaaggggcttagggaagccgcaccttgtcatgttaccatcaataaatgtaccctgtgctcacccaccaagagaaaaaacctagacaaaaatgaaagccaaaaggggggggcccttttaaaagaacccttgggggggccaaagttaacccgggcaggcaaggaaaaagttttttccttatagggggccgaataaaaacctacctgggaatttttggaaaggacccttactttgggggggggacaaaatgggccaaccaacct

SEQ ID NO: 9391 - DNA, 753 bp, Homo sapiens
  SIMILAR (89)..(262): 981254mologous to Homo sapiens thioredoxin peroxidase PMP20,accession number AF197952,Smith-Waterman Score=278.
  misc_feature (1)...(753): n = a,t,c or g
agggtgtcgccgctgtgccgctagcggtgccccgcctgctgcggtggcaccagccaggaggcggagtggaagtggccgtggggcgggtatgggactagctggcgtgtgcgccctgagacgctcagcgggctatatactcgtcggtggggccggcggtcagtctgcggcagcggcagcaagacggtacagtgaaggagagtgggcgtctggcggcgtccgcagtttcagcagagccgctgcagccatggccccaatcaaggttcggctccctggctgaatcccactggggcctttgggaaggagacagacttattactacgatgattcgctggtgtccatctttgggaaacgacgtcttcaagaggttctccatggtaggtacaggatggctagtaagaacgccctgaatgcgcaaccagatggcccaggcctcacctgcagcctggcacccaatatcatctcacagctctgaggccctgggccagattacttcctccacccctccctatctcacctggcccagccctgtgctgggggccctgcaattggaatgttggccagatttctgcaataaacacttgtggtttgcggcccctaaatatattaaaaaacaacaaattaaaaaaaaacccggggggccccctttaaaaaaatcccggggggggcccatttttccggggagaggagaaaaaannnnnnnnnnnnnnagggggggtgatataataggggggccggggccgtggttaaccccgg

SEQ ID NO: 9392 - DNA, 864 bp, Homo sapiens
  SIMILAR (96)..(626): 471254mologous to Homo sapiens thioredoxin peroxidase PMP20,accession number AF197952,Smith-Waterman Score=257.
  misc_feature (1)...(864): n = a,t,c or g
ggcacgaggatgggactagctggcgtgtgcgccctgagacgctcagcgggctatatactcgtcggtggggccggcggtcagtcttggncccccgggcagcggcagcaagacggtgcagtgaaggagagtgggcgtctggcggggtccgcagtttcagcagagccgctgcagccatggccccaatcaaggtgggagatgccatcccagcagtggaggtggtttgaaggggagccagggaacaaggtgaaacctggcaaaagcttgttcaagggcaagaagggtgtgctgtttggagttcctgggggccctccacccctgggatgttcccaagacacacctggccaagggtttgtgggagcaaggctgaaggctctgyaaggccaaagggaagtccagggtggtggccctgttctgagttgttaatgatgccctttgtgactgggcgcagtggggccaagccccacaaggcggaaaggcaaggttcgggctcctggctgaatccccactggggccctttgggaaggacgacagacttattacctagatgaatcgctggtgtcccatcttttgggaatacgacgtctcaagaaggttctccattggtggtacaggatggcatagttgaaggcccttaaatgtggaaccagatggcacaggccttcaccttgcagcctgggcacccaatatcatcttcacagctcttgaggccctgggcccagatttacttcccctcccccctccctattcttcaccttgcccagccctgtgcttggggcccttgcaatttgggaatgttgggcagatttctgcaataaacactttgtgggttttgcggccaaaacaaaaaaaaaaaaaaaagtcgac

SEQ ID NO: 9393 - DNA, 721 bp, Homo sapiens
  SIMILAR (2)..(238): 661254mologous to Canis familiaris beta-actin,accession number AF021873,Smith-Waterman Score=262.
  misc_feature (1)...(721): n = a,t,c or g
cagtgctgttctggcggcacacatggtaaccctgccattggcgacaggaatgcagaagnagatcctgccctgggcaccagcacaaatgaagatcagattcatggctcctcctgagcgcaagtactcggtgtggatcgcggctcccatcctggcctcgctgtccacctccagcaggatgtggatcagcaagcaggagtatgacgagtccggcccctccatcgtccaccgcaaatgcttctaggcggactatgacttagatttaaaaactggaacggtgaaggtgacagcagtcggttggagcgagcatcccccaaagttcacaatgtggccgaggactttgattgcacattgttgttttttttaatagtcattccaaatatgagatgcattgttacaggaagtcccttgccatcctaaaagccaccccacttctctctaaggagaatggcccagtcctctcccaagtccacacaggggaggtgatagcattgctttcgtgtaattaatgtaatgcaaaatttttttaatcttcgccttaatacttttttattttgttttattttgaatgacgagccttcgtgcccccccttcccccttttttgtcccccaacttgagatgtatgaaggcttttggtctccctgggagtgggtggaggcagccagggcttacctgtacactgacttgagaccagttgaataaaagtgcacaccttaaaaaaaa

SEQ ID NO: 9394 - DNA, 1914 bp, Homo sapiens
  SIMILAR (867)..(1133): 541254mologous to Gallus gallus beta-actin,accession number X00182,Smith-Waterman Score=213.
cgcgtccgccccgcgagcacagagcctcgcctttgccgatccgccgcccgtccacacccgccgccagctcaccatggatgatgatatcgccgcgctcgtcgtcgacaacggctccggcatgtgcaaggccggcttcgcgggcgacgatgccccccgggccgtcttcccctccatcgtggggcgccccaggcaccagggcgtgatggtgggcatgggtcagaaggattcctatgtgggcgacgaggcccagagcaagagaggcatcctcaccctgaagtaccccatcgagcacggcatcgtcaccaactgggacgacatggagaaaatctggcaccacaccttctacaatgagctgcgtgtggctcccgaggagcaccccgtgctgctgaccgaggcccccctgaaccccaaggccaaccgcgagaagatgacccagatcatgtttgagaccttcaacaccccagccatgtacgttgctatccaggctgtgctatccctgtacgcctctggccgtaccactggcatcgtgatggactccggtgacggggtcacccacactgtgcccatctacgaggggtatgccctcccccatgccatcctgcgtctggacctggctggccgggacctgactgactacctcatgaagatcctcaccgagcgcggctacagcttcaccaccacggccgagcgggaaatcgtgcgtgacattaaggagaagctgtgctacgtcgccctggacttcgagcaagagatggccacggctgcttccagctcctccctggagaagagctacgagctgcctgacggccaggtcatcaccattggcaatgagcggttccgctgccctgaggcactcttccagccttccttcctgggcactggagtcctgtggcatccacgaaactaccttcaactccatcatgaagtgtgacgtggacatccgcaaagacctgtacgccaacacagtgctttccggcggcacccaccaattccccttgccttgccgaccaggatgctgaaagaaaatcactgccctggaacccgtccacaatgaagattcagaatcattgcttcctcctgaggcgcaaagtactccgttatggaatcgcggggctccaatcctgggcctcgctggtccaccttccagccaagatgtgggatcagaaaagcagggagtatgacgagtccgggcccctcccattcgtccaccgcaaaatgctttctagggcggactatgacttagttgcggttacacccctttcttgacaaaaacctaaacttgcgccagaaaaccaagatgagaattggcatggcctttatttgttttttttgttttggtttggttttttttttttttttttggcttgacctcaggattttaaaaaactgggaacggtgaaaggtgaacagccagtcgggttggaagccgagcattccccccaaagtttcacaaatgtgggccggaggacttttgattggcacattgttgtttttttttaatagtcaattcccaaatatggagatgcggttgttacagggaagtcccttgcccatcctaaaagacacccccacttcttctctaaggagaatggcccagttcttctcccaaagtcccacacaggggaagggtgatagcattgcttttcgtgtaaaataatgtaatgcaaaattttttttaatctttcgccttaatacttttttattttgttttattttggaatgatgagccttccgtgccccccccttcccccttttttgtccccccaactttgagattgtatgaaggcttttgggtctccctgggggagtggggtgggagggcagccaggggctttacctggtacacttgacttggaggacccagtttgaataaaaaagtgcacaaccttaaaaatgaaaaaaaaaaaaaaaaaa

SEQ ID NO: 9395 - DNA, 424 bp, Homo sapiens
  SIMILAR (46)..(312): 981254mologous to Homo sapiens blood plasma glutamate carboxypeptidase precursor; prostate-specific membrane antigen (PSMA),accession number AF119386,Smith-Waterman Score=472.
tggagccagtgagaataccccactgggagaggggagaagaatcagctgtttgggctgttgtttcttatgttgttgcagacatggaagaaatgctgcctaggtcctagaaacagtaagaaagagacgtcgtcatgcttctggccaggaatcctgggtctgcaactttggaaaactcctcttcacataacaatttcatccaattcatcttcaaagcacaactctatttcatgctttctgttattatctttcttgatactttccaaattctctgattctagaaaaaggaatcattctcccctccctccaaccacatagaatcaacatatggtagggattacagtgggggcatttctttatatcacctcttaaaaacattgtttccactttaaaagtaaacacttaataaatttttggaagatctctg

SEQ ID NO: 9396 - DNA, 1784 bp, Homo sapiens
  SIMILAR (1)..(1647): 811254mologous to Homo sapiens blood plasma glutamate carboxypeptidase precursor; prostate-specific membrane antigen (PSMA),accession number AF119386,Smith-Waterman Score=2121.
atgaaattccttatcttcgcatttttcggtggtgttcaccttttatccctgtgctctgggaaagctatatgcaagaatggcatctctaagaggacttttgaagaaataaaagaagaaatagccagctgtggagatgttgctaaagcaatcatcaacctagctgtttatggtaaagcccagaacagatcctatgagcgattggcacttctggttgatactgttggacccagactgagtggctccaagaacctagaaaaagccatccaaattatgtaccaaaacctgcagcaagatgggctggagaaagttcacctggagccagtgagaataccccactgggagaggggagaagaatcagctgtgatgctggagccaagaattcataagatagccatcctgggtcttggcagcagcattgggactcctccagaaggcattacagcagaagttctggtggtgacctctttcgatgaactgcagagaagggcctcagaagcaagagggaagattgttgtttataaccaaccttacatcaactactcaaggacggtgcaataccgaacgcagggggcggtggaagctgccaaggtgggggctttggcatctctcattcgatccgtggcctccttctccatctacagtcctcacacaggtattcaggaataccaggatggcgtgcccaagattccaacagcctgtattacggtggaagatgcagaaatgatgtcaagaatggcttctcatgggatcaaaattgtcattcagctaaagatgggggcaaagacctacccagatactgattccttcaacactgtagcagagatcactgggagcaaatatccagaacaggttgtactggtcagtggacatctggacagctgggatgttgggcagggtgccatggatgatggcggtggagcctttatatcatgggaagcactctcacttattaaagatcttgggctgcgtccaaagaggactctgcggctggtgctctggactgcagaagaacaaggtggagttggtgccttccagtattatcagttacacaaggtaaatatttccaactacagtctggtgatggagtctgacgcaggaaccttcttacccactgggctgcaattcactggcagtgaaaaggccagggccatcatggaggaggttatgagcctgctgccagcccctcaatatcactcaggtcctgagccatggagaagggacagacatcaacttttggatccaagctggaagtgcctggagccatgtctacttgatgacttatacaagtatttcttctttccatcactcccacggagacaccatgactgtccatgggatccaaacgcagatggaatgtttgctgctgctgttttgggctgttgtttcttatgtgtgttgcagacatggaaggaaatgctgcctaggtcctagaaacagtaagaaagaaaccgttttcatgcttctggccagggaatcctgggtttgcaaccttgggaaaactcctcttcacataaccattttcatcccaattcatcttgaaaagcaacactctatttcatgctttctcgttattatctttcttggatactttccaaattctctggattctaggataaagggaatcattctcccctccctcccaccacatagaatcaacatatggtagggattacagtgggggcattttctttatatcacctcttaaaaacattgtttccactttaaaaagttaaacacttaataaatttttggaagatctctgaaaaaaaaaaaaaaaaaaaaaa

SEQ ID NO: 9397 - DNA, 645 bp, Homo sapiens
  SIMILAR (2)..(628): 991254mologous to Homo sapiens unnamed protein product,accession number AK024961,Smith-Waterman Score=1085.
atcaagtaatagatcacatattgtgaaactgccagttaacaggcaattgaagtttatgcatactccacatcagttccttcttctcagcagtccaccagccaaagaatccaattttagagctgctaaaaaactctttggaagcacctttgcatttcatggctcacacattgaaaactggcactccatcctgaggaatggtctggttgttgcttctaatacacgattgcagctccatggtgcaatgtatggaagtggaatctatcttagtccaatgtcaagcatatcatttggttactcagggatgaacaagaaacagaaggtgtcagccaaggacgagccagcttcaagcagtaaaagcagcaatacatcacagtcacagaaaaaaggacagcaatcccaattcctgcaaagccgtaacttaaaatgcatagccttatgtgaagtgatcacctcatctgacctgcacaaacatggagagatatgggttgtccccaatactgaccatgtctgcacacgattctttttcgtctatgaagacggccaagtgggagatgcaaatattaatacacaagaaggaggcattcacaaagagatcctccgagtaattggtaatcaaactgctactggttaaaggaccaccattta

SEQ ID NO: 9398 - DNA, 737 bp, Homo sapiens
  SIMILAR (1)..(210): 981254mologous to Homo sapiens Human secreted protein, SEQ ID NO: 7656,accession number G03575,Smith-Waterman Score=353.
cctaccgtatgtgaacgggagctgtgtgtgtttgcttttcaaaccctgggagtaatgaatgaagctgctgatgaaatagcaactggagctcaggtggtagatctactagtatccatgtgtaggtctgcgttggaatctcctagaaaagttgtgattttcgagccatatccttctgtggtagatcctaatgatcctcagatgttggccttcaaccccaggcaattgaagtttatgcatactccacatcagttccttcttctcagcagtccaccagccaaagaatccaattttagagctgctaaaaaactctttggaagcacctttgcatttcactccatggtgcaatgtatggaagtggaatctatcttagtccaatgtcaagcatatcatttggttactcagcctaatgtgatcaaacctttaccctagaatggaactttgcatagtaggtcgattgtactttcagctgcatcagacagctttgtccctaaattatgattttgccgatgttttcagggatgaacaagaaacagaaggtgtcagccaaggacgagccagcttcaagcagtaaaagcagcaatacatcacaggtgttgtagtgactttagtgactgcttatgattagtgaactgtggcctcatcagccagcagagcatggaaaaataggctttttaagtctgaaaaattatttaatgtggtcattacttataaaggaataaaactcactctgaaatgca

SEQ ID NO: 9399 - DNA, 488 bp, Homo sapiens
  SIMILAR (7)..(177): 931254mologous to Homo sapiens cytokeratin 8,accession number M34482,Smith-Waterman Score=249.
  misc_feature (1)...(488): n = a,t,c or g
tactaaattcgcggccgcgtcgacgcttacatgaacaaggtagagctggagtctcgcctggaagggctgaccgacgagatcaacttcctcaggcagctatatgaagaggagatccgggagctgcagtcccagatctcggacacatctgtggtgctgtccatggacaacagccgctcctccagggccgtggttgtgaagaagatcgagacacgtgatgggaagctggtgtctgagtcctctgacgtcctgcccaagtgaacagctgcggcagcccctcccagcctacccctcctgcgctgccccagagcctgggaaggaggccgctatgcatggtagcactgggaacaggagacccacctgaggctcaggcctagccctcagcccacctggggagtgtactacctggggacccgccttgcccatgcctncagctacaaaacaattcaattggttggttttgtgggtcgaaataaacctcggcttgctct

SEQ ID NO: 9400 - DNA, 649 bp, Homo sapiens
  SIMILAR (221)..(649): 611254mologous to Oncorhynchus mykiss K8, simple type II keratin,accession number X92522,Smith-Waterman Score=429.
agtgacccagaagtccttcaaggtgtccaactctggcccaagggccttcagtagccattcctacatgtgtgggcccagtgcctgcatcagctcctcgagcttctcccgaatgggcagcagcagtttccggggtagcctgggtggagactttggcagggccagtggtaggggaggcatcaccccagtcacggtcaaccagagcctgctgagcccccttaacctggaggtggaccccaacatccaagctgtgtgcacccaggtgaaggagcagatcaagaccctcaacaacaagtttgcctccttcattgacaagctgtacactctgggccaagagaagctgaagctggaggtggaacttgataacatgcaggggctggtggaggacttcaagaacaagtacgaggatgatatcaaaaagcatacagagatggagaatgaatttgtcctcatcaagaaggatatggatgaagcttacaagaacaaggtagagctggagtctcacctggaagggcttactgaagagatcagcttcctcaggcaactgtatgaagaggagatccgggagctgcagtcccagatctcggacacatctgtggtgctgtccattgacaacagtcgctccctggacatgaacagcatcatcgctgag

SEQ ID NO: 9401 - DNA, 613 bp, Homo sapiens
  SIMILAR (8)..(571): 631254mologous to Homo sapiens cytokeratin 8,accession number M34482,Smith-Waterman Score=505.
ctggagactgggccaggagaagctgaagctggaggcggagcttggcaacatgcagccgctggtggaggacttcaagaacaagtatgaggatgagatcaataagcgtacagagatggagaatgaatttgtcctcatcaagaaggatgcagatgaagcttccatgaacaaggtagagctagggtctcgcctggaagggctgactgacgagatcaacttcctcatgcagctatatgaagaggagatccgggagctgcagtcccagatctcagacacgtctgtggtgctgtccatggacaacagctgctccctggacatggacagcatcattgctgagagggcttccctggaggccgccatcacagatgccgagctgcacggggatttggtggttaaggatgccaacgccaagctgtccgagctggaggccgccctgcagcgggccaagcaggacatggcgtggcagctgcgtgaataccaggagctgatgaacgtcaagctggccctggacatagagatcgccacctacaggaagctgctggagggcaaggagagccggctggagtctgggatgcagaacaggagtatccatagaagaccaccagtggcggtggag

SEQ ID NO: 9402 - DNA, 1668 bp, Homo sapiens
  SIMILAR (763)..(1635): 651254mologous to Homo sapiens Keratin 8,accession number X74929,Smith-Waterman Score=866.
atgcagcgggccccccgaccggcgctcgcccgggttctgcgcctaagagttggccacgacgaggcgatttatgcaacagtatcctgtttcagcactgccaaggctatgcgagaacgcggccaggacagcctggcaggactcgtgctgtatgtaggactcttcgggcaccccgggatgctgcacagggccaagtacagccgctttcggaacgagtcgatcacgtccttggacgaaggtagctccggaggctcggtcgggaacaagggctcgccgcagcctccccaccccgccctggcacctcacctgccgactgaagatgccaccttgccgtcgcaggagagccccaccccactgtgcaccttgatcccccgcatggcaagcatgaagctggccaacccggccactttgctgagtctgaaaaacttttgcctgggtaccaaagaggtgcctcggctgaagctccaggaaagccgggacccaggttccagcggcccctcttccccagaaaccagtttaagtaggtccgggactgcacctccaccgcagcaggacctggtgggacacagggcaaccgccctaacccctgattcgtgcccgcttcctggccctggggagccaacacttaggagcaggcaggacaggcactttctacagcacctgttggggatgggcatgaactactgtgtgaggtgggcagcagcagcttccgagatgtcctgggcaccagcatgggtctgtgtggaggctatgcggggccagcgtatgggaggcatcacagccgtcacagtcaaccagaacgtgctgagcccccttaacctggaagtggaccccaacatgcagggcatgcacacccaggagaaagagcaggtcaagaccctcaacaagtctgcctccttcgttgacaaggtactgttcctggaacagcagaacaagatgctggagaccaactggagcctcctgcagcagcagaagccggctcagagcaacatggacaacatgttcgagagctacatcaacaaccttctggggcagctagagatcctgggccaggagaagctgaaactggaggcagagcttggcaacatgcaggggctctgcatgtttttcgtgaaggaggacttcaagaaaaagtacgaggacgagatcaataagcctacagagatggagaatgaatttgtcctcatcaagaaggatgtggatgacgcttacatgaacaaggtagagctagagtttcgcctggaggggctgactgacgagatcaacttcctcaggcagctgtatgaagaggagatcccagagctgcagtcccagatcttggacacatctgtggtgctgtccatggacaacagccgctccctggacatggacagcatcatcgcggagatcaagtatgaggagctgcagacactggctgggaagcactgggatgaccggcgtcttacaaagacgaagatttctgagatgaaccggaacatcagccggctccaggctgagattgagggcctgcctcaaaggccagagcagagagcttccctggagtccgtcatcgcagatgctgagcagcggggggagctggccattaaggacgccaagactaagctgtccgagctggaggccgcccagcagcgggccaagcaggacatggcacatggcacggcagctgcctga

SEQ ID NO: 9403 - DNA, 3576 bp, Homo sapiens
  SIMILAR (2991)..(2251): 1001254mologous to Escherichia coli UvrA protein,accession number M13495,Smith-Waterman Score=1255.
ttaattgctggtggctcggagagagggttgatttatacccaattcgttgcccaaaccgctatgtgcattactatcacagctggatgcactatttttccgcctattcgttaggacgtctctactggcaatcttctcagtgcgaagacaacacttcgctacgcgaggcgctaaccctgtacaaatacgatagcgccgggagtcgtatgttcgaagagctggcagcgggaagcgatcgtttctatgccacgcttccctggcagccattaactgtccagtctgaatgcccggtaacgcgatcaatatcacggtcatcgaaccgacaatgatgtcagtaaaccagtgtgcgccaatcattactctgggaaatgcaaaaaccacaaaaataataagggcgataaggcctgcaactttgccgaaataacgccacatgaatgccgaaaaaataagcagcatcatgccgtgatcgccgggaaagctatctcgtgaggcatctttcgtgggaacagagagcagttcgctgacgcggttaatatcggtaaaagtcaatgttgggctggcccgttttacaggaattaatgcctgacccagctggtttaataccactgcagttaatagcatgaccagaccaataatcacgatacgtcgtctgccaggggcgttttctttcagccagaaactcagcatcaacatacccatcgccagcagtgaacaaccgtcgaaggcgcgattgttggtcaatgcaaccagccacaaaaaggccttactttcgaccagtttccatgagcatgaaatgttcttccatttgtttgtgtcctcttttatttcgctgagcagttgtttgtagttctccttgaagaggtccttcacatcccttgtaagttggattcctaggtattttattctctttgaagcaattgtgaatgggagttcactcatgattgggctctctgtttgtctgttattggtgtataagaatgcttgtgatttttgcacattgattttgtatgctgagactttgctgaagttgcttatcaggttaaggagagtttgggctgagacgatggggttttctaaatatacaatcatgtcatctgcaaaaaaggacaatgtgagttcctcttttcctagtagaataccctttatttctttctcttgcctgattgccctggccagaacttccaacacttttggatttggtttggtgtccttatcatactgtaaactttccacttcactttctgttgcatcatcttttgttggaggtgactggttgtgagatggaacaggggacactgttggtgattttggcccagtaagtgtcttctcctttatgggggttaaaactttcttctttgaatgctctggctcatgttcattctgggtctttaattcaattaaagaatatatctgtccctttttatggctttggatttggttgtgagtgtcgtcgttcggctgctctgtcatgtcgtgacctcttgttgctggtgtgtgtgtgctcgacgtctcgctactatattggttcgtctcagttctggttttgtgtctttctgctttttctcctcttttgtgtcgttttcgtcgtctcgactctctatcagtgctgcgtccgtttgctactcttagaggggatcttgctctagtcatgggtctcaagtttattccaatccctggaggcttgtaaccaggtttttgggcgtccccgagtcctgttctggactggtgggcgcgaattttcccccgggggtgctcccgcgccaccaatacggccattagagcggcggtataccgcggggaattagtgtccgacaaaaagtcaagttccggggtataatgtagccatatgatgcctatttctttctttctttcttgttgttgcgtccccttttctgtctgtctctttttctctcttcctcttttgcggccctttcttctttctgttgtcctctctttccctttgtttgtcccttgttcttttttctctagaagagatcggagcgccctttctccctctcccatgtctttcttttctttcttttcttttattgtttgtttgctttttacacggttcttgtgtggttcctcctgttttgtgcttttgtggctgttcaattcatttcttatatccaacaattcttgtcgctcggtttttactgtatctttttcctcagcggcaaggtaacgtagtctcatctgttccaattcttcctgctgttttttaagacgagccatttgactttcttgctcccttttttccggattcgccggaacgcgtttcttcggcacttcaatcttgcgtttgccgctcatgtactgcccggtcaacgactccggcaccgccataatcgcttccagcggaccttctgcgaccacttcaccgccgtgaacacctgcgcccgggccaatgtcgatcacatggtcagcggcgcgaattgcgtcttcgtcgtgctccaccacaatcacggtattaccgagatcgcgcagatggataagcgtacccaacaggcgctcgttatcacgctggtgcaggccgatagacggctcgtccagcacgtacataacgccaaccaggcccgcaccaatctggctcgccagacggatacgctgtgcttcaccgccagaaagcgtttctgccgagcgggaaagcgtcaggtaattcaggccgacgttaacgaggaatttcagacgatcgccgatctctttaaggattttttctgcaatcttcgcccgctgacctgcgagtttgagattgttgaagaattccatcgcatgaccaatgctcatgtcggagatagcaggcagcggcgtattctcgacatacacgtggcgcgcttcccgacgcagacgcgtcccttcgcagctggcgcacggacgattactgataaacttggctaattcttcgcgtaccgcgctggattccgtctctttatagcggcgctccatattatgcagcacgccttcgaacggatgacgacgaatggaggtatcgcccgatcgtccacgagctggtggactagaaatgtcgacggtagcccggtaaaggtcgttcctgggcgtcttctccccgtcgacgacgattcctctctcttctgcacatggagagagatggccacctgttccagcttctgcccaagtgttagggggtggagtgagaccttcgatactttgtggttggaacttatgtgacaggctgctgtttcttcccatgttggggggagggatgtattgacgtggagtgaccccgtgaaaccccgtgggtagccatacggggccgatcttggggatacctgctatcttgtcccctggccctattggttgtgccttgggtggtatgatgtgtgttgatggtccacgagaaatctgctgagctcccagtcgaggtctgagggttgtcactgcatcctgagtcatcgatacccattggcagcaggcacacaacggcacacaaacagaagggggggtatagttagctcggtccacagcagctgctgacatcctcagaagtgaagacagcatgcccgtgtcccataggctactgggtttcttaaagaggtcctggcggtccccgaggtacat

SEQ ID NO: 9404 - DNA, 2793 bp, Homo sapiens
  SIMILAR (19)..(840): 821254mologous to Homo sapiens Keratin 8,accession number X74929,Smith-Waterman Score=1070.
atgaatttgtcctcatcaagaaggattgtggatgaagcttacattaacaaggtagagctggagtctcgcctggaagggctgactgatgagatcaacttcctcaggcagctgtatgaagaggagatccgggagctgcagtcctggatctcagacacatctgtggtgctgtccatggacaacagccgctccctggacatgaacagcgtcatcgctgaggtcaaggcacagtacgaggagatcgccaaccgcagccaggccgaggctgagagcatgtaccagatcaaggatgaggagctgcagagtctggctgggaagcatggggataacctgcggtgcacaaagactaagatctccgagatgaaccggaacatcagccggctccaggctgagaatgagggcctcaaaggccagagggctttcctggaggccgccattgcagatgccgagcagtgtggagagctggccattaaggatgctaacgccaagttgtcgagctggaggccgccctgcagcgggccaagcaggacatggcgtggcagctgcgagctgatgaacgtcaggctggccctggacatcgagatcgccacctacaagaagctgctggagggcgaggagagccggctggagtctgggatgcagaacatgagtattcatacgaagaccaccagcggctatgcaagtggtctgagctcggcctgtgggggcctcacaagccccggcctcagctacggcctgggcgccagctccttcagccgcaccagctactccagggccgtggttgtgaagatcgagacacgtgatgggaagctggtgtccgagtcctctgacgtcctgcccaaggacattgtggctgtgctgaatgaagagggaggctaccatcagattggaccagcagaatactgtactgactcctttattatgtcagtgaccatagcatttgctacccagttggaacagattcacctctgctgtggagaccagtcacttggaagtacagaaatacctttaactggattacttaaaaagggcagtacagaaatcaaccagcacccagtcacagtcgaaggtgcttttacccttgaccctccaaacagagccaaacagaagcttgcacctattcctgtggagctagccccaacttctttaattgaattaaagacccagaatgaacatgagccagagcattcaaagaagaaagttttaacccccataaaggagaagacacttactgggccaaaatcaccaacagtgtcccctgttccatctcacaaccagtcacctccaacaaaagatgatgcaacagaaagtgaagtggaaagtttacagtatgataaggacaccaaaccaaatccaaaagccagttcttctgtacctgcttcactggcccagctagtgactacatccaatgcttcagaagtagcttcaggacagaagattgctgtaccagcaacatcacatcatttttgcttttcaatagacttaaggagtatacatgccttggagattggttttccaatcaactgtatattaaggtactcatatccattctttggaagtgcagctcctattatgactaatcctcctgtagaagttcggaaaaacatggaagtttttcttccccagtcttactgtgcatttgattttgcaactatgcctcatcagctgcaagacaccttcttaaggattccattactggttgaactatggcacaaggataaaatgagtaaagatttacttctgggaattgcgagaatccagctttctaacatcttgtcttcagaaaaaactcgttttttaggttctaatggtgaacagtgttggcgtcaaacttacagtgaaagtgtgcctgttatagcagcacagggaagtattgactgctttaatgaaagcattattcaaggggatgaaaagcttaatgatgctgaaaataagtataagattttggaaaaagagttccaacagttcaaggaccagcaaaacaacaaaccagaaatccgtctacagtctgaaataaatcttctcaccttggaaaaggttgaacttgaaagaaagttggaatctgcaactaagtctaaactgcattacaagcagcagtggggacgagctttgaaagaacttgccagacttaaacagggtgtatctgccgtacagcaaaagccgtcttctcttcctccagcaccttgtccttcagagatccagacagagcctcgtgaaacgttagaatacaaagcagcacttgagctagaaatgtggaaggagatgcaagaagatatatttgaaaatcagctgaagcagaaagaactggctcatatgcaggctcttgcagaggaatggaagaaaagggaccgagaaagagaatcactagtaaagaaaaagcttcaaagagaaaaaaaggaactgcaatcagaacgtcagcggaacctgcaagaactgcaggactctatccgtagggccaaagaggactgtattcaccaagtagaactagaaaggttaaaaatcaaacagctcgaagaggataaacaccgccttcagcaacagctgaagcagaaagaactggctcatatgcaggctcttgcagaggaatggaagaaaagggaccgagaaagagaatcactagtaaagaaaaagtcattcatgtctcctcggcagacagttagggttggtttagaccatccttctgtcctaacggttactcgtttggaaccttccgttgggtctggaaattgtggggaccttcagggggcgggaaacgggcctacgattagggaaccccggggaatcaaaggattttaa

SEQ ID NO: 9405 - DNA, 1756 bp, Homo sapiens
  SIMILAR (1228)..(1515): 631254mologous to Homo sapiens cytokeratin 8,accession number M34482,Smith-Waterman Score=241.
ttcggcaattcctacctccactcctgcctccaccatgtccatcagggtgacccagaagtcctacaaggtgtccacctctggcccccgggccttcagcagccgctcctacacgagtgggcccggttcccgcatcagctcctcgagcttctcccgagtgggcagcagcaactttcgcggtggcctgggcggcggctatggtggggccagcggcatgggaggcatcaccgcagttacggtcaaccagagcctgctgagcccccttgtccctggaggtggaccccaacatccaggccgtgcgcacccaggagaaggagcagatcaagaccctgaacaacaagtttgcctccttcatagacaaggtacggttcctggagcagcagaacaagatgctggagaccaagtggagcctcctgcagcagcagaagacggctcgaagcaacatggacaacatgttcgagagctacatcaacaaccttaggcggcagctggagacttctgggccaggagaagctgaagctggagaccggagcttgcgcaacatgcaggggctggtggaggacttcaagaacaagtatgaggatgagatcaataagcgtacagagatggagaacgaatttgtcctcatcaagaaggatgtggatgtggatgaagcttacatgaacaaggtagagctggagtctcgcctggaagggcatgaccgacgagatcaacttccatcaggcagctatatgaagaggagatccgggagctgcagtcccagatctcggacacatctgtggtgctgtccatggacaacagccgctccctggacatggacagcatcattgctgaggtcaaggcacagtacgaggatattgccaaccgcagccgggctgaggctgagagcatgtaccagatcaagtatgaggagctgcagagcctggctgggaagcacggggatgacctgcggcgcacaaagacttgagatctcttgagatgaacccggaacatcagccggctccaggctgagattgagggcctcaaaggccagagggcttccctgggaggccgccattgcagatgccgagcagcgtgggagagctggccatttaaggatgccaacgccaagttgttccgagctggaggccgccctgcagcgggccaagcaggacatggcgcggcacttgcgttgagttaccagggagcttgattgaacgttcaagcttggccctgggacattcgagattcgccacctacaggaagctgctggagggcgaggagagccggcttggagtctgcggatgcagaacatgagtattcatacgaagaccaccggcggctatgcaggtggtctgagctcggcctatgggggcctcacaagccccggcctcagctacagcctgggctccagcatttggctctggcgcgggctccagctccttcagccgcaccagctcctccagggccgtggttgtgaagaagatcgagacacgtgatgggaagctggtgtctgagtcctctgacgtcctgcccaagtgaacagctgcggcagcccctcccagcctacccctcctgggctgccccagagcctgggaaggaggccgctatgcagggtagcactgggaacaggagacccccctgagggtcagccctagccctcagcccacctggggagtttactacctggggaccccccttgcccatgcctccagctacaaaacaattcaattgctttttttttttttggtcccaaaataaaacctcagctagctctgcc

SEQ ID NO: 9406 - DNA, 3244 bp, Homo sapiens
  SIMILAR (1501)..(2475): 641254mologous to Takifugu rubripes zinc finger protein,accession number U90880,Smith-Waterman Score=1113.
atggcagcctctgccaatcacgaagaacaggagtttgcttggcaggagaatcagtcaccatctccgagttcctatgcttatggctggactgagccagagggaacagcaagtgcaaacgccctgaagcaggaatgtgctggtgtcttcaaggaacagaaagaagaccagggtgcaggaataacgcacggaaggttgccaggaaagcactgtcacacatttgcatgcaggttaaatttctcaaaatctgagcccctacagcgagtgacagtgggaagtgtgaaagaaaggctcaagattcgctgctgtgctgttgttattgtcaatggtgttatatccacaggcaagcaactaaacgtctctgagcttcagtttctttatctgagaaatggcataatagtactttatggggtttcccagggatcaaatgagataaagtgctttgcacaggacctggcaaatgctgaaccggagactgaccaggttccttcaaggatcctcagccatgcaaaagggaagcgcctttctgagggagccaagcttgcatctagaccttcacagtggtgcaacataacttctcagagatcggcatggtaccattcagtgaatttgggaatttcaggagaagaccaagtgtcagcacactgtctgctgaagtgcgatacctggcttcttaggaaagtggtacaaataggactggacttttcatttaccctgaaagcagcttttaagcaactcaactacattagggccccggggaaggactttacattgccaaaatctacagggctcacccttgacacgccagagtgccctctcagcactggggaagaagccagggagaaactcggagggctggaatggagaaactggattaatcatatttgcatgaaacaggacattctatctttcatatcaaaggaacatgccactcattggccaaggagcctgagccaggatgaagcaggggccatccattctgaggagcactaccccagtccctgctatgccatggctaaagcaccttcctcatgggagatgttcttggcagttaatttacgcgagaatcttgcagcaatatggcggatacagccaatgaaatgtcaaagaaagaaggcagttggctgctcaggaaaattgccaaggatgcagaaggaaatgaagatgatcaaagacgaggatgtgcatttcgacttggctgtgaagaagaccccctcctttccccactgcctgcagccagtggcttctcggggaaaggctccccaaagacaccccttcccggaagctctccgagggccattttcccagtttcggtatgaacctcccccaggagacctagatgggttccccggggtcttcgaaggagcagggtctaggaaacggaagagcatgcccacaaagatgccctataaccaccctgcagaagaagtcaccctcgccctccactcagaggagaacaaaaaccacggccttcccaacctccctttgctgttcccgcagcccccgcgccccaagtatgactctcagatgatcgacctgtgcaacgtgggcttccaattctaccgcagcctggaacactttgggggcaagcccgtcaagcaggaacccattaagcccagcgccgtgtggccccagccaacgcccactccattcctgcccacgccctacccctactaccccaaagtccacccgggcctcatgttccccttcttcgtgccctcgtcctcgcccttccccttcagccggcacaccttcctgcccaagcagcccccggaacctctgctgccccggaaagccgagccccaggagagcgaggagaccaagcagaaggtggagagggtggacgtgaacgtgcagatcgatgacagctactacgtggacgtgggcggctcgcagaagcgctggcagtgccccacctgcgagaagtcctacacctccaagtacaacctggtcacccacatcctgggccacagtgggatcaagccgcacgcgtgcacgcactgcgggaagctcttcaagcagctcagccacctgcatacccacatgctgacccaccagggcacgcggccccacaagtgccaggtgtgccacaaggccttcacccagaccagccacctgaagcgccacatgatgcagcacagcgaggtgaagccgcacaactgccgcgtgtgcggccgcggctttgcctaccccagcgagctcaaggcccacgaagccaagcacgccagtgggcgcgagaacatctgtgtggagtgcggcctcgacttccccaccttggcccagctgaagagacacctcaccacgcaccggggccccatccagtacaactgctccgagtgcgacaagaccttccagtacccgagccagctgcagaaccacatgatgaagcacaaggacatccggccctacatctgctcagagtgtggcatggagtttgtgcagccgcaccacctcaagcagcactccctcacccacaaggtactgcggggcctctggtggggcggacggggccttgggaagaggagcggggccctgagcagagcactggggagcaggacgcctgtgccgctctgcaccttaccccgaggaggtcttcaaggggaaatacaggcccaagagtctgagttcagcccagtttgcaaccatagccctggagtcattcaggctgaactaaaacaaggccctagtggtgttcctgaaatcttaccccagctaaactcctgccctacaaaaggtacctgtagatactatccagaggggagtcgcctgccaagtgcaggaaccatcaacaaaggacccagactgggattcagccgtaaaggggaccattcgctaacttcaggggctcctttatatgtgggaaaggaatcaaaagtgcattttagagcatatgaagatcctggtgtgaaggagcataagtgtgggatttgtgggcgggagttcaccctgctggccaacatgaagcgacacgtgctgatccacaccaacatccgcgcctaccagtgtcacctctgctacaagagcttcgtgcagaagcagaccctcaaggcacacatgatcgtccactctgacgtgaagcctttcaaatgcaagctttgtgggaaggaattcaaccggatgcacaacctgatgggccacatgcgcctggctctgaaacggaaaacccttaaagcgcctatattgcccaagcaaattcaccctgaaggggaacctgacacgccacatgaaagtcaagcatggagtcatg

SEQ ID NO: 9407 - DNA, 1872 bp, Homo sapiens
  SIMILAR (985)..(1200): 801254mologous to Takifugu rubripes zinc finger protein,accession number U90880,Smith-Waterman Score=330.
atgaggatccaacaattatgtggacatctgtggcagcaaaagaaaatcagccttgaattaatgtcttcatttcacaaaattttgaaaaataaaatggggtgtggagttacacctgatagcaaggagctgctaaagtatctctcctattgtaattcctatccccttaccggaagcccacaagaggccccagtgtctgatgttccccttcctgtgtccaagtgttctcattgttcagttcagctcatcatgtgtctgagaccagaacacatccccaactccccaggaataaagggacaaggtataaaacagcatgaagaaaagcatccaactcttcttcatctggatgcctcacaccttatgacctgctttgtggtggaaatgacactgtatgttttaattgcaggcttcaagagcctatgtagcatccactcttaccctcctagaaccctgagacatttatgtgaaaaagtctgggatagccttcttgagaatgagagacgacatgagaagagaggcccagccaacttcttgcatcgattgccagctgaacaccagtggggaatagtgcaatccagcaacattatggccggtctttcagcccgtctgcagctcttcctggaacacaggccttttcctgtgtttgaactcaccgccaatggctgtcctaccaaaggtcttcaaggggaaatacaggcccaagagtctgagttcagcccagtttgcaaccatagccctggagtcattcaggctgaactaaaacaaggccctagtggtgttcctgaaatcttaccccagctaaactcctgccctacaaaaggtacctgtagatactatccagaggggagtcgcctgccaagtgcaggaaccatcaacaaaggacccagactgggattcagccgtaaaggggaccattcgctaacttcaggggctcctttatatgtgggaaaggaatcaaaagtgcattttagagcatatgaagatcctggtgtgaaggagcataagtgtgggatttgtgggcgggagttcaccctgctggccaacatgaagcgacacgtgctgatccacaccaacatccgcgcctaccagtgtcacctctgctacaagagcttcgtgcagaagcagaccctcaaggcacacatgatcgtccactctgacgtgaagcctttcaaatgcaagaagtcttttacagctcagggtaatagtgctccacaggaagatgcaggatcgcagggagagctgtttgtcttcttttccaaactggggccagagaaaagggagagcctggaggcacctcaggcacttgccatgaaccccagtggccatgctgacagccatggagaagtcggctgtggccagagacagggtgatagcagtgggcagccactgggctggggccagaagcagcacaccgcctcgccccagccagcctggttgagtgaacatttctgcgtgctagggacagctgtttccactgagcactgggctggagaagatcagttcatattgagacaggaggaaggatgcatgttaagaaggaattttaatggtgagaatcccccaaaattagactctgttactaaaagcctcttccttgttgcttaccacgtaaacccgcagtggatccggccttgtgacacgaacccccggtgtgtccggcttgtcctacaagttacttatatagagccgccctacggtggacaaccgtgtgacgccggacttagagacacgatacttacgacagagcctcatgaccacaatcatggcatatcatcaggccccaataattcgccaggaagagccacgaatgacatctttgccctcataagaactgacattatcatggaggaaagagaaaataaagaacaaacataa

SEQ ID NO: 9408 - DNA, 4805 bp, Homo sapiens
  SIMILAR (3)..(1211): 941254mologous to Homo sapiens PEX1,accession number AB008112,Smith-Waterman Score=1934.
gaaaaaggcttgaaaacatacaaaaaaccctagaggtggctttctcagaggcagtgtggatgcagccatctgttgtcctgctggatgaccttgacctcattgctggactgcctgctgtcccggaacatgagcacagtcctgatgcggtgcagagccagcggcttgctcatgctttgaatgatatgataaaagagtttatctccatgggaagtttggttgcactgattgccacaagtcagtctcagcaatctctacatcctttacttgtttctgctcaaggagttcacatatttcagtgcgtccaacacattcagcctcctaatcaggaacaaagatgtgaaattctgtgtaatgtaataaaaaataaattggactgtgatataaacaagttcaccgatcttgacctgcagcatgtagctaaagaaactggcgggtttgtggctagagattttacagtacttgtggatcgagccatacattctcgactctctcgtcagagtatatccaccagagaaaaattagttttaacaacattggacttccaaaaggctctccgcggatttcttcctgcgtctttgcgaagtgtcaacctgcataaacctagagacctgggttgggacaagattggtgggttacatgaagttaggcagatactcatggatactatccagttacctgccaagtatccagaattatttgcaaacttgcccatacgacaaagaacaggaatactgttgtatggtccgcctggaacaggaaaaaccttactagctggggtaattgcacgagagagtagaatgaattttataagtgtcaaggggccagagttactcagcaaatacattggagcaagtgaacaagctgttcgggatatttttattagagcacaggctgcaaagccctgcattcttttctttgatgaatttgaatccattgctcctcggcggggtcatgataatacaggagttacagaccgagtagttaaccagttgctgactcagttggatggagtagaaggcttacagggtgtttatgtattggctgctactagtcgccctgacttgattgaccctgccctgcttaggcctggtcgactagataaatgtgtatactgtcctcctcctgatcaggatggaagttccagctctgatagtgacctaagtctgtcttcaatggtctttcttaaccatagcagtggctctgacgattcagctggagatggagaatgtggcttagatcagtcccttgtttctttagagatgtccgagatccttccagatgaatcaaaattcaatatgtaccggctctactttggaagctcttatgaatcagaacttggaaatggaacctcttctgatttggaggacgaatccatgaaccaaccaggaccaatcaaaaccagactggctattagtcagtcacatttaatgactgcacttggtcacacaagaccatccattagtgaagatgactggaagaattttgctgagctatatgaaagctttcaaaatccaaagaggagaaaaaatcaaagtggaacaatgtttcgacctggacagaaattctttgatgaaatcactgagctgacatacctgccctcttttcaccataaagctgctcctcaccaggccgagccaggtcccaattcttcctcagcctctgctcccccaccctataatccttttatcacctcctctcctcacactcagtccggcttacagtttcgttctgtgactagccctcccccatctgcccaacaatttcctcttaaagaggtggctggagctaaaggcatagtcaagacagctttagagactgctcccacactagctctccctgtctcatcccaacccttttcattacacacagccgaagtgcagggctgtgcagtcggaattcttacacaaggaccgggaccatgccctgtagcctttttgtccaaacaacttgaccttactgttttaggctcgccatcatgtctccatgcggtagcttccgctgccctaatacttttagaggccctcaaaatcacaaactatgctcaactcactctctacagctctcacaacttccaaaatctattttctttctcacacctgacgcatatactttctgctccccggctccttcagctgtattcactctttgttgagtctcccacaattaccattcttcctggcccagacttcaatctggcctcccacattattctggataccacacctgaccctgatgattgtatgtctctgatctacctgacattcaccccatttccccatatttccttcttttctgttcctcatgttgatcacatttggtttactgacggcagttccaccaggcctgatcgccactcaccagcaaaggcaggctatgctatagaatcttccacatccatcattgaggctactgctctgcccccctccactacctctcagcaagccgaactgattgccttaactcgggccttcactcttgcaaagggactacacgtcaatatttatactgactctaaatatgccttccatatcttgcaccaccatgctgttatatgggctgaaagaggtttcctcactacgcaagggtcctccatcattaatgcctctttaataaaaactcttctcaaggctgctttacttccaaaggaagctggagtcacacactgcaagggccaccaaaaggcgtcagatcccattactctaggaaatgcttatgctgataaggacaggacgatagatggttcctcccaggtgattgaggaaaaaaaccacaatgggtattcagtaattgatacggggactcttgtggaagcagagttagaaaaattgcctaataactggtctcctcaaacgtgtgagctgtttgcactcagccaagccttaaagtacttacagaatcaaaagactatctcaatcctgattcaaaaggaacccagcccagctctaggactcacccctgagcgcaaaggcaatgttgggcatgctggtaaaggaccactagaatccagcagcccagacccctttctttgtggtcaagaaaggcgggaaaaggggtgcaggactgctacatcggtaagcataactaatccgataaacagaggtccatgggtggttacgcaccctggaaaggaactcacccctgagcacaaaggcaatgttgggcacgctgggagagacattctagcaaaagcaggggccattatacacctgaacataggagaaggaacacccgtttgttgtcccctgcttgaggaaggaattaatcctgaagtctgggcaacagaaggacaatatggacgagcaaagaatgcccgtcctgttcaagttaaactaaaggattccacctcctttccctaccaaaggcagtaccccctcagacccaaggcccaacaaggactccaaaagattgttaaggacctaaaagcccaaggcctagtaaaaccatgcagtaacccctgcagtactccaattttaggagtacagaaacccaacagacagtggagaaaccttgtgccatcaagccacccaagcgctcttcaatttcctcgctacctgtggctacatggtttccaaaccaaaggctcaactctgctcacagcaggttacttagggctaaaattatccaaaggcaccagggccctcagtgaggaacacatccagcctatactggcttatcctcatcccaaaaccctaaagcaactaaggggattccttggcgtaataggtttctgccgaaaatggattcccaggtatggcgaaatagccaggtcattaaatacactaattaaggaaactcagaaagccaatacccatttagtaagatggacaactgaagtagaagtggctttccaggccctaacccaagccccagtgttaagtttgccaacagggcaagacttttcttcatatgtcacagaaaaaacaggaatagctctaggagtccttacacagatccgagggatgagcttgcaacctgtggcatacctgactaaggaaattgatgtagtggcaaaggtggtggcagtagcagtcttagtatctgaagcagttaaaataatacagggaagagatcttactgtgtggacatctcatgatgtgaatggcatactcactgctaaaggagacttgtggctgtcagacaactgtttacttaaatgtcaggctctattacttgaagggccagtgctgcgactgtgcacttgtgcaactcttaacccagccacatttcttccagacaatgaagaaaagataaaacataactgtcaacaagtaatttctcaaacctatgccactcgaggggaccttttagaggttcctttgactgatcccgacctcaacttgtatactgatggaagttcctttgtagaaaaaggacttcgaaaagtggggtatgcagtggtcagtgataatggaatacttgaaagtaatcccctcactccaggaactagtgctcagctagcagaactaatagccctcacttgggcactagaattaggagaagaaaaaagggcaaatatatatacagactctaaatatgcttacctagtcctccatgcccatgcagcaatatggaaagaaagggaattcctaacttctgagagaacacctatcaaacatcaggaagccattaggaaattattattggctgtacagaaacctaaagaggtggcagtcttacactgccggggtcatcagaaaggaaaggaaagggaaatagaagagaactgccaagcagatattgaagccaaaagagctgcaaggcaggaccctccattagaaatgcttataaaacaacccctagtatag

SEQ ID NO: 9409 - DNA, 1846 bp, Homo sapiens
  SIMILAR (44)..(1180): 651254mologous to multiple sclerosis associated retrovirus polyprotein,accession number AF009668,Smith-Waterman Score=1209.
aattggaggaaaatactgggcacctgtctgccagttaaaaatggttagcgtggccaccggacttaagattcaggaaactagcccagatctaggactcacccctgagagcaaaggcaatgttgggcatgctggtaaaggaccgctagaatccagcagccaggaccactttctttgtggtcaagaaaggcagtacccccttagacccaaggcccaacaaggactccaaaaaactgttaaggacctaaaagcccaaggcctagtaaaaccatgcagtagcccctgcaatactccaactgtaggagtacagaaacccaacggacagtggaggttagtgcaaaatctcaggattatcaatgagactgttgttcctctatacccagctgaacctaacccttatactctgctttcccaaataccagaggaagcagagtggtatatagtcctggaccttaaggatgccttcttctgcatccctgtacatcctgattcccaattcctgtttgcctttgaagatccttcaaactcaacgtctcaactcacctggactgttttacgccaagggttcagggatagcccccatctatttggccaggcattagcccaagatttgagccaattctcatacctggacactcttgtcctttggtatgtggatgatttacttttagccacctgttcagaaaccttgtgccatcaagccacccaagtgctcttaaatttcctcaccacctgtggctacaaggtttccaaaccaaaggctcagctctgctcacagcaggttaaatacttagggctaaaattatccaaaggcttgagggccctcagtgaggaacacatccagcctatactggcttatcctcttcccaaaaccctaaagcaactaagagggttccttggcataacaggtttctaccgaatgtggattcccaggtacagcaaaataggcagatcattatatacactaattaaagaaactcagaaagccaatacccatttagtagtggtggcagtagcagtcttagtgtctgaagtggttaaaatgatacagggaagagatcttactgtgtggacatctcatgatgtgaatgccatactcactgctaaaggagacttgtggctgtcagacaaccgtttacttaaatatcaggctctattacttgaagggccagtgctgcaactgcgcacttgtgtaactcttaacccagtcacatttcttccagacaatgaagaaaagatagaacataactgccaacaagtaattgctcaaacctatgccgctcgaggggactttttagaggttcccttgactgatccccacctcaacttgtatactgatggaagttcctttgtagaaaaaggacttcaaaaagtggggtatgcagtggtcagtgataatggaatacttgaaagtaatcccctcactccaggaactagtgctcagctggcagaactaatagccctcactcgggtactagaatcaggagaaggaaaaagggtaaatatatatacagactctaagtgtgcttacctagtcctccatgcccatgcagcaatatggagagaaagggaattcctaacttccgagggaacacctatcaaacatcaggaagccattaggaaattattattggctgtacagaaacctaaagaggtggcagttttacactgccggggtcatcagaaaggaaaggaaagggaaatacaagggagccaccaagttgatattgaagtcaaaagagccacaaggctggaccctccattagaaatgcttataggaggacccctagtatggggtaatcccctccgggaagccaagccccagtactcagcaggagaaatagaatag

SEQ ID NO: 9410 - DNA, 772 bp, Homo sapiens
  SIMILAR (3)..(632): 761254mologous to multiple sclerosis associated retrovirus polyprotein,accession number AF009668,Smith-Waterman Score=810.
ctgtacctaacccttatactctgctttcccaaataccagaggaagcagagtggtttacagtcctggaccttaaggatgtctttttctgcatccctgtacatcctgactctcaattcttgtttgcctttgaagatcctttgaacccaatgtctcaactcacctgcactgttttaccccaagggttcagggatagcccccatctatttggccaggcattagcccaagacttgagtcagttatcatacctggacactcttgtccttcagtatgtggatgatttacttttagctgcctgttcagaaaccttgtgccatcaagccacccaagcactcttaaatttcctcgccacctgtggctacaaggtttccaaagagaaggctcagctctgctcacagcaggttaaatacttaggactaaaattatccaaaggcaccaaggccctcagtgaggaatgtattcagcctatactggcttatcctcatctcaaaaccctaaagcaactaagagagttccttggcataacaggcttctgccgaatatggatttccaggctctattacttgaaaggccagtgctgcaactgtgcacttgtgcaactcttaacccagtcacatttcttccagacaatgaagatagaatataactgtcaacaaataatttctcaaacctatgccactcgaggggaccttctagaggttcccttgactgatcctgacctcaacttgtatactgatggaagttcctttgtagaaaaaggacctcaaaaagcggg

SEQ ID NO: 9411 - DNA, 6507 bp, Homo sapiens
  SIMILAR (1153)..(2754): 881254mologous to Homo sapiens PEX1,accession number AB008112,Smith-Waterman Score=2320.
atgtggggcagcgatcgcctggcgggtgctgggggaggcggggcggcagtgactgtggccttcaccaacgctcgcgactgcttcctccacctgccgcggcgtctcgtggcccagctgcatctgctgcagaatcaagctatagaagtggtctggagtcaccagcctgcattcttgagctgggtggaaggcaggcattttagtgatcaaggtgaaaatgtggctgaaattaacagacaagttggtcaaaaacttggactctcaaatgggggacaggagctgcatgctgtttcccttgaacaacatcttctagatcaaattcgaatagtttttccaaaagccatttttcctgtttgggttgatcaacaaacgtacatatttatccaaattgttgcactaataccagctgcctcttatggaaggctggaaactgacaccaaactccttattcagccaaagacacgccgagccaaagagaatacattttcaaaagctgatgctgaatataaaaaacttcatagttatggaagagaccagaaaggaatgatgaaagaacttcaaaccaagcaacttcagtcaaatactgtgggaatcactgaatctaatgaaaacgagtcagagattccagttgactcatcatcagtagcaagtttatggactatgataggaagcattttttcctttcaatctgagaagaaacaagagacatcttggggtttaactgaaatcaatgcattcaaaaatatgcagtcaaaggttgttcctctagacaatattttcagagtatgcaaatctcaacctcctagtatatataacgcgtcagcaacctctgtttttcataaacactgtgccattcatgtatttccatgggaccaggaatattttgatgtagagcccagctttactgtgacatatggaaagctagttaagctactttctccaaagcaacagcaaagtaaaacaaaacaaaatgtgttatcacctgaaaaagagaagcagatgtcagagccactagatcaaaaaaaaattaggtcagatcataatgaagaagatgagaaggcctgtgtgctacaagtagtctggaatggacttgaagaattgaacaatgccatcaaatataccaaaaatgtagaagttctccatcttgggaaagtctggcctaaagacataagtgaagaagacataaaaactgtattttattcatggctacagcagtctactaccaccatgcttcctttggtaatatcagaggaagaatttattaagctggaaactaaagatggtccttctagatcctatggtaaaagaagaaaacaaggagtgaattccttaggcgtatcctccttggagcacatcactcacagcctcctgggacgccctttgtctcggcagctgatgtctcttgttgcaggacttaggaatggagctcttttactcacaggaggaaagggaagtggaaaatcaactttagccaaagcaatctgtaaagaagcatttgacaaactggatgcccatgtggagagagttgactgtaaagctttacgaggaaaaaggcttgaaaacatacaaaaaaccctagaggtggctttctcagaggcagtgtggatgcagccatctgttgtcctgctggatgaccttgacctcattgctggactgcctgctgtcccggaacatgagcacagtcctgatgcggtgcagagccagcggcttgctcatgctttgaatgatatgataaaagagtttatctccatgggaagtttggttgcactgattgccacaagtcagtctcagcaatctctacatcctttacttgtttctgctcaaggagttcacatatttcagtgcgtccaacacattcagcctcctaatcaggaacaaagatgtgaaattctgtgtaatgtaataaaaaataaattggactgtgatataaacaagttcaccgatcttgacctgcagcatgtagctaaagaaactggcgggtttgtggctagagattttacagtacttgtggatcgagccatacattctcgactctctcgtcagagtatatccaccagagaaaaattagttttaacaacattggacttccaaaaggctctccgcggatttcttcctgcgtctttgcgaagtgtcaacctgcataaacctagagacctgggttgggacaagattggtgggttacatgaagttaggcagatactcatggatactatccagttacctgccaagtatccagaattatttgcaaacttgcccatacgacaaagaacaggaatactgttgtatggtccgcctggaacaggaaaaaccttactagctggggtaattgcacgagagagtagaatgaattttataagtgtcaaggggccagagttactcagcaaatacattggagcaagtgaacaagctgttcgggatatttttattagagcacaggctgcaaagccctgcattcttttctttgatgaatttgaatccattgctcctcggcggggtcatgataatacaggagttacagaccgagtagttaaccagttgctgactcagttggatggagtagaaggcttacagggtgtttatgtattggctgctactagtcgccctgacttgattgaccctgccctgcttaggcctggtcgactagataaatgtgtatactgtcctcctcctgatcaggatggaagttccagctctgatagtgacctaagtctgtcttcaatggtctttcttaaccatagcagtggctctgacgattcagctggagatggagaatgtggcttagatcagtcccttgtttctttagagatgtccgagatccttccagatgaatcaaaattcaatatgtaccggctctactttggaagctcttatgaatcagaacttggaaatggaacctcttctgatttggaggacgaatccatgaaccaaccaggaccaatcaaaaccagactggctattagtcagtcacatttaatgactgcacttggtcacacaagaccatccattagtgaagatgactggaagaattttgctgagctatatgaaagctttcaaaatccaaagaggagaaaaaatcaaagtggaacaatgtttcgacctggacagaaattctttgatgaaatcactgagctgacatacctgccctcttttcaccataaagctgctcctcaccaggccgagccaggtcccaattcttcctcagcctctgctcccccaccctataatccttttatcacctcctctcctcacactcagtccggcttacagtttcgttctgtgactagccctcccccatctgcccaacaatttcctcttaaagaggtggctggagctaaaggcatagtcaagacagctttagagactgctcccacactagctctccctgtctcatcccaacccttttcattacacacagccgaagtgcagggctgtgcagtcggaattcttacacaaggaccgggaccatgccctgtagcctttttgtccaaacaacttgaccttactgttttaggctcgccatcatgtctccatgcggtagcttccgctgccctaatacttttagaggccctcaaaatcacaaactatgctcaactcactctctacagctctcacaacttccaaaatctattttctttctcacacctgacgcatatactttctgctccccggctccttcagctgtattcactctttgttgagtctcccacaattaccattcttcctggcccagacttcaatctggcctcccacattattctggataccacacctgaccctgatgattgtatgtctctgatctacctgacattcaccccatttccccatatttccttcttttctgttcctcatgttgatcacatttggtttactgacggcagttccaccaggcctgatcgccactcaccagcaaaggcaggctatgctatagaatcttccacatccatcattgaggctactgctctgcccccctccactacctctcagcaagccgaactgattgccttaactcgggccttcactcttgcaaagggactacacgtcaatatttatactgactctaaatatgccttccatatcttgcaccaccatgctgttatatgggctgaaagaggtttcctcactacgcaagggtcctccatcattaatgcctctttaataaaaactcttctcaaggctgctttacttccaaaggaagctggagtcacacactgcaagggccaccaaaaggcgtcagatcccattactctaggaaatgcttatgctgataagggtgtccgctgtgctcctgatccagcgaggcgcccattgccgctcccaattgggctaaaggcttgccattgttcctgcacggctaaaattggaggaaaataccgggcacttgtcggccagttaaaaacgattagtgtggccaccggacttaagactcaggacaggacgatagatggttcctcccaggtgattgaggaaaaaaaccacaatgggtattcagtaattgatacggggactcttgtggaagcagagttagaaaaattgcctaataactggtctcctcaaacgtgtgagctgtttgcactcagccaagccttaaagtacttacagaatcaaaagactatctcaatcctgattcaaaaggaacccagcccagctctaggactcacccctgagcgcaaaggcaatgttgggcatgctggtaaaggaccactagaatccagcagcccagacccctttctttgtggtcaagaaaggcgggaaaaggggtgcaggactgctacatcggtaagcataactaatccgataaacagaggtccatgggtggttacgcaccctggaaaggaactcacccctgagcacaaaggcaatgttgggcacgctgggagagacattctagcaaaagcaggggccattatacacctgaacataggagaaggaacacccgtttgttgtcccctgcttgaggaaggaattaatcctgaagtctgggcaacagaaggacaatatggacgagcaaagaatgcccgtcctgttcaagttaaactaaaggattccacctcctttccctaccaaaggcagtaccccctcagacccaaggcccaacaaggactccaaaagattgttaaggacctaaaagcccaaggcctagtaaaaccatgcagtaacccctgcagtactccaattttaggagtacagaaacccaacagacagtggagaaaccttgtgccatcaagccacccaagcgctcttcaatttcctcgctacctgtggctacatggtttccaaaccaaaggctcaactctgctcacagcaggttacttagggctaaaattatccaaaggcaccagggccctcagtgaggaacacatccagcctatactggcttatcctcatcccaaaaccctaaagcaactaaggggattccttggcgtaataggtttctgccgaaaatggattcccaggtatggcgaaatagccaggtcattaaatacactaattaaggaaactcagaaagccaatacccatttagtaagatggacaactgaagtagaagtggctttccaggccctaacccaagccccagtgttaagtttgccaacagggcaagacttttcttcatatgtcacagaaaaaacaggaatagctctaggagtccttacacagatccgagggatgagcttgcaacctgtggcatacctgactaaggaaattgatgtagtggcaaaggtggtggcagtagcagtcttagtatctgaagcagttaaaataatacagggaagagatcttactgtgtggacatctcatgatgtgaatggcatactcactgctaaaggagacttgtggctgtcagacaactgtttacttaaatgtcaggctctattacttgaagggccagtgctgcgactgtgcacttgtgcaactcttaacccagccacatttcttccagacaatgaagaaaagataaaacataactgtcaacaagtaatttctcaaacctatgccactcgaggggaccttttagaggttcctttgactgatcccgacctcaacttgtatactgatggaagttcctttgtagaaaaaggacttcgaaaagtggggtatgcagtggtcagtgataatggaatacttgaaagtaatcccctcactccaggaactagtgctcagctagcagaactaatagccctcacttgggcactagaattaggagaagaaaaaagggcaaatatatatacagactctaaatatgcttacctagtcctccatgcccatgcagcaatatggaaagaaagggaattcctaacttctgagagaacacctatcaaacatcaggaagccattaggaaattattattggctgtacagaaacctaaagaggtggcagtcttacactgccggggtcatcagaaaggaaaggaaagggaaatagaagagaactgccaagcagatattgaagccaaaagagctgcaaggcaggaccctccattagaaatgcttataaaacaacccctagtatag

SEQ ID NO: 9412 - DNA, 1660 bp, Homo sapiens
  SIMILAR (2)..(994): 721254mologous to multiple sclerosis associated retrovirus polyprotein,accession number AF009668,Smith-Waterman Score=1188.
gcagtacccccttagacccaaggcccaacaaggactccaaaaaactgttaaggacctaaaagcccaaggcctagtaaaaccatgcagtagcccctgcaatactccaactgtaggagtacagaaacccaacggacagtggaggttagtgcaaaatctcaggattatcaatgagactgttgttcctctatacccagctgaacctaacccttatactctgctttcccaaataccagaggaagcagagtggtatatagtcctggaccttaaggatgccttcttctgcatccctgtacatcctgattcccaattcctgtttgcctttgaagatccttcaaactcaacgtctcaactcacctggactgttttacgccaagggttcagggatagcccccatctatttggccaggcattagcccaagatttgagccaattctcatacctggacactcttgtcctttggtatgtggatgatttacttttagccacctgttcagaaaccttgtgccatcaagccacccaagtgctcttaaatttcctcaccacctgtggctacaaggtttccaaaccaaaggctcagctctgctcacagcaggttaaatacttagggctaaaattatccaaaggcttgagggccctcagtgaggaacacatccagcctatactggcttatcctcttcccaaaaccctaaagcaactaagagggttccttggcataacaggtttctaccgaatgtggattcccaggtacagcaaaataggcagatcattatatacactaattaaagaaactcagaaagccaatacccatttagtagtggtggcagtagcagtcttagtgtctgaagtggttaaaatgatacagggaagagatcttactgtgtggacatctcatgatgtgaatgccatactcactgctaaaggagacttgtggctgtcagacaaccgtttacttaaatatcaggctctattacttgaagggccagtgctgcaactgcgcacttgtgtaactcttaacccagtcacatttcttccagacaatgaagaaaagatagaacataactgccaacaagtaattgctcaaacctatgccgctcgaggggactttttagaggttcccttgactgatccccacctcaacttgtatactgatggaagttcctttgtagaaaaaggacttcaaaaagtggggtatgcagtggtcagtgataatggaatacttgaaagtaatcccctcactccaggaactagtgctcagctggcagaactaatagccctcactcgggtactagaatcaggagaaggaaaaagggtaaatatatatacagactctaagtgtgcttacctagtcctccatgcccatgcagcaatatggagagaaagggaattcctaacttccgagggaacacctatcaaacatcaggaagccattaggaaattattattggctgtacagaaacctaaagaggtggcagttttacactgccggggtcatcagaaaggaaaggaaagggaaatacaagggagccaccaagttgatattgaagtcaaaagagccacaaggctggaccctccattagaaatgcttataggaggacccctagtatggggtaatcccctccgggaagccaagccccagtactcagcaggagaaatagaatag

SEQ ID NO: 9413 - DNA, 834 bp, Homo sapiens
  SIMILAR (516)..(560): 731254mologous to multiple sclerosis associated retrovirus polyprotein,accession number AF009668,Smith-Waterman Score=54.
atgtgctcctggaccgctcccgtatcgagcatcctcacccacccaaattggcctgtccttagaatggctggccttacgggttgtgcctctgtagcaatgaagaaaaaaatagaacataactgtcaacaagtaattgctcaaaccttcaccactcgaggggaccttctagagattcccttgactgatcctggcctcaacttgtatactgatggaagttcctttgtagaaaaaggacttcgaaaagcggggtatgcagtggtcagtgataatggaatacttgaaagtaatcccctcactccaggaactagcgctcagctggcagaactaatagccctcacttgggcaccagaattagaagaaggaaaaagggtaaaaaggaaaaaggcaatatggagagaaagggaattcctaacttccgagggaacacctatcaaacatcaggaagccattaggagattattattagctgtacagaaacctaaagaggtggcagtcttacactgtcggggtcatcggaagggaactgccaagtggatattgaagccaaaagagccacaaggagtcaagtggccagaggtcacaaaatttgtgacttccccagttgctcctatagataacatcactattgtagaacctaagattggtcagcacagcttacatgaaaccacgcaagtaaaggaaagaaagtgctttagagggcaggttccatttgacacaagcagcacaggaagccgtacacttttgatgacagtaattcaaaaagtatattcatttgagtttctcaataaacgctttgagagaaaaggctttaatgttgattcagatgagtgttaa

SEQ ID NO: 9414 - DNA, 842 bp, Homo sapiens
  misc_feature (1)...(842): n = a,t,c or g
caccttaaggntttcccnggtacccttgtagggaattaagggaataaataaggttcctttcctccaaccattttccctaaggaccatagccagttacagtttcctgctggagttatcntaaaaaaaggacataccaggataaattttctatcatattgaaataaaacttagcattaaagcttttaccttctgtctttgtgcttttagattggcaactgtggtcaatcagtgctgcactggaatttccaactcagcaggggaaagaatctaattaaaaatgacacacactctgtattttgtcctttagaaaacagaaactgcttgtcgatatcccttaaaaagtgccaatggcccttcttggtccatttctttgtaaaagtctgagatgttgtttctaaacagcacagcttacatgaaaccacgcaagtaaaggaaagganaagtgcttttagaggggcaggttcccatttgacacaagcagcacaggaagccggtaccacttttgatgacagtaattcaaaaagtatattcagtttgagtttctcaataaacgctttgagagaaaaggctttaatgttgattcaggatgagtgttaaaataaagcgtttcgttttcgtgaaattagattattggggtaaaccaagccagattatctctggagatgacagaagccataattattttgggaaatttcaatcactgttttggaattgatacctaaggctttcttctcccctattatttatgggctttttaatgagatatttttctcggggagatgcttaggtaggaaatatcagcttttgaaagataaaggtacaattatcattagaatcaaaag

SEQ ID NO: 9415 - DNA, 438 bp, Homo sapiens
  SIMILAR (99)..(260): 751254mologous to Rattus norvegicus ribosomal protein S26,accession number X02414,Smith-Waterman Score=201.
  misc_feature (1)...(438): n = a,t,c or g
tcctgtttccattaatgcctcctactaatgttgtcttctctcatgtacagagcaaggtaggtatataatcccagtatcactctattttgtattcnttagcctatgtgcttcccaagctgtatgtgaagctacatgactgtgtgagttgtgcaattcacagcaaagtagtcaggaatcgatctcgtgaagcccgcaaggaccaacaccccccactccgatttagtcctgcggtgagtattttaaaaggagaatggaagccaggggagtgatggttaatatctcatcctggagggtcagggtgtcctatannnnnnnnnnnnnnnnnnnnnnnnnntgggccaagaagattgctagaaaccagcagttnnnnnnnnnnnnnnnnnnnnnnnnnnngagaaggaagccaagcatgatagtgtgatcctatagtctggctgc

SEQ ID NO: 9416 - DNA, 1401 bp, Homo sapiens
  SIMILAR (1)..(345): 991254mologous to Rattus norvegicus ribosomal protein S26,accession number X02414,Smith-Waterman Score=607.
atgacaaagaaaagaaggaacaatggtcgtgccaaaaagggccgcggccacgtgcagcctattcgctgcactaactgtgcccgatgcgtgcccaaggacaacgccattaagaaattcgtcattcgaaacatagtggaggccgcagcagtcagggacatttctgaagcgagcgtcttcgatgcctatgtgcttcccaagctgtatgtgaagctacattactgtgtgagttgtgcaattcacagcaaagtagtcaggaatcgatctcgtgaagcccgcaaggaccgaacacccccacctcgatttagacctgcgggtgctgccccacgtcccccaccaaagcccatgtcaggcgctggtcggggcaggagccacctggatgaggggagagagggtgcaggagatgaggtgggagagttaagtctgcagcaggagattgacaaggaccctctgggtggtgcactgggggcaggatccaggggaacaaagacaacagggatgcaggcaggcattggaggaggagagcaggtgctcgtcttttgggatagctccttgcccgctgttgtagacagctgcttccatccagtgccctctccagacaccagcgctgctctcagctggtgccttttgtcattttcacgtacaccccagcagccgagtcctggcaattttaggcctgagcacttgcctcttctcttcctcagtaccgtcctaccccagtctgtggcccagacccaggcaagtggtaaatatttaccttcacgctggagccaagatcgctgcggggagtcccgtgaagcaccactgccctctaagaccttggaaggggaaacaccagaaggtgtgggtgctgagctccgctgcgtcagactgccaggacctgagtggaactcagtgctgaaacctgggttctcactgcagctggatagcagctctgcccggatggccctagtcttcgtgtacggcaccctgaagcggggtcagcccaaccacagggtcctgcgggacggcgcccacggctccgcagcctttcgggcgcgcggccgcacgctggagccctacccgttggtgatcgcgggggagcacaacatcccgtggctgctgcacctgcccggctcggggcgcctcgtggagggcgaggtctacgcggtagacgagcggatgctgcgctttctggatgacttcgagagttgcccggccctgtaccagcgcacggtgctgcgggtacagctgctggaggaccgggccccgggcgcagaggagccgccagcgcccaccgcggtgcagtgcttcgtgtacagcagggccaccttcccgccggagtgggcccagctcccgcaccatgacagctacgactccgaggggccgcacgggctgcgctacaacccccgggagaacagataa

SEQ ID NO: 9417 - DNA, 1152 bp, Homo sapiens
  SIMILAR (271)..(1143): 931254mologous to Homo sapiens similar to mouse heat shock protein 105 kDa beta,accession number D86956,Smith-Waterman Score= 1426.
atgacaaagaaaagaaggaacaatggtcgtgccaaaaagggccgcggccacgtgcagcctattcgctgcactaactgtgcccgatgcgtgcccaaggccaacgccattaagaaattcgtcattcgaaacatagtggaggccgcagcagtcagggacatttctgaagcgagcgtcttcgatgcctatgtgcttcccaagctgtatgtgaagctacattactgtgtgagttgtgcaattcacagcaaagtagtcaggaatcgatctcgtgaagcccgcaaggaccgaacacccccactcgatttggcaaatgaaaaaaaagttgaccagcctccagaagctaaaaagcccaaaataaaggtggtgaatgttgagctgcctattgaagccaacttggtctggcagttagggaaagaccttcttaacatgtatattgagacagagggtaagatgataatgcaagataaattggaaaaagaaaggaatgatgctaaaaatgcagttgaggaatatgtgtatgagttcagagacaagctgtgtggaccatatgaaaaatttatatgtgagcaggatcatcaaaattttttgagactcctcacagaaactgaagactggctgtatgaagaaggagaggaccaagctaaacaagcatatgttgacaagttggaagaattaatgaaaattggcactccagttaaagttcggtttcaggaagctgaagaacggccaaaaatgtttgaagaactaggacagaggctgcagcattatgccaagatagcagctgacttcagaaataaggatgagaaatacaaccatattgatgagtctgaaatgaaaaaagtggagaagtctgttaatgaagtgatggaatggatgaataatgtcatgaatgctcaggctaaaaagagtcttgatcaggatccagttgtacgtgctcaggaaattaaaacaaaaatcaaggaattgaacaacacatgtgaacccgttgtaacacaaccgaaaccaaaaattgaatcacccaaactggaaagaactccaaatggcccaaatattgataaaaaggaagaagatttagaagacaaaaacaattttggtgctgaacctcccacatcaggaatggtgaatgttacccctaatgaggaaaatttctgttaa

SEQ ID NO: 9418 - DNA, 401 bp, Homo sapiens
  SIMILAR (15)..(194): 981254mologous to Homo sapiens ribosomal protein S26,accession number X77770,Smith-Waterman Score=303.
tccgtgcctccaagatgacaaagattagaaggaacaatggtcgtgccaaaaagggccgcggccacgtgcagcctattcgctgcactaactgtgcccgatgcgtgcccaaggacaaggccattaagaaattcgtcattcgaaacatagtggaggccgcagcagtcagggacatttctgaagcgagcgtcttcgatggtaagtgggtcaccggcgcgaactgtgtgaggatcccagtatcttaaagccttcgcccaacttcgcccttttggaggctctgttcgttggagcctctcaggcaatttccacgtatttaaggttgttactggtagaagagaattctcttgtttgccgttttgattcttttctgggcagagggtgactttgtgatagagtgcacagcg

SEQ ID NO: 9419 - DNA, 806 bp, Homo sapiens
  SIMILAR (380)..(658): 411254mologous to Rattus norvegicus ribosomal protein S26,accession number X02414,Smith-Waterman Score=102.
  misc_feature (1)...(806): n = a,t,c or g
acataacctcgattttcttccgccatccggctaaatagtcccatgtgcactttgttccatggataaataaacactaggaacgcatttccaccctagatttcagcagaaatgctgaattgtaaaggaatatttgagtaaagtgagttgccgttcttgaagcccgtctcctaaggattctcccggtgtccgcgtagggatctcatgctatataggagggccctgccaggcaccgtcttcctctcttcggttcgttccttcaagattgccaaggaaaaggaaggaacaattggtcgtgcccaaaaaagggcccgcggcccacgtcagggggnngccncccttaaaatttttnccccngggnccntgccacctaactgtgccccgatgccgtgcgtcaagggacaaggcccattaagaaattcggtcattccgaaacatagtggaggccgcagcagttcagggacctttctgaagcgagcgtcttcgatgcctatbtbbcttcccaagctggtatgtgaagctacatttactgtgtgagttgtgcaattcacaagcaaaagtagtcaggaaatcgatcttcgtgaagcccggcaaagacccgaacacccccaccccgatttaggacctggcgggtgattgccccacggtccccccaccaaaagcccatgatctgggtccagaatactgcagacatcagacatgtgttaactgggtttgctgccggcaagccaccatccttgggaaggagttgtgtgggcaaatcaggaagttgccctctcagcagatgtctccaggatggctgccctcag

SEQ ID NO: 9420 - DNA, 455 bp, Homo sapiens
ttccccatccctgccatcaagacagagccatttgctgctgtccatccatgttatggctcaagggctcagacatggtatagggaagatgggagcagggaaagacatgaactgctgtgctgtgtgacaaggccaggggtgtcactgaggatgcaacaggaagcaggcaggtaggtgagagaagctggggaggcgggagatagagagttattctagcacagcagtgaatgaattcagtttgaatgaagcacagaagtaaatgtttggacagcggaaccaggtttcatgatctttgagttgtcctcataacatgttggaactaggtattgaaaagtctgaggtaatctgaagcttagaaaggcacaatctatcaagttaacttaaaggaaaggaaggtgttaacaaaattagaaagtgctgttttagaaacagccctagatattttccaaaaaaaaaaa

SEQ ID NO: 9421 - DNA, 516 bp, Homo sapiens
  SIMILAR (88)..(153): 631254mologous to Homo sapiens Human secreted protein encoded by gene 111 clone HPEBT80,accession number Y02760,Smith-Waterman Score=61.
aattgacacaaaattatacatatttctggtgtacaatgagatgtttgatatacattgtacaaggatcaaatcagggtaattaacaaatccaccacctcaaacattaatcatttctttgtagtaaaaacattcaaaatcctctcttctagctatcaagttattttgtaatttgtgtaatattctggtaaaacggcctaaactggggtcatatttcctcatcagccgcattctgctaatgccagatgccctgggaagatcttcactgccatcttggaaggatgcagaatgtggtgatgaggaagccattctcccaggtacagcaaaggcagagtctgttgggcaacccacctgaagggcagtagactttctaaatagcgagttgaggtccatgtgggtgaagctaaaacccagaacacttttactggctaaaaatcatgatgattcaaaactcaaaccttcacatggatgcacccaaagtgaatcaacaaaatttaaagtcctttgaatagatcaatc

SEQ ID NO: 9422 - DNA, 726 bp, Homo sapiens
gagacggagtctcgctctgtcgcccaggccggactgcggactgcagtggcacaatctcggctcactgcaagctccgcttcccgggttcacgccattctcctgcctcagcctcccgagtagctgggactacaggcgcccgccaccgcgcccggctaattttttgtattttttagtagagacggggtttcaccttgttagccagatggtctcgatctcctgacctcatgatccacccgcctcagcctcccaaagtgctgggattacaggcgtgagccaccgcgcccggccgcaaaatctattttttaaagtgaggtgcccagaatgaagaaaagatggatggggacccttccctccctcaagcaggtcagattgctgggaatgatggtccaggctcctggcccccatcctttcctgtcaaggctacacctaagtgaggctatcaagttattttgtaatttgtgtaatattctggtaaaacggcctaaactggggtcatatttcctcatcagccgcattctgctaatgccagatgccctgggaagatcttcactgccatcttggaaggatgcagaatgtggtgatgaggaagccattctcccagtgacacccctggccttgtcacacagcacagcagttcatgtctttccctgctcccatcttccctataccatgtctgaacccttgagccataacatggatggacagcagcaaatggctctgtcttga

SEQ ID NO: 9423 - DNA, 694 bp, Homo sapiens
  SIMILAR (29)..(274): 531254mologous to Homo sapiens Human histiocyte-secreted factor HSF,accession number R96800,Smith-Waterman Score=175.
aacatgggaaaatattttattttattttattttatttttatttttttatttttttgagacggagtctcgctctggtcgccccaggccggcctgactgcggactgcagtgtgcgcaatctcggctcactgcaagctccgcttcccgggttcacgccattctcctggcctcagcctcccgagtagctgggactacaggcgcccgcaaccgcgcccggctaatttttttttttttgtattttttttagtaaaaacggggtttcaccttgttagccagggatggtcctcgatctcctgacctcatgatcccaccccgcctcggccttccaaagtgctggggattataggcgtgagccaccggcgcccggccattactttgcaattttaattaatgatgtgatctagtctccatctctctattccatttgggaaaaatcaattagatcaatgttaaaataaattttaaaataacagaattctatacataaaatgaaatgtctttcttatctttaaagaataagaatataaacattccctcatttcatgtttttaattttgacctttcctgtctcttccctaccctgcattttaataactttaataaataaattttataaatgaacttttttgaatgaaaaatctgataactttctccttctccaactctattctctaccttcacccctgcacacttccc

SEQ ID NO: 9424 - DNA, 483 bp, Homo sapiens
  SIMILAR (394)..(477): 351254mologous to Arabidopsis thaliana putative RING zinc finger protein,accession number AC011708,Smith-Waterman Score=48.
atggggaggagttttttggggggtgggagcacgctgatgcttcttggtggaggccagttgcacattcttacaccttcgtttccttcctggacagaaactggcaattacacctgtgaattctgcggcaaacagtacaagtactacactccctaccaggagcatgtggccttacacgcccccatcagaaactcagccaaagatgaccaccgctcagcttcaattctttctgaaaataggggaagccatcaatacatgccagttgtcatcatcattatcattgtcattattaccaccagcatcaccattgccttcatcaccattcttatcatcatcatcattgtcaccaccacagagggatgtggagaaactgggatactgtcctctggatacatcaaactcaacctgtccaagactgaaactgtcatctcctcataccctaaacgtgctccctctccagggtgtccctcccaccttctggcataa

SEQ ID NO: 9425 - DNA, 537 bp, Homo sapiens
  SIMILAR (51)..(101): 641254mologous to Homo sapiens nucleophosmin,accession number M23613,Smith-Waterman Score=64.
atggcagaaggcaaaggagaagcaggcaccttcttcacaggcggcaggacagacagtctgcccctggaagtggtagcaagattccacagaaaagaagtaaaacttgctgctgatgaagatgatgatgatgatgatgaagaagatgattttgatgatgaggaaactgaagaagcgccagtgaagaaatctatacaagacactccagccagaaatgcacaaaagtcagatcagaatggaaaagtctcaaaaccatcatcaacaccaagatcaaaaggacaagaatcctttaaaaaacaggaaaagactcctaaaacacccaaaggacctcgttctgtagaagacattaaaacaaaaatgcaagcaagtatagaaaaagcacatggaacagtcctgggcactactgttggaaacatccctctgagaggagggaatcaagaaaagtttcatggagcagctggtgtttggtttgggaaatttggagttcagaggaaaatccaacagaagcagttgcagaaggatgtcacctccggctcctga

SEQ ID NO: 9426 - DNA, 943 bp, Homo sapiens
  SIMILAR (2)..(595): 531254mologous to Homo sapiens nucleophosmin,accession number M23613,Smith-Waterman Score=452.
aaggtaagagtgtggtccagggccagtgcattatagtggacagcatatagtatctgtggaggaagatgcagagtcagaagatgaagaggaggaggatgtgaaactcttaagtatatttggaaagcggtctgcccctggaggtggtagcaaggttccacagaaaaaagtaaaacttgctgttgatgaagatgatggcgatgatgatgaagaggatgatgatgaagatgatgatgatgatgattttgatgatgaggaagctgaagaaaaagcgccagtgaccgaaatctatacgagatactccagccaaaaatgcagcgaaagtcaaatcagaatggaaaagactccaaaaaccatcatcaacaccaagatcaaaaggacaagaatccttcaaagaaacaggaaaaaactcctaaaacccccaaaaggacctaagttctgtagaagacattaaagcaaaaatgcaagcaagtatagaaaaaggtggttctcttcccaaagtggaagccaaattcatcaattatgtgaaggattgctttccggatgactggaccaagaggctatttcaagatctctgggcagtgggaggaagtctctttaagaaaatagtttaaacaaattgtttaaaaaatttcccgtcttatttcatttctgtaacagttgatatctggctgtcctttttataattgcagagtgagaactttccctaccgtgtttgataaatgtttgtccaggttctatttgccaaggaattgtgttgtcccaaaatgcctgtttaagttttaaagatggaacttcacccctttgcttggttttaagtatgtatggaatgttatgataggacatagtagtagcggtggtcagacatgggaaatggtgtgggagacaaaaatatacatgtgaaataaaactcagtattttaataaagtaaaaaaaaaaaaaaaaa

SEQ ID NO: 9427 - DNA, 2197 bp, Homo sapiens
  SIMILAR (2)..(1264): 911254mologous to Homo sapiens RAB-R protein,accession number AF015042,Smith-Waterman Score=1951.
gagagggctgaacccccctcatcgtgtcaagtcaatctccatgacaactttcactgagcctgaagtagtattcctgcaatcccgtggaaatgaggtgagctgccaccgatggagtggtgagaaggtcacctatctgcaggtttgccggaagatttggttgggtctgtttgatgctcggacatctttagtaccagattccagggatcctcagaaagtgaaggagtttctccaggaaaaatatgagaagaagagatggtatgtccccccagaccaagtcaaggggcccacttataccaaaggcagtgcctccacccctgtgcagggctccatcccagaagggaagccccttcggacacttctgggtgatcctgcaccgtctctctcagttgctgcctccacctcgagccagcccgtcagtcagtctcacgctcggacatcccatgcccggagcactcagccacctccccactcctctgtcaaaaaagccagtactgacctgctggctgacatcggtggagacccctttgctgcaccccagatggcaccagcttttgctgcattccctgcctttgggggccagacaccttcccaaggaggctttgccaactttgatgcctttagcagtggccccagctcttctgtgtttggaagcctccctccagctggtcaagcctcgttccaggcccagccaactcctgcagccagtcggatgctaactgaaagttacagctttgggagcagccaggggactccatttggtgccactcccctggcacccgccagtcagccaaacagcctcgcagacgtgggcagcttcctgggacccggggtgcccgctgcaggtgttcctagcagcctcttcgggatggctggccaggtccccccgctccagtctgtcacgatgggcggcggcggcggcagcagcacagggctggcctttggagccttcactaaccctttcacagctcccgccgcccagtccccgctgccttccaccaacccgttccagcccaatggcttggcgccagggcccggctttgggatgagcagtgctgggcctggcttcccccaggcagtgccacccactggggcctttgccagctccttcccagcaccgctgttccccccgcagaccccgcttgttcagcagcagaatggctcttccttcggggacttaggatcagccaagttggggcagaggccactgagccagccagctgggatctccaccaaccccttcatgagctctggtgaccacttgcctgtgggcatttctatgggccttggggatggtggaggtgctaatgctttgcttggggcctacagctcttccctgggcctagctcgccagcgctgtgctcctcatggacgggagcgcagtggggaagcccacaaggactccagcctgctggctggtgagagctggatgagcagtaagaagttaacgccagggaccatgctctgcagacagcagtcctctagcatggccccagcattcagccagtcggtcacctgtgggccatccccatgtgtgaggaagcaggagtcagccaccaagtgtctccacatcggagcttgcggcacccaaggttcagtgacacagggtggtttggagctggtcactgtcatagcagctgtgatttcacaaggaagggtgctgcagggggacctggttgatggggagtgggaaggggaaggaataaagagatcttcctcaggcaccttacttgccttgggtgatatctcagggtcctctaaggtcccaccaggtgtcacctgctggtttgtctggtgcaccttcacccccatccccttggaggggacacgagacccagccgtctctgcctcttctgcagccactttattgccttcgcccctgaatgaagcccgcaggcggcggccccggggagagccgggaatggccgccgtgcccctcagccagccgctgccctgggcctgccctgccgacgtgcggttctgcggccacctgcgcgcagacccgccgcgtcccgagtgttccgagagcgagcagaagtttcgcgcgtgccgagcgcggctccagcgcagcctgagcctggcgggtgcgtgcaccaccagcaagtgcgcagatgcgcgccagcaccacctgatcgtcctctacacccgcgacagcagcctgcgcgtggcggcggcaggcgaggcggagcagcaggcgtga

SEQ ID NO: 9428 - DNA, 2458 bp, Homo sapiens
  SIMILAR (61)..(696): 741254mologous to Homo sapiens RAB-R protein,accession number AF015042,Smith-Waterman Score=812.
  misc_feature (1)...(2458): n = a,t,c or g
agcgccattaccaatcgcgaacccgcctttttttttttttttttattaggaaaatgggcgatggtgatggcggcaaanaagggcccgggcccgggcggcggggtcagcgggggcaaggcggaggcggaggcggcctcggaggtgtggtgccgtcgggtgcgggagctgggtggctgcagccaggccgggaaccgccactgcttcgagtgcgcccagcgcggggtcacctacgtggatatcaccgtgggcagcttcgtgtgcaccacctgctccggcctcctgagagggctgaacccccctcatcgtgtcaagtcaatctccatgacaactttcactgagcctgaagtagtattcctgcaatcccgtggaaatgaggtttgccggaagatttggttgggtctgtttgatgctcggacatctttagtaccagattccagggatcctcagaaagtgaaggagtttctccaggaaaaatatgagaagaagagatggtatgtccccccagactaagtcaagggggcccacttttaccaaaggcagtgcctccacccctgtgcagggctccatcccagaagggaagccccttcggacacttctgggtgatcctgcaccgtctctctcagttgctgcctccacctcgagccagcccgtcagtcagtctcacgctcggacatcccaggcccggagcactcagccacctccccactcctctgtcaaaaaagccagtactgacctgctggctgacatcggtggagacccctttgctgcaccccagatggcaccagcttttgctgcattccctgcctttgggggccagacaccttcccaaggaggctttgccaactttgatgcctttagcagtggccccagctcttctgtgtttggaagcctccctccagctggtcaagcctcgttccaggcccagccaactcctgcagggagcagccaggggactccatttggtgccactcccctggcacccgccagtcagccaaacagcctcgcagacgtgggcagcttcctgggacccggggtgcccgctgcaggtgttcctagcagcctcttcgggatggctggccaggtccccccgctccagtctgtcacgatgggcggcggcggcggcagcagcacagggctggcctttggagccttcactaaccctttcacagctcccgccgcccagtccccgctgccttccaccaacccgttccagcccaatggcttggcgccagggcccggctttgggatgagcagtgctgggcctggcttcccccaggcagtgccacccactggggcctttgccagctccttcccagcaccgctgttccccccgcagaccccgcttgttcagcagcagaatggctcttccttcggggacttaggatcagccaagttggggcagaggccactgagccagccagctgggatctccaccaaccccttcatgactggaccctcatcaagcccattcgcctccaaacctccaaccaccaaccccttcttgtagcactgtgtttttggggggcctcttccctgccttctggggcccctctgctccctagagctctggtgaccacttgcctgtgggcattttctatgggccttggggatggtggaggtgctaatgctttgcttggggcctacaggtgaaaggtggctgccctcagattccacaaagcctctctcccctccctggtcccacccccacccaggcaggaagcccaggaggagtgcgggcagggcctgacctggaggagtgatggttaagggggagggatttttttcaaatgatcagggcccctgtggaacagcttttccctgggcctagctcgccagcgatgtgctcctcatggacgggagcgcagtggggaaggtaggggaaagatgaggcccagtgttgatggggcagtgacccagaccagtcctgagacccagaaggcccaggtggcccaagtgctcttggtggcccagcttggccagcacacacttttcctcctgcagcaccccctgctgaaggggtcccccattgttttgcttccccagcgcccaggatgagcggtttaccatcgagcttacccgggcccggctcctgtcaagcactttagttagctgttggtgtcatgtttggataccagtgttttatatttatacatagagaggattttctaatatagcctattatatataaatagatctatctatatgcacatacatacatatatacacacacccagccgatctcccgctcccagactgctctcgtatgtggggaatgggatgaatccccatctgtgcctcgaccatcaaagccggagctccagggctggagggggggcagccatgtgtcctgacccccaccatccccagagcctgggttttccagggaaaggctttgtgcaattgcctggtcttttttttttttttttttctccatgtgcctccctgtccccaaatctct

SEQ ID NO: 9429 - DNA, 553 bp, Homo sapiens
cctggattgttgaactcaatgcttgggtcacctccagattcattttcacagtctttcatgttttggtcatactacattgtattttgctgccatatgactgatctttttttgttaaatgtgagatacttgttaaaaaatatttaacaatgaattgaggcctagtagcatgttatcttgctgcagaagagatgggagtctacttctgggggatggtcaggggtcctccgtacaggctgcaattgaggtcgtctctgcaggctcagtccctacaaaggccagggtatttcctgtccacctctattctgatgcatgactcttctgggtctcaaccagagccagtggacttcagtatgggtcgctttcattggcagaccctcaatccacttgttttccatctaatcccacgcatgtgtgcaaaagctgctgtgcttctttgcatctcagtagttccttctggaattcagcaatgaaactcagggaaatgggttccaaatgcgaggctgactttcgtcctgggtttccttcttctccatcttcacctcatgtctgttta

SEQ ID NO: 9430 - DNA, 1548 bp, Homo sapiens
  SIMILAR (28)..(201): 791254mologous to Homo sapiens NAG13,accession number AF194537,Smith-Waterman Score=243.
atgagagaaaattcaaataaacacaatcagaatgataaagggatattaccactggaccccacagaaatacaaataaccatcagagaatattatgaacacctctatgcacataaactagaaaatctggaagaaattgataaattcctggacatatacaccctcccaagactgaatcaggaagaacttgaatccctgaacagaaaaccaaatactgcatgttctaatttaagagatgggagtctacttctgggggatggtcacgggtcctccatacaggctgcaattgaggtcgtcggtgcaggctcagtggctacaaagggcagggggagacaggacgacacagatcccagcaatcggtatcatcgccccccgtacagccaagaggaaaaagagcaatgtatcactctgctgctgagctggtgtctaggggattcccaaggcccccagtgcaggccccagctgagcctgcaggagctgcggagggagttcacagtcagcctgcatctcgccaggaagctgctctccgaggttcggggccaggcccaccgctttgtaagtccccctaatgcagctggcgctggagatgggcagacccccaatcccttctggcccccactaacagaccttgccccccaggcggaatctcacctgccaggagtgaacctgtacctcctgcccctgggagagcagctccctgatgtttccctgaccttccaggcctggcgccgcctctctgtgaagtgcaccgcagtacgggcgtaccaaactacacgtgtcgtagagacctcttcctgccggctccacgtgaagggagcaagcaacgcgagcacacacagatcaccgaaagaagtaacacaagggacaaacaagagcgaacgacgaacaagagagacacaaagagcaatccgggagcgtaacatggcaggttgctgcacatgtgccacggacgtgttggttacacttcagagcttgatggaaggcctggcattgcagccccaaaggacaagagcgctactccttggcagtgcgtcaatcaaagcgtcctgtgcggtgacaattattttaatgagcgaaaacttgggcaaaggctgttctaaaaagagtgaaggaatggtccggagatatgcaaaacataagaagcaagaaattaaaccatattaccagagaaaatcaccttcactagagagaggacaggaagaaaagaaagtgggaagagaagaccgagaaggatctgaaaaccaatatctatatggaccgtcgaacatttccgaggctcgaaatcgactgccagagtgtggacgcatggggctgggatatgtagcccggttattcttgggagacaggcgttcctctacaccgtcttttgcctcctacgatccttcaagcctcgtaacctacgggcatagacggtcttgccgcgtttcagatattcgggtgcctcgcctgggcccgaacgtcgggggtccatgcaaaggaacgggtatagacctccaatgtgagagagagaaaaagaacgaagaatattcagctcggaccttacagctgtag

SEQ ID NO: 9431 - DNA, 2518 bp, Homo sapiens
  SIMILAR (65)..(2122): 1001254mologous to Homo sapiens dystrobrevin-alpha,accession number U46744,Smith-Waterman Score=3545.
gaattccttcaaagaatatagatggttttgaaaagttcatgctgtcccttcattgaattttagaatgattgaagatagtgggaaaagaggaaataccatggcagaaagaagacagctgtttgcagagatgagggctcaagatctggatcgcatccgactctccacctacagaacagcatgcaagcttaggtttgttcagaagaaatgcaatttgcacctggtggacatatggaatgtcatagaagcattgcgggaaaatgctctgaacaacctggacccaaacactgaactcaacgtgtcccgcttagaggctgtgctctccactattttttaccagctcaacaaacggatgccaaccactcaccaaatccatgtggagcagtccatcagcctcctccttaacttcctgcttgcagcgtttgatccggaaggccatggtaaaatttcagtatttgctgtcaaaatggctttagccacattgtgtggagggaagatcatggacaaattaagatatattttctcaatgatttctgactccagtggggtgatggtttatggacgatatgaccaattccttcgggaagttctcaaactacccacggcagtttttgaaggtccttcatttggttacacagaacagtcagccagatcctgtttctcccaacagaaaaaagtcacgttaaatggtttcttggacacgcttatgtcagatcctcccccgcagtgtctggtctggttgcctcttctgcatcgactagcaaatgtggaaaatgtcttccatccggttgagtgttcctactgccacagtgagagtatgatgggatttcgctaccgatgccaacagtgtcacaattaccagctctgtcaggactgcttctggaggggacatgccggtggttctcatagcaaccagcaccaaatgaaagagtacacgtcatggaaatcacctgctaagaagctgactaatgcattaagcaagtccctgagctgtgcttccagccgtgaacctttgcaccccatgttcccagatcagcctgagaagccactcaacttggctcacatcgttgatacttggcctcccagacctgtaaccagcatgaacgacaccctgttctcccactctgttccctcctcaggaagtccttttattaccaggagcatgcttgagagttcaaaccggcttgatgaagaacacaggctaattgccaggtatgcggcaaggctggcagcagagtcctcttcgtctcagccacctcagcagagaagtgctcctgacatctctttcaccatcgatgcgaataagcagcaaaggcagctgattgctgagctagaaaacaagaacagagaaatcttacaggagatccagagacttcggctagagcatgaacaagcttctcagcccacgccagagaaggcacagcaaaaccccaccctgctggcagaactccggctcctcagacagcgcaaagatgagctggaacagagaatgtctgctctccaggagagccggagagagctaatggtccagttggagggtctcatgaagctactaaagactcaggggtcaggcactcaccgctcctcccgcagccactccatcagcaggccaattcccatgcccatccggtcagcgtcagcctgctccaccccgacgcacacgccgcaggactccctcacaggagtagggggagatgtacaagaggcatttgcacaaagttcaagaagaaacttaaggaatgacttgctagtggctgcagattccatcactaacactatgtcctctcttgtgaaagagctgaattctgaggttgggagtgaaacagagagtaatgtggattctgaatttgcacggactcagtttgaggatcttgttccctcaccaacctctgaaaaggcttttctagcgcaaatccatgcccgaaaacctgggtacattcacagtggagctaccacaagttccatgcgtggcgacatggttacggaggatgcagatccctatgtgcagcctgaagatgaaaactatgaaaatgactctgtccggcagctggagaatgagctccagatggaggaatacctgaaacagaagctgcaagatgaagcttatcaggtcagcttgcaaggttgaatgcaatatccttttatcacactcctctcaagcaagctatgtcagacagatgatgaaagtaacatgaaaactggtgatgatggagagccctgtggccacacagaggaggaagacagcagcctggcagcagcctcaccgaagagaggaaccaccacacccagcagctcctgacagacccccacccctaaagatgtgtcctgatgactatagtgcagctaactttttggttctcagatttgtaggtgcataggtgtgtgtttcaaggaaggaaaaaaaaagacttctgttcaaagttaacttatcagctacatcctctgtaacgtggttcatccctggttaaaaagcaaacaaacacaggctgaaaacccatgctgctgttatacacaatggcag

SEQ ID NO: 9432 - DNA, 913 bp, Homo sapiens
  SIMILAR (533)..(664): 901254mologous to Homo sapiens dystrobrevin isoform DTN- 1,accession number U84551,Smith-Waterman Score=210.
atgagcactttaaaaggcctgattataaaaattatcatcagtgtgatgatagccagtgaatttatattggaagaaaggataaaaacagggctgaatgctgctaagcactgctttgctgcaccttcccaagctgctagccacaccatcagcaggccaattcccatgcccatccggtcagcgtcagcctgctccaccccgacgcacacgccgcaggactccctcacaggagtagggggagatgtacaagaggcatttgcacaaagttcaagaagaaacttaaggaatgacttgctagtggctgcagattccatcactaacactatgtcctctcttgtgaaagagctgaattctgaggttgggagtgaaacagagagtaatgtggattctgaatttgcacggactcagtttgaggatcttgttccctcaccaacctctgaaaaggcttttctagcgcaaatccatgcccgaaaacctgggtacattcacagtggagctaccacaagtaccatgcgtggcgacatggttaccggggaatgcaaatccctatgtgcagcctgaagatgaaaactatgaaaatgactctgtccggcagctggagaatgagctccagatggaggaatacctgaaacagaagctgcaagatgaagcttatcagatgcctctggtacccactaagaaagagatccacatggaggacttcctgtcctctcttccagaaggtgcaatagcacagtgtcctaggactttcattcctgattgtcgtaggaaaggagcaagctatagtcagacagatgatgaaagtaacatgaaaactggtgatgatggagagccctgtggccacacagaggaggaagacagcagcctggcagcagcctcaccgaagagaggaaccaccacacccagcagctcctga

SEQ ID NO: 9433 - DNA, 2520 bp, Homo sapiens
  SIMILAR (2)..(2230): 1001254mologous to Homo sapiens dystrobrevin isoform DTN- 1,accession number U84551,Smith-Waterman Score=3841.
  misc_feature (1)...(2520): n = a,t,c or g
aatgattgaagatagtgggaaaagaggaaataccatggcagaaagaagacagctgtttgcagagatgagggctcaagatctggatcgcatccgactctccacctacagaacagcatgcaagcttaggtttgttcacaagaaatgcaatttgcacctggtggacatatggaatgtcatagaagcattgcgggaaaatgctctgaacaacctggacccaaacactgaactcaacgtgtcccgcttagaggctgtgctctccactattttttaccagctcaacaaacggatgccaaccactcaccaaatccatgtggagcagtccatcagcctcctccttaacttcctgcttgcagcgtttgatccggaaggccatggtaaaatttcagtatttgctgtcaaaatggctttagccacattgtgtggagggaagatcatggacaaattaagatatattttctcaatgatttctgactccagtggggtgatggtttatggacgatatgaccaattccttcgggaagttctcaaactacccacggaagttttggagggtccttcatttggttacacagaacagtcagccagatcctgtttctcccaacagaaaaaagtcacgttaaatggtttcttggacacgcttatgtcagatcctcccccgcagtgtctggtctggttgcctcttctgcatcgactagcaaatgtggaaaatgtcttccatccggttgagtgttcctactgccacagtgagagtatgatgggatttcgctaccgatgccaacagtgtcacaattaccagctctgtcaggactgcttctggaggggacatgccggtggttctcatagcaaccagcaccaaatgaaagagtacacgtcatggaaatcacctgctaagaagctgactaatgcattaagcaagtccctgagctgtgcttccagccgtgaacctttgcaccccatgttcccagatcagcctgagaagccactcaacttggctcacatcgttgatacttggcctcccagacctgtaaccagcatgaacgacaccctgttctcccactctgttccctcctcaggaagtccttttattaccaggagctctcctcccaaggacagtgaagtagagcagaacaaactgctggctagggctgctccagcttttctgaagggcaaagggatacagtacagcctgaatgtggcagacaggctagctgatgaacatgttctcatcgggttgtatgtcaacatgctccggaacaacccctcatgcatgcttgagagttcaaaccggcttgatgaagaacacaggctaattgccaggtatgcggcaaggctggcagcagagtcctcttcgtctcagccacctcagcagagaagtgctcctgacatctctttcaccatcgatgcgaataagcagcaaaggcagctgattgctgagctagaaaacaagaacagagaaatcttacaggagatccagagacttcggctagagcatgaacaagcttctcagcccacgccagagaaggcacagcaaaaccccaccctgctggcagaactccggctcctcagacagcgcaaagatgagctggaacagagaatgtctgctctccaggagagccggagagagctaatggtccagttggagggtctcatgaagctactaaagactcagggggcaggctctccccgctcctcccccagccacaccatcagcaggccaattcccatgcccatccggtcagcgtcagcctgctccaccccgacgcacacgccgcaggactccctcacaggagtagggggagatgtacaagaggcatttgcacaaagttcaagaagaaacttaaggaatgacttgctagtggctgcagattccatcactaacactatgtcctctcttgtgaaagagctgaattctgaggttgggagtgaaacagagagtaatgtggattctgaatttgcacggactcagtttgaggatcttgttccctcaccaacctctgaaaaggcttttctagcgcaaatccatgcccgaaaacctgggtacattcacagtggagctaccacaagtaccatgcgtggcgacatggttacggaggatgcagatccctatgtgcagcctgaagatgaaaactatgaaaatgactctgtccggcagctggagaatgagctccagatggaggaatacctgaaacagaagctgcaagatgaagcttatcaggtcagcttgcaaggttgaatgcaatatccttttatcacactcctctcaagcaagctatagtcagacagatgatgaaagtaacatgaaaactggtgatgatggagagccctgtggccacacagaggaggaagacagcagcctggcagcagcctcaccgaagagaggaaccaccacacccagcagctcctgacagacccccacccctaaagatgtgtcctgatgactatagtgcagctaactttttgttctcagatttgtantncatagntgtgtttttcaagaaggaaaaaaaaaaaaggaattca

SEQ ID NO: 9434 - DNA, 926 bp, Homo sapiens
  SIMILAR (619)..(473): 481254mologous to Homo sapiens Human cortexin-like protein,accession number B13343,Smith-Waterman Score=101.
tagagcaaggaaatctcttcctggccttgtcaccagattcatatgagatcctttctagtcttttattctttagtcagatcaggtggtgttttgtttgatggcaaatctatgtcagtattaacgctcttggtttcacaatcacacaattttaagagtactcattcattgagcaaacataaaaatttaaaccttcttatgttggattagttatataagtgtccatttccaacatcctcaaatgtctttaacccaactgcatatttatggaataatggattatggtcctgggaccaaatattgtttaaatttgatttgttgagaacactaaataaagggaatcctcaccaagacacaaagcacttcatctcctcaggaggagatcccacaccatccctcctaagcaagggcatggtcgaactgccctttctccaggccttcaagtccatcagcccaggtagaggttggcatgcttcgatatggatccaaaaagaatccggaagcaccggacaatgagaatgcccaagaaaataaacaacagaatcccaaaaacaaatgtcattttctgctccagggacatgctagaatctgctgatacgttcccaagggggactagggatgaggggatgggctgtcctccatccatggtccagggaagccagagcacaggatatcctggttttcttttcttccatcatcaatctgcggaggtcatggtggctgcactctggagaggctgagttatagccatattttaatcctgataggctttcctcatcacgcagtacatctgtgtcttccctttgtcaggtccatttgtgggtgctcaggaaatagagtctaattttaatagaagcccagcaggcgtagtcattgcagccagggtcattcacactcttagtcacttgctttagttttagtaattttca

SEQ ID NO: 9435 - DNA, 748 bp, Homo sapiens
  SIMILAR (5)..(745): 701254mologous to Mus musculus Pro-Pol-dUTPase polyprotein,accession number Y12713,Smith-Waterman Score=880.
cggccaagccactcactttatggctaaagaagtgtgacagtgggctcatgctcatggaattcactggtcttaccgtgttccccatcatcctgaagcagctggattgatagagtggtgggattgccttttgaagtcacgattacaatgccaactaggtgacaatactttgcaggcctggggcaaagttctccagaaggctgtgtatgctctgaatcagtgtccaatatatggtactgtttctcccatagacaggattcacgggtccaggaatcaaagggtggaagtggaagtggaagtggcaccactcaccatcacccctagtgatccactagcaaaatttttgcttcctggtctcacgacattatgttctgctggcctacaggtcttagttccagagggaggaatgctgccaccaggagacacaacaactattccgttaaacaggaagttaagattgccacctggacactttgggctcttcctacctttaagtaaacaggctaagatgagagttacagctttggctgtggtgattgacttggactatcaagatgaaatcagtctaccactccacaacggagataaggaagaatatgcaaggagtacaggagatccattagaacgtctcttagtattaccatgccctgtgattgaggtcaatgggaaactacaacagcacaatctaggcaggactacaaatggcccagaccctttaggaatgaaggtttgggtcagtccaccaggataa

SEQ ID NO: 9436 - DNA, 1503 bp, Homo sapiens
  SIMILAR (106)..(258): 701254mologous to Mus musculus Pro-Pol-dUTPase polyprotein,accession number Y12713,Smith-Waterman Score=199.
ctagtgcatcctgtttcggattacatcttgtctcctttctagctcagcacaatacagctgtctatttagcatgttgctcttcttatgccactccagaactctagatctttctctggatatgggtttgcctatcctgcacgcaacactttttccaagactaccatccatggactcaaagaatgccttatccaccatcatggtattccatccagcattgcctctgatcaaggcactcgctttttgcctaaagaagtgcaaaatgggctcatgctcatggaattcactggtcttaccatgttccccattatcctgaagcagcatcacccctagtgatccactagcaaaatttttgcttcctgttcccacgacattatgttctgctggcctagcagtcttagttccagagggaggaatgctgccaccaggagatgcaacaatgattccattaaacctgtcaagtcgctcgcaccttgggatgcccaccacctccctcaaggtcgttcgcatgtgctctaaagataagtacgtctgaacagtacaatctgttctgaaaacctgaacaatcttgtatttcaactgcaactgctgctccatcttccctgttgcttgtccaaagacaccagctactttctcccagccagttgctgtatctctccctggatgcatttgtagacccaggtgaacctgtatccgcttcactttctgctctgtctcttcactatgaggcgaaggctggcaagagagaaaggacccttcgctgtccttggctgcaaattttccagctaacactgtgcacaatccatctggccctttctttgagctttcatattttatctgactcccatgcacacgtgcacacattaataaattttgtatgccttttctcctattagtcaattgattttcagagaactttcggaaggtgaagcggaggtattctctttgcccctccgcagattgatgatggaagaaaagaaaaccaggatatcctgtgctctggcttccctggaccatggatggaggacagcccatcccctcatccctagtgccccttgggaacgaatcagcagattctagcatgtccctggagcagaaaatgacatttgtttttgtgattctgttgtttattttcttgggcattctcattgtccggtgcttccggattcttttggatccatatcgaagcatgccaacctctacctgggctgatggacttgaaggcctcaagatgctggccgggtcatttcctagtaaagcctgtaaaaagagaatccatttcctgcctttcccagcttctgatggctgcctgcattcgttactccatggctcatgttcccttccaccatcttcagcaccagtagtgtaacatcttctgtcctctctgaccccggctttgacctttacatcttctctttctgacttcaactcttgcaaccctccatcgcagactggcacaagtgatgaccccccatattcaagtttgtttcggaagcctggggtcat

SEQ ID NO: 9437 - DNA, 408 bp, Homo sapiens
  SIMILAR (359)..(228): 771254mologous to Homo sapiens Human PRO792 protein sequence,accession number Y41720,Smith-Waterman Score=197.
  misc_feature (1)...(408): n = a,t,c or g
acttcgcntgcgcctccccaagctccgccctcgtggtctgcagcagcgcntgcgtccccgagcccaggactccatctctggggtttcagacgctcccgccgcacacgccccgggcgcccaggcgcccggttctgcacacaccgtttgtcctcagcaggtcctggcagccgagcagcgccgcgcgctccgtggaggccttggacaataggatactcagaatcacagcccacagtactggcgaccaggacagccatggccaggaagaggggtctcgggctccagtgcacccagcgtccccagtgccctccggggacctcctcgtagctcccgccccagttgctgtacctggtggtgtctatggcggtgcaggcaccgagacctgggcagagatataaatttcaccctcgt

SEQ ID NO: 9438 - DNA, 618 bp, Homo sapiens
  SIMILAR (474)..(4): 881254mologous to Homo sapiens Human PRO792 protein sequence,accession number Y41720,Smith-Waterman Score=783.
tcagcagttgtgccttttctcacagatccagccgtccttctcgctgtcacacggtgcgtcgttccacagccccgtgtgcagcatcatgacacagttctcgcgcccccaagcgtcattgggctctccctggttccagtggctgaagctgagagagactccgtccacccactggtagccctgaaccttgcccagatggcgcacagccctcaggcccagccagtaaccacggccacgcgtgttccgagtgaggaagccctgctcatccaggcccccaacgatcaccaggtgcgcgctggcatctgcgcagtgatcctgcgccgccgcccacgtcgtctttggcacagagaaaaagtagcaggagccctcgaaggacagccacgacgtggggcacggctcgcaggagtcgcgctcacgcagttcccgcagggcgctctcctgctccatcagcttcgcctgcgcctccccaagctccgcgcgcgtggtctgcagctgcgcctgcgtccccgagccgtttgtcctcagcaggtcgtggccgtcaagcagcgccgcgcgctccgtggaggctccggggacctcctcggagctgccgccccacttgctgtacctggtggtgtccat

SEQ ID NO: 9439 - DNA, 412 bp, Homo sapiens
  SIMILAR (407)..(153): 821254mologous to Homo sapiens Human PRO792 protein sequence,accession number Y41720,Smith-Waterman Score=360.
aaggctctggaagtgaatcttcctgaagctgagtgggactcagtccacccacgagtagccctgaaccttgcgcaggtgttgcacggccctgcggccgatccagtattcacgggcactagtgtcacgactcaggaagtcctgctcccccaggccccctacatcgccagatgtgcgctggcatcggcgcagtggccctgcgcctctgcccacgtggtcttcggcacagagaaatagtagcaggagcccccgaagggcagccacgacgtagggcacggctcacaggaaccctcactgttctgcagcctcacggcctccagcgcccggtacagctcggtgctgacgtcctcgcggtccctgccggcttcagccaagccatgggtcacgcgctcacgcagttcccgcagggctctct

SEQ ID NO: 9440 - DNA, 1170 bp, Homo sapiens
  SIMILAR (529)..(741): 771254mologous to Homo sapiens Human PRO792 protein sequence,accession number Y41720,Smith-Waterman Score=254.
atgggcgcggcgaaccgcgtctcaggcttccatgcccgcaattcacaaggcttaggcgcgggtggccattccggagcttcccctgagggtctcggtgcctgcaccgccatagacaccaccaggtacagcaactggggcgggagctacgaggaggtccccggagggcactggggacgctgggtgcactggagcccgagacccctcttcctggccatggctgtcctggtcgccagtactgtgggctgtgattctgagtatcctattgtccaaggtcacgcgtgtgcacatggcgtgcacgtatgtgtgcgagtccccacgcgtttgtctcccatcggcgtgtgtgcacatagtgtgcgctatatgcctgcctgcccgcccgctctgtggtcccgagtcgggggaccccgcaccccccgggcaagggaaggatttccgagtccctggccttgcctgcaggagcctctctccgcagcctccacggagcgcgcggcgctgctcggctgccaggacctgctgaggacaaacggctcggggacgcaggcgctgctgcagaccacgagcgcggagcttggggaggcgcaggcgaagctgatggagcaggagagagccctgcgggaactgcgtgagcgcgtgacccatggcttggctgaagccggcagggaccgcgaggacgtcagcaccgagctgtaccgggcgctggaggccatctcggccagtgtcagtgaaaacccagagccctgcaaggagaaggcagttatacaagcccggcttcagcagaagtctgagaaaaatttgatacgacctctagctcggtacccagaggaggataagaattcgtgggacagtttgaatcttcctagaaacttggagggctcagaagacaggaagatgtggaaaagtttggaaattcccagagacttgttgaatggctttgaccaaaatgctgatagtgatatggacaatgaagtccaggctgacatggtctcagatgaatatggggaactttttgggaactggggtaatggtgactcttgctatgcaaagagactggcagcattttgctgctgccctagagatctgtggaactttgaacttgagaaagataatttatggtatctggtggaagaaacttctaagtggcaaagcatacaagaggaagcagagcattaa

SEQ ID NO: 9441 - DNA, 481 bp, Homo sapiens
  SIMILAR (23)..(139): 711254mologous to Homo sapiens ribosomal protein L37a,accession number X66699,Smith-Waterman Score=141.
  misc_feature (1)...(481): n = a,t,c or g
ctactgaaacctancgatgaggctatggaaaacccgggncgacccacgcgtccgggctggcggtgcctggacgtacaataccacttccgctgtcacggtaaagtccgccatcaaaagactgaaggagttgaaagaccagtagacgctcctctactctttgagacatcactggcctataataaatgggttaatttatgtaccnnnnnnnnnnnnnnnnnnnnnnnnnnnnnnnnnnnnnnnnnnnnnnnnnnnnnnnnnnnnnnnnnnnnnnnnnnnnnnnnnnnnnnnnnnnnctttaaaaaaaaatttggggggggccccaaatatccggggggggaaaaaannnnnnnnnnnnnnnnnggggggggaaaaaaaaacccccggggggtttttggagaaaaacttcttttttnnnnnnnnnnnttttgggccccccaccccccccacaaaattattctcctcgggggagaatataaatttt

SEQ ID NO: 9442 - DNA, 482 bp, Homo sapiens
  SIMILAR (48)..(260): 1001254mologous to Homo sapiens ribosomal protein L37a,accession number X66699,Smith-Waterman Score=387.
agcgccgttttttatgacggctatgagaatccggcacgagcggcgacatggccaaacgtaccaagaaagtcgggatcgtcggtaaatacgggacccgctatggggcctccctccggaaaatggtgaagaaaattgaaatcagccagcacgccaagtacacttgctctttctgtggcaaaaccaagatgaagagacgagctgtggggatctggcactgtggttcctgcatgaagacagtggctggcggtgcctggacgtacaagtaacctaagcaaacccaaatggaccaaatgcaacgctgatggaatctaagtgctcagaccaaggaacggggactgaaataacagtggacaccacatggcatgatccaatcagattgagccctggaaagatcatcccatggcaagatccagttagattacacttcctggcatcacctcattgcaagatccaagatcatgcctcattaccttctggctgta

SEQ ID NO: 9443 - DNA, 520 bp, Homo sapiens
  SIMILAR (47)..(325): 781254mologous to Homo sapiens ribosomal protein L37a,accession number X66699,Smith-Waterman Score=362.
cggacgcgtgggcggacgcgtgggctcggacctaggtcgcggcgacatggccaaacgtaccaagaaagtcgggatcgtcggtaaatacgggacccgctatggggcgctcgcgtccggaaaatggtgaagaaaattgaaatcagccagcacgccaagtacacttgctcttttctgtggcaaaaccaagatgaagagacgagctgtggggatctggtgctgtggttcctgcatgaagacagtggctggcggtgcctggacgtacaataccacttccgctgtcacggtaaagtccgccatcagaagactgaaggagttgaaagaccagtagacgctcctctactctttggagacatcactggcctattattaaaggggtaaattaatgtaccaaaatggcctggcctggtaaactttattagacattctgatgtttgcattgtgtaaatactgcttgtattggaaaagcatgccaatatggattattgtcaatcagtgtcttttttagtagtcaaatggtaca

SEQ ID NO: 9444 - DNA, 2686 bp, Homo sapiens
  SIMILAR (1876)..(2040): 601254mologous to Homo sapiens Secreted protein encoded by gene 15 clone HLWBZ73,accession number Y01397,Smith-Waterman Score= 141.
acgcgtcggccgcccacccttgccacccagacctacacacccacgaagaaaacctttaccaccaaataatgtcactggaaagccaggaagtgcaggaatcatttcatcaggcccaataactacaccacccctgaggtcaacacccaggcctactggaactcccttggagagaatagagacagatataaagcaaccaacagttcctgcctctggagaagaactggaaaatataactgactttagctcaagcccaacaagagaaactgatcctcttgggaagccaagattcaaaggacctcatgtgcgatacatccaaaagcctgacaacagtccctgctccattactgactctgtcaaacggttccccaaagaggaggccacagaggggaatgccaccagcccaccacagaacccacccaccaacctcactgtggtcaccgtggaagggtgcccctcatttgtcatcttggactgggaaaagccactaaatgacactgtcactgaatatgaagttatatccagagaaaatgggtcattcagtgggaagaacaagtccattcaaatgacaaatcagacattttccacagtagaaaatctgaaaccaaacacgagttatgaattccaggtgaaacccaaaaacccgcttggtgaaggcccggtcagcaacacagtggcattcagtactgaatcagcggacccaagagtgagtgagccagtttctgcaggaagagatgccatctggactgaaagaccctttaattcagactcttactcagagtgtaagggcaaacaatatgtcaaaaggacatggtataaaaaatttgtaggagtgcagctgtgcaactctctcagatacaagatttacttgagcgacttcctcacaggaaaattttataacataggtgatcagagggggccatggagaagatcactgccagtttgtggattcatttttagatggacgcactgggcagcaactcacttctgaccagttaccaatcaaagaaggttatttcagagcagttcgccaggaacctgtccaatttggagaaataggtggtcacacccaaatcaattatgttcagtggtatgaatgtgggactacaattcctggaaaatggtagatgctgcacaaagttaccttctgtttcatcattgcaaacaaaaatcattgaaaatactatgccgcattcatttaaaagctattttgtttactaatgtataaaagtctacaatctaaattaatagcaatacctagatgtttattattaagaaaagattgctgagagtatttatccaggttttacaaagtccattttaaagaaagccaagatactgatgttaaccagaataaccatttttggggaagctggctccctattcatggtattttaagagatcatttgtatattatttatcacactgttgtaatgatgttttgagatacttttataacaaaattaacatcaaaaaggtatatactttttaaaaaaaatttacttttattgatgtgtactcttcctattgatgagttaattccataaatctctacttagtttaacttattggatcaaattatcttcagcatgtatatctggggaaaaaaggtccgaattttcacatttatatttaaacttcaattttttatatttaaacttcaattttttagcaacagctgaatagctttgcggaggagtttaatagttacacattcatgctaatatacatttcctttaaacatccacaaattcttaaaaagattgaatcagtaaatttcatttcagctaaaaatggagtctaatatattgtttcaaaagatacatttttacccaccataaatgttacaatatctgaatatgctttgtcaaactatcccctttatgcaatcgtcttcatattgtttttatgattctaatcaagctgtatgtagagactgaatgtgaagtccaagtctgagcacaaaaagataatgcacgatgagattgcctaccgattttataggatatttactatgtatttatttatacgttaagacctctatgaatgaatgtatcagagaatgtctttgtaactaactgtttaattcaatctgtaataaaaatctaactaactaactcatttatttctatttaaaaaggtattgtccttttggcggggsaatgggaatccttgctgcactyttscaatcattctgaaaggbacctttccctgtacttacctttcaacatgcttcaatcttatcaacgctacattttgtgagtgggtcaaacaagtataaaattcctgcaataaagagatgtagtttttttttaagattgagtttttgtttgttatttctgaatggttcatcaagtatgttaactataccttttatctagaaggaaaatcaaatcaactataccttttatctgagaaggaaaatcactcactaagttttattcaggctctaccaacccccattatatctactgtttgtttgtttatgtcctaaattaacctttcatcctatgaagtaataaagttcattttaaaccaacgattaccaaatgcatttttttcaaaggaagggcaaaaaccaaatggcactgttttctctgaatggaaatctgtaagttagttaaaatgtttatacttcattttaagaccaaacaccaataaggacttctgaaaaattgttccttttttc

SEQ ID NO: 9445 - DNA, 1161 bp, Homo sapiens
  SIMILAR (96)..(374): 391254mologous to Macaca mulatta hnRNP A1-gamma isoform,accession number M84334,Smith-Waterman Score=100.
tcgtgaagctggttccggtggaaatgacaacttcgctcggagaagaaacttcagtggttcgtggtggcctttggtggcaagccgtggtggtgtttggatatgggtggcagtgggggatggctataatggatttgggtaatgatggaagcaattttggaaggtggtggaagctaccaatgatttttgggaaaataccaacaaatcaggtcttcaaaattttggaccccatgaagggggggaaatttttggaggccagaagcttctggccccctatggcgggtggaggcccaatacttttgcaaaacccacgaaaccacaaggtgggctatggcgggttccagcagcagccagtagctatggcaagtggccagaagattttaattaggaaaccaaagcttaagcaggagaggagagccagagaagtgacaagggaagctacaggttacaacagattttgtgaaactcgccccagacacagtgggtgccagggcctagcctgctaccaaagaagaacatgtatttagaccaaatactcatggtgtatgggcaaaaaaactccgaggactgtaatttgtgacgtaattgtataacagggttattttagtttcctgttcctgtggaaagtgttaagccattcccaccaaagggttttaatgtagattttttttttttttgcacccccatgctgtttgattgcctaaatgtaaccagtctgaatcgtgacgcctgaaataaatgtctttttttttaatgtgctgtggtaaaagttagtctacctcttaagccatccttggtaaattttcccccaacaagtgtgaagttagaattccttccagggttgatgccagggttctatttggaatttatatacaacctgcctggggtggagaaacccttgtcttcggaaacctctggtgtagtggaacttgataagttactgttgtgacctgaagttcacccattaaaagggattaccccaagcaaaatccatggaatgggttaataaaagtgaattgttgggcacatccctatgccatatatctaaaatttgaataatggtaccagattaaaattatagatggggaatgaagcttgtggtatccattatcaatgtgtaatccaataaccgatttaattctcttgaatgaaaaaaaaaaaaaa

SEQ ID NO: 9446 - DNA, 2316 bp, Homo sapiens
  SIMILAR (1717)..(2268): 261254mologous to Drosophila melanogaster eyelid,accession number AF053091,Smith-Waterman Score=81.
atggtgtaccgccaaaatcagcttccaagttcctgtgcaccagaaatgggaagggaagatgggctcagagccctccacccagcacagcctccacctccccgtgcacagcagagccctccacctcccctctccgcacagaagagcctccacctccccgtgcacagcaaagccctccaccgcccctgctcaccccccaccgtcgccatcctcaatccttcccagccccatcggcccccagtgcactctccaggcagcggcctgggctttactcagctgtcaccttctctggaagcctctctgggccacggacttcaacatgcacgcccagcccggcatcctctccctctgcacatgggctgggccacattcacactgacgctggtgtctgctccctggaagctcaggaggaggccaaggctccaggtggccggggtccctcatgttcagcgcatggagccttgggccccacatgcaccagcggagttgctggagactcaggcccagttgtggggtcacaggagagggcactggatcccagacggcagggcctgcaacactgagttcacacacccaggactcgagattggggccagggagagcggcagcgcctgcaaggggccgcctcctggctcactggttcccttccccgcatctcccctgggaagcaagataaatgggggaagttgctaccaaatactcacgggctcatcaggaaaaatatgcagaatcaatggctgcagctgccaaaacaaatggagtatgcccacctctgccacggcatcgctgcagacctgccctgcccgggccgtgcccgacctgggcatcgctcggaggagctggtcaccacatagaaggcccagctggacacacgaaaagagttcctgccccagtcagaaggcccctcagggaagggcagtacccctccagcctgggaaaggaggtgaacccgtgtccttttggagtccagggcaggctcccagcaaagcgagggggaggcgagctggcagcgcggctatgcgaggccgagctgccaagctgctatctcgttcccggagcacaggagggctctgcgtgctctgtgggcaggggactgtagggttgcagatgcagggccgggcagctcctccagcaccccccccagcccaccctctcttcccaagaccagtgtctcccttggatttctctgcttcaaaaagagccttgcagcatcctgcgcttctgggagggaaagacagctggaggcctgagtgtgggcatctcaacctctctcacctacccagtggagtgaaggacagctgggggtccgagtgtgggcatctcaacctctctcacctacccagtggagtgaaggacagctgggggtccgagtgtgggcatctcaacctctctcacctacccagtggagggaaggacagctgggggcccgagtgttatgtgttctgtatgttacatcgcctccccgagcagcacgactgcacattcgaccacatgggccgtggccgggaggaagccatcatgaaaatggtgaagctggaccggaaagtggggcgctcctgccagcgcatcggggaggggggccaagaggatgatgtcgtggcctccattctcgtttctatgcagccccatagtccaaggacacccagtccacatctaccatatagcaagtttaaggatttcagcagctgcaactgcgcacgccagggctggaaagagatgggggcctgtgtgcagagaccgtctgcagtacttggaggcactcgtccagttagtgtccaggctaaacagccgcttccttgctttctgttgggagcctctgccctgggaagctgcgggactggccttggggtaaaggacagagatattgaccgcatagttgtcatgagcgtgatgaaaatcctcagaggaaatcagaggcccagtggcgatgaacaagcacgggggcaaagggcaagagagggccttggtggcctgggtgtgaggcgggcctgcagggagcagtgggctgtgctctgcccactggtccacaggaactgggtctgcgtcagctccttcctgattgcttcacagagcaacagtccacagcaacaacataactgttgttatgccaacaacagtccacagcaagaagaggggatggtgggaagacaagcagaaaccttcctgctgggtggcgtgagaaacaggaaaccatgggtgggagtgggccgtggtcttcaagggagccatcagcagcacattcagggagctgtgagcagcccctctagccccaagaagggggtctccaagagagagggccccagatgggcacaacagtaa

SEQ ID NO: 9447 - DNA, 772 bp, Homo sapiens
  SIMILAR (120)..(470): 331254mologous to Arabidopsis thaliana zinc finger-like protein,accession number AL353912,Smith-Waterman Score=119.
agcggccgccccgagccccccgacgccgccgccaccgcctcctcagagcggggcccgggcccagccgccgccaccgctgccgccgccgagctccgccgccgccgagcaccatgggagacgctgggagcgagcgcagcaaagcgcccagcctgccgcctcgctgtccctgcggcttctgggggtccagcaagactatgaatctctgttccaaatgctttgctgattttcaaaagaaacagccagacgatgattccgctccaagtacaagtaacagccaatcagatttgttttccgaagagaccaccagtgacaacaacaatacctcgataaccacgccaactcttagtcccagccagcagccgcttccgacagaactgaatgtaacttcaccgagtaaagaggagtgtgggccatgcacagacacagctcatgtctcattaatcacaccaacaaaaagatcctgtggtacagattcacagtctgagaatgaggcttcaccagtaaaacggccacgactacttgagaatacggaacggtccgaggaaaccagtcgatctaaacagaagagtcgacgtcggtgcttccagtgccaaaccaaactggagctggtgcagcaggaattggggatcgtgtcgctgcggagtgaagctgcagaccttcgcggtgagtgttacaggttataaaggcagtgcagacccaaagagtgagcagcagcaagatttattgcaaagagcgaaagaacaaagcttccacagtgtggaaggggacgcga

SEQ ID NO: 9448 - DNA, 915 bp, Homo sapiens
  SIMILAR (30)..(311): 321254mologous to Arabidopsis thaliana zinc finger-like protein,accession number AL353912,Smith-Waterman Score=104.
  misc_feature (1)...(915): n = a,t,c or g
attgcccgcgctgaagaattcggctcgagggcctctgggggtccagcaagactatgaatctctgttccaaatgctttgctgattttcaaaagaaacagccagacgatgattccgctccaagtacaagtaacagccaatcagatttgttttccgaagagaccaccagtgacaacaacaatacctcgataaccacgccaactcttagtcccagccagcagccgcttccgacagaactgaatgtaacttcaccgagtaaagaggagtattcacagtctgagaatgaggcttcaccagtaaaacggccacgactacttgagaatacggaacggtccgaggaaaccagtcgatctaaacagaagagtcgacgtcggtgcttccagtgccaaaccaaactggagctggtgcagcaggaattgggcatcgtgtcgctgcggttatgtgttctgtatgttacatcgcctccccgagcagcacgactgcacattcgacccacatggggccgtggccgggaggnaaggccatcatggaaaatgggtgaagctgggaccgggaaagtggggcgctcctgccagcgcatcggggaggggtgctcctgaaggccaggcatggccaccacgtgacgctgttcttagttcactaatgttagccttatttaggacaaagtcagccagacaccttgtactgggcacgcgtcagactgcagccagtccgtttcctttctttagccagccatcctggtactgtagtttaggggttgatggtggttgaaattgatttctggctggttattaaggtgcctgctagccattgtataaaatttaaacaaaaagaataaaaaaaaaaaaaaaaaaaaaaagaatgcggccgcacgctcttctttatatgtctagtaattccaaaaaaaaaaaaaaaaaa

SEQ ID NO: 9449 - DNA, 1458 bp, Homo sapiens
  SIMILAR (958)..(1080): 1001254mologous to Homo sapiens nucleolysin TIAR,accession number M96954,Smith-Waterman Score=230.
atggggatctttacagctgcggaaacagtagcaaggagtcctgtccatggtcacacagctgttcgcgaaagcttagggcgcacgtcgagagactggccacagaacgaatgttcgtgtgttatttatgaagaaccgattagcaacaccgctgagtacactaccgtacggaggttagaggatcgacacgacgatagccacatgcctgggccactttctcgtccccgcgaaggtaagggatgccaatccgtgcctgatgccctagcacccaggctgccgcccgtgcttatgccggtattaaacaacgagggagggatgctcctggggcctgttcctgcagatcgcgaaacacctttgcagggggatctggatgctggagagcctctcccagcaaattccctgaggcggagcaaggcagctccaggaaactgcagaggaagtgaagcagcccctgccactcttcagatcagccttccacttcctttccaagcattttcttgtaaagcgtgttttgaactttcaggcagcacaaaaaaagctccagcaggcacacccacccttggtgattccggtgcccttacacatcctgtggctctgaaaagtgtccctgccttcctggtactctgttgtccagcactacccagtaagaaccactggagaccaggaagagctccatcagtccccgcggagcatctgaccaggtcgggagaaagaatttaccgcaacaatcctcatgtgaagggtgtcctcagcaacttcagtctgactcacaagtcccttacagattgccgcaacatcctcgaactcgatgctcacctaatcagattacattaccagagacggggcgagttttacaaaagcgctattaacttggaaaaacccggtgccaaattttttctggaaaaaagacaccttcaaactttggggcgaggtaataaggtccaccatgtggaagacagtcaatcaccttctgctgcttggatgggtggatttggtgctcagcctccccaaggacaagctcctccccctgtaatacctcctcctaaccaagccggatatggtatggcaagttaccaaacacagatcttgccttcgccccatattctggctgtattcatgttaccagaaaggggtcccaatccagaccccaagagagggttcttggaccttgcaagaaagaatctgggaaattgggtcagtactataacattcctgtccaggtttcctggagttcaggttcttcaggaatttgtggtccctggcaccatgcctctcctcaggcctttggagctgccaatgcattttaacccccatttctccacagctttagcatctctcattgctgacgaactctatctgctccctcagctctctgtgagccaaatgggagaaagctttccctcttttgacatgatggcaatctgtgcccaggcgtctacaaataggctatggatgccctga

SEQ ID NO: 9450 - DNA, 1435 bp, Homo sapiens
  SIMILAR (923)..(1135): 461254mologous to Homo sapiens nucleolysin TIAR,accession number M96954,Smith-Waterman Score=168.
atgatggaagacgacgggcagccccggactctatacgtaggtaacctttccagagatgtgacagaagtccttatacttcagttgttcagtcagattggaccctgtaaaagctgtaaaatgataacagagcatacaagcaatgacccatattgctttgtggaattttatgaacacagagatgcagctgctgcattagctgctatgaatgggagaaaaattttgggaaaggaggtcaaagtaaactgggcaaccacaccaagtagccagaaaaaagatacttccaatcacttccatgtgtttgttggggatttgagtccagaaattacaacagaagatatcaaatcagcatttgccccctttggtaaaatatcggatgcccgggtagttaaagacatggcaactggaaaatccaaaggctatggttttgtatctttttataacaaactggatgcagaaaatgcgattgtgcatatgggcggtcagtggttgggtggtcgtcaaatccgaaccaattgggccactcgtaaaccacctgcacctaaaagtacacaagaaaacaacactaagcagttgagatttgaagatgtagtaaaccagtcaagtccaaaaaattgtactgtgtactgtggaggaattgcgtctgggttaacagatcagcttatgagacagacattctcaccatttggacaaattatggaaataagagttttcccagaaaagggctattcatttgtcagattttcaacccatgaaagtgcagcccatgccattgtttcggtgaacggtactacgattgaaggacatgtggttaaatgctattggggtaaagaatctcctgatatgactaaaaacttccaacaggttgactatagtcaatggggccaatggagccaagtgttaggaaacccaaaaccgtctgatccgctatatggcaaatgggtggcaagtaccgccttatgagctatacgggcaaccatggaatcaacaggcatttggagtagagtcaatcaccttctgctgcttggatgagtggatttggtgcatcagcctcccccaaggacaagctccacccccttgtaatacctcctcctaaccaagccggatatggtatgggcaagttaccaaacacagtgaggccgggattctaaaaaaaaaattgttaatttcttgattagggtttcgattttccctgtgacacttctgaagaacatgaaagtagaacattcgggaaaatgaaaatatttagattacaaatttgacaatgtttggaaacattagcccagatttgccttgggtgaaggacacgtgtcttctagttctgcctttttaagtttttgttcatgatggatatgaacatgatttttctttatgtacaaaaactaaaataaagtcaataaagacaattctgactacaaattttgatataataggaaaa

SEQ ID NO: 9451 - DNA, 1212 bp, Homo sapiens
  SIMILAR (739)..(1191): 851254mologous to Homo sapiens Similar to ribosomal protein S2,accession number BC001795,Smith-Waterman Score=666.
atgtccgagtatggcagattgcattttcccaaaaatggccacaacagtatcactggtcccacctgctttcccccttgctgtgggcttgcttttctgaacgccgtcattccccttgctatggcatccatttcctctcactcaacctgggcaagcctttgtgacttcctcgaaactagaatatggtggaaatgtcacggcgtgacttgcaagactggatttaaaaagcgccgaacactgtctttctgtgaagaacctgaccgccatgttgtgaggaagcccaggcatctgaacaaaggccacatgcaggtattctggctaatagctccaactagggccccaagccagcccctggcatcgatcatcagacatattgataatgatgtgggttcaagaaactctcactttcctcttaatacgaaagaaaacaacagtgcaaatgtgatgatgtatgataacggacaactagggagttatggggtgggcatggaaacgtgctgcaggtaccaagcaatccaaagagagcatgggtctttcagaggctgtggtgagttggaacagccaaagctggtcgtcaatggaagcctagaagaacgcaatccacaaaggaaaagaggctttggtagtggcatccggcaccagggttgtggctgtggacagggccagggccaaggccgtggagttcgtggaggcaaggccgagtataaggagtggatgaccgtcaccaagctgggccacctggacgaggttttgaaaattatgctggtgcagaagcagacccataccagccagtgtaccaggttcaaggcatttgttgccactggggactacaatggccacatcagtctgggtattaagtgctccaaggaggtggccactgccatctgtggggctatcatcctggccaagctctccattgtccctgcgtgcagaggctactgggggaacaaaatcagcaagccccacaccatcccttgcaaggtggcaggctgctgtggctctgtgctggtgtgcctcatttctgtgcccaggggcactggcattgtcttggcccctgtgcccaagaagctactcatgatgactggtatcaatgactgctacacctcagccaggggctgcactgccaccctgggcaactttgccaaggccacctttgatgccatctctaagacctacagctacctgacccccgaccctggaaggagactgtattaa

SEQ ID NO: 9452 - DNA, 1035 bp, Homo sapiens
  SIMILAR (370)..(1032): 931254mologous to Rattus rattus ribosomal protein S2,accession number X57432,Smith-Waterman Score=1051.
atggccactgacatagcccagagatacaggataagcaaatacccaaccctcaaattgtttcgtaatgggatgatgatgaagagagaatacaggggtcagcgatcagtgaaagcattggcagattacatcaggcaacaaaaaagtgaccccattcaagaaattcgggacttagcagaaatcaccactcttgatgattttgactttcaagttccagccactattatctccaaactctgcctcagtttcttcagcctgaaggttcaccccaacaacaagatagaaaagcaaagaccttccaggacatcagagatggtttgccttacaggaggagaggaaaaaggacatcgttatttgtggaaagaaaggatggacatgaagatcaagtccctggaggaaatctgtctcttctccctgcccattaatgaatctgagatcattgactttttcctgggggcctctctcaaggacgagattttgaaggttacgccggtgcagaagcagacccgtgctggccagagcaccaggttcaaagcgtttgttgctatcggggactacaacggccacgtcggtctgggtgttaagtgctccaaggaagtggccaccaccatccgtaaggccatcatcctggccaagctctccattgtccccgtgcacagaggctactgggggaacaagatcggcaagccccacaccgtcccttgcaaggtgacaggccgctgcggctctgtgctggtgtgcctcatccctgcacccaggggcactggcattgtctcggcgcctgtgcccaagaagctgctcatgatggctggtatcgatgactgctacacctcagcccggggctgcaatgccaccctgggcaacttcgccaaggccacctttgatgccatctctaagacctacagctacctgacccccgacctctggaagattgtatttaccaagtctccctgtcaggaattcactgaccaactcgtcaagacccacaccagagtctccgtgcagcggactcaggctccagctgtggctacaacatag

SEQ ID NO: 9453 - DNA, 1030 bp, Homo sapiens
  SIMILAR (913)..(245): 361254mologous to Homo sapiens Human RNA-associated protein- 25 (RNAAP-25),accession number Y70244,Smith-Waterman Score=178.
ttgagggatactctagagcggccgccctgtgtttttttttttacacgcttaattcactttatttttcttgtataaaaaccctatgttgtatgccacagctggagcctgggtctgctgcacagagactctggtgtgggtcttgacgaggtggtcagtgaattcctgatagggagacttggtaaatacagtctccttccagaggtcgggggtcaggtagctgtaggtcttagaaatggcatcaaagggtggccttggcgaagttgcccaagggtggcagtgcagcccctggctgagagtgtagcagtcatcgataccagccatcatgagcagctttttaagccacaggtgcggagacgatgccagagcccctggggtgccagggatgagggcgtaccagcacagagccgcagcggcctgtccaccttggcaagggacagtgttggggctttgccaatactttgttccccccagtagccctctgcgcacggtgaagagtgtaagagcttggccaggatgatgggcccaacgggatgggcggtgggccaccttcttgggagcactttaacaccccagaccccaccgtgggccattggtagttcccggatagcaacaaaatgccttgaaccctggtggcgctggccgggcacgggttctggttcctgcacttggcataatctttcaaaaacctcatcctttgagaggaggccccccagaaagaaaatcaatgatcctctgattcctttaatgggccggaataagaatagatagatctcctccaagggaactttgatctttaatggtccttgaccaagcggccccaacttggtggacgggcatcccaatccctttatcctcgggcctttgcctccgcgagctccgcggctctcggccccggccccgtccaccgggcgggaaccccggcccccggatgacaatgccgaaaacctcgccggaaagcaacggggttttcccatccccgggccaccagggccccgggcctgcccgttggcaccggggttattcgccattt

SEQ ID NO: 9454 - DNA, 1616 bp, Homo sapiens
  SIMILAR (40)..(864): 1001254mologous to Homo sapiens RNA polymerase subunit hRPB 33,accession number J05448,Smith-Waterman Score=1443.
accgcggagcagacgcggaggctggtggccctgggcgagatgccgtacgccaaccagcctaccgtgcggatcacggagctcactgacgagaatgtcaagttcatcatcgagaacaccgacctggcggtggccaattcgattcggagggtcttcatcgctgaggttcccataatagccattgactgggttcagattgatgccaattcctcagtccttcatgatgaattcattgctcacaggcttggattaattcccctcattagtgatgacattgtggacaagctgcagtactctcgggactgcacatgtgaggagttctgccccgagtgctcggtggagttcaccctcgatgtgcggtgcaatgaagaccagacgcgacatgtcacgtctcgagacctcatctccaacagcccccgggtcattccggtgacatcccggaaccgagataatgaccccaatgactacgtggagcaggatgacatcctcatcgtcaagttgagaaagggccaggagctgagacttcgagcctatgccaaaaagggctttggcaaggagcatgccaagtggaaccctactgcaggggtggcttttgaatacgatccagacaatgccctgaggaccacagtgtaccccaagcccgaggaatggccaaagagtgagtactcggagctggatgaggatgagtcgcaggctccctatgaccccaacggcaagccagaaaggttttactacaatgtggagtcctgtggctctctgcgtcctgaaaccattgtcctgtcagccctctcaggattgaagaagaaactgagtgatttacaaactcaattaagccacgagatccagagtgatgtgctaaccataaattaactgcagcttgcctgcttcagcaaaaacggagattcaggccagcagctggatatgggggtctctcttcagactcttctcgtttctgagaatctagtctactgttggttgagcttcttggcaggacatcagtaccaactagaagtgggtcatagatagattaccagggatgcagtggtgtttaggcaggataggtctttactggccctgactgctgttaataattggcagcagtgctccccagatcccagaaggtccctgctggagtgtttccagtgcacctgtaggaacaactagacttctctcctggttagtccagctctttactctaaaccctttctgtccaaaatgagtcattttcagttgtaccttagatgtctggtgttgaggatcaagtgccatagcctttattcagggggcctataaacccttccagttcttgccccagggctggcctgctagcgcttcaaattcccaggtgtccctaatttgagaagtaaccttttggaatagcaggagcaagggcccctcccacatacacaggaggagtatttcatttctccttaatgaaggctctggccctaacccctcagcactgtctccagataggaacatgcacaaagcagttaattaggcagcctggagaaaaccagagatccagtacagaaaggaaaggatatttattgattaacagaagttgtctttttaaaagtgtttatttttgcaataaagagcacaacataaaaaaaaaa

SEQ ID NO: 9455 - DNA, 2692 bp, Homo sapiens
  SIMILAR (3)..(77): 1001254mologous to Homo sapiens HSPC326,accession number AF161444,Smith-Waterman Score=147.
  misc_feature (1)...(2692): n = a,t,c or g
atggcggcggcggcggtatctggtgcgcttggccgggcgggctggaggctcctgcagctgcgatgcctgcccgtggcccgttgccgacaagccctggtgccacgtgccttccatgcttcagctgtggggctaaggtcttcagatgagcagaagcagcagcctcccaactcattttctcagcagcattctgagacacagggggcagaaaaacctgatccagagtcttctcattcaccccccaggtatacagaccagggcggcgaggaggaggaggactatgaaagtgaggagcagttgcagcaccgcatcctgacggcagcccttgagtttgtgcccgcccacgggtggacagcagaggcgattgcagaaggagcccagtctctgggtctctccagtgcagcagccagcatgttcgggaaggatggcagtgagctaatactgcattttgtgacccagtgcaatacccggctcacacgtgtgctagaagaggagcagaagctggtacagttgggccaggcggagaagaggaagacagaccagttcctgagggatgcagtggaaaccagactgagaatgctgatcccatacattgagcactggccccgggccctcagcatcctcatgctccctcacaacatcccgtccagcctgagcctgctcaccagcatggtggatgacatgtggcattacgctggggaccagtccactgattttaactggtacacccgccgagccatgctggctgccatctacaacacaacagagctggtgatgatgcaggactcctctccagactttgaggacacttggcgcttcctggaaaaccgggttaatgatgcaatgaacatgggccacactgccaagcaggtaaagtccacaggagaggcactggtgcaaggactcatgggtgcagcagtgacgtcaccgcggagcagacgcggaggctggtggcccctgggcgagatgccgtacgccaaccagcctaccgtgcggatcacggagctcactgacgagaatgtcaagttcatcatcgagaacaccgacctggcggtggccaattcgattcggagggtcttcatcgctgaggttcccataatagccattgactgggttcagattgatgccaattcctcagtccttcatgatgaattcattgctcacaggcttggattaattcccctcattagtgatgacattgtggacaagctgcagtactctcgggactgcacatgtgaggagttctgccccgagtgctcggtggagttcaccctcgatgtgcggtgcaatgaagaccagacgcgacatgtcacgtctcgagacctcatctccaacagcccccgggtcattccggtgacatcccggaaccgagataatgaccccaatgactacgtggagcaggatgacatcctcatcgtcaagttgagaaagggccaggagctgagacttcgagcctatgccaaaaagggctttggcaaggagcatgccaagtggaaccctacttgcaggggtggctttttgaatacgatccagacaatgccctgaggcacacagtgtnaccccaagcccgaggaattggccaaagagtgagtactcggagctggatgaggatgagtcgcaggctccctatgaccccaacggcaagccagaaaggttttactacaatgtggagtcctgtggctctctgcgtcctgaaaccattgtcctgtcagccctctcaggattgaagaagaaactgagtgatttacaaactcaattaagccacgagatccagagtgatgtgctaaccataaattaactgcagcttgcctgcttcagcaaaaacggagattcaggccagcagctggatatgggggtctctcttcagactcttctcgtttctgagaatctagtctactgttggttgagcttcttggcaggacatcagtaccaactagaagtgggtcatagatagattaccagggatgcagtggtgtttaggcaggataggtctttactggccctgactgctgttaataattggcagcagtgctccccagatcccagaaggtccctgctggagtgtttccagtgcacctgtaggaacaactagacttctctcctggttagtccagctctttactctaaaccctttctgtccaaaatgagtcattttcagttgtaccttagatgtctggtgttgaggatcaagtgccatagcctttattcagggggcctataaacccttccagttcttgccccagggctggcctgctagcgcttcaaattcccaggtgtccctaatttgagaagtaaccttttggaatagcattagaccctggctgtcccctccccaccaaataaacatgatatttcattctctgtccagcagtcatgaaccccttcacctccaatgacctgatcatttagtttggtgggggtgggggtgggggtgggggtgggggtggaagcagccgcaggagcaagggcccctcccacatacacaggaggagtatttcatttctccttaatgaaggctctggccctaacccctcagcactgtctccagataggaacatgcacaaagcagttaattaggcagcctggagaaaaccagagatccagtacagaaaggaaaggatatttattgattaacagaagttgtctttttaaaagtgtttatttttgcaataaagagcacaacataaaaaaaaaa

SEQ ID NO: 9456 - DNA, 393 bp, Homo sapiens
  SIMILAR (257)..(355): 481254mologous to Homo sapiens Human secreted protein encoded by gene 4 clone HETBI87,accession number W75129,Smith-Waterman Score=69.
tttttttttttttttttgcagaaactaactccaaataaattacctaccaaaatattcatataatggtggaaatattccaaaattccatattttgggatttatacacaaaagataaacaaattagaggccaagaggctgccagaagggaaaaacggggcctgggaagaccattgtgaggaatgagctgggcctaaagaggccactggcaggcaggagctggacctgccgaagcggccgaaaggcaggagctttggactggggaggccgcagtgaggtgagagctagctgggcgtggagagtccgctgtgaggccgaggccgaggccgggcctgcaaaggtccactggagggcaagttctgggcctgaagaggccgccaaaagtcaaaagcgggg

SEQ ID NO: 9457 - DNA, 3465 bp, Homo sapiens
  SIMILAR (88)..(483): 1001254mologous to Homo sapiens dJ1022E24.3 (KIAA0835, similar to myelin transcription factor 1 (MYT1)),accession number AL121581,Smith-Waterman Score=683.
atgcaacaggacatcacccaatgtgaggacagaactatctctgcaaggaaccaagggtactgtgatggctgccagtggggatcagggatgagcttagaaaatgaagacaagcgagctcgcacccgatccaaggccctgcgaggacccccagagaccacagctgcagacctcagctgccccaccccaggatgcacaggctcagggcacgtccggggcaagtactccaggcaccgaagtttacagagctgccccctggccaagaagaggaagctggagggcgctgaggctgagcacctggtgtccaagaggaagtcacaccccctgaagctggctctggacgagggctatggtgtggacagcgacggcagtgaggacactgaggtgaaggacgcctctgtttcggatgaatcggaaggaactctggagggggccgaggctgagacgtcaggacaggacgagattcatcgccccgagacagctgaagcgcccaaggtgagcccagcctatgacaggtccccgtccatagctgttcaaagaatgggggcaacctcagggtgcccggcagacgttaaagagaggcctcaagaggtggttgctcaccggatggtggttgtccacatcctcggggcttcaggactgcaggacaaattcgagcatcttaaaatgattcaacaggaggagataaggaagctcgaggaagagaaaaaacaactggaaggagaaatcatagatttttataaaatgaaagctgcctctgaagcactgcagactcagctgagcactgatacaaagaaagacaaacatcctgtgccgggggaaagctgggcagtttccctcctccgagcccctgtacataccatgaattgtgggaccttcagagcttttcacttttcggaaaatagctcctgctggggctacaagatggagtgtgaagagggccttgggccacagggaggcgcctgtggactagggggagttcatgcaccccttctttccccagaggggctggactcaggaaccagagttccaggccccaagcaggaaaggcaagaacaagaaaggacaggggagctggaccgaggctacaggagcctctgtactgggcttccactggtcaatcagggacaatctgagcatccaaagaaggctttcagcccatggggtaaaacaggaaacaacgagtctatagagatatccatcaaagttaacacaaggtcacgaaaggcgaggagtgctaaaaacgacttcagacgaacgagacaccaggaccacgcacagcacgtggttctgaacccacccctgaatgggtctgaggaccagatggccgagaaggaagacacctctcacacctctgcccagaaggcccgtgagctccggggcccagaatcacccagtcccaagcctgagtactctgttattgtggaggtccgctcggatgatgacaaggacgaggacacccactcccggaagtcaacagtcactgacgagtcggagatgcaggacatgatgacccggggaaacctgggcctcctggagcaggccatcgccctgaaggctgaacaggtgcgcacagtctgcgagccgggctgcccgcctgccgagcagagccagctgggcctgggagagccagggaaggcagcaaagcccctggacactgtgcggaagagttactacagtaaaggtaatccaattctcaactctgtgacagggatgtggggtatagggaggaaaagcatattggaagattccgaaatgtcttggcagcaaacggctatcactactagaagcccagtaaggctctgctcaatcagcatctctagcagcacattaagtccccatgcacccaaacaacatgccagggccacgtgccacaggaaaactctccacggaaacgtggatgccggggccacaggctacaggaaaagtctccacggaaacgtggatgccggggccacgtgccacaggaaaactctccacagaaacgtggatgccggggccacgtgccacaggaaaactctccacggaaacgtggatgccggggccacaggctacaggaaaactctccacggaaacgtggatgccggagccacgtgctacaggaaaactctccacggaaacatggatgccggggccacaggctacaggaaaagtctccatggaaacgtggatgccggggccacgggctacaggaaaagtctccacggaaacgtggatgccggggccatgggctacaggaaaactctccacggaaacgtggatgccggggccacgtgccacaggaaaactctccacggaaacatggatgccggggccacgggctacaggaaaagtctccacggaaacgtggatgccggggccacgggctacaggaaatctctccacggaaacgtggatgccggggccacaggctacaggaaaactctccacggaaacgtggatgccggagccacgtgctacaggaaaactctccacggaaacatggatgccggggccacgggctacaggaaaagtctccacggaaacgtggatgccggagccacgtgctacaggaaactctccacggaaacgtggatgccggggccacaggctacaggaaaagtctccacggaaacgtggatgccggggccacgggctacaggaaatctctccacggaaacgtggaggtgttccataaagacgcccttccagaagtcatgctgctccatggacactctgtggtgggaacaagggtccccaaagctcacacagggcactgccaccaactcagacctgagcagcagttggcctccacccacatccctctactggaacaacaggcggcttcatgttcacagggcacgcagcagagccttcgctgacgccaagaggcagggaggcgcaggcagggcgcaggcggcggcgggcggcatggagagcctgctggagaatccggtgcgcgccgtgctctgcctcaaggagctcacggccatcgtgcagaagcagcagagcctcatccacacccagcgagagcgtatcgacgagctggagcggcggctggacgagctgagcactgagaaccgcagcctgtgggagcaccagcagctgctgcaagcccagcctccgcccgggctcgtccccccgtcatcggccccgctgccggccgctccggccaccgctcctgccgccgccgccagggcccaggaacctctccaggaccagggacagcgctcagcagccgcgccgcatcccgcgcccgatcggccgccgcgtcagcaccacggacagctcctggagcagccccagcggggccctggcagcagggctcacacaccccagtcgccccagaagcatctggggacacaaggggccgtgactgacaaggagaaggagcgtcccccgagttgctgcgctgctgccggagccctccttcagcacaaatccccctccgccctcggcaagggcgtcctgagcaggagacctgagtga

SEQ ID NO: 9458 - DNA, 2261 bp, Homo sapiens
  SIMILAR (232)..(273): 851254mologous to Homo sapiens Human secreted protein, SEQ ID NO: 7870,accession number G03789,Smith-Waterman Score=55.
ttttttttttttgagaccgagtcttgctctgtcgcccaggctggagtgcagtggtgcgatcttggctcactgcaaactcttcccaccgggtttcacgccattctcctgcctcagccttccgggtagctaggattacaggtgcacgctaccacgtccggctaatttttgtatttttagtacagacggggcttcatcatcttggccaggctgatttcgatctcctgacatcgtgatctgcctgcctccccctcccaaagtgctgggattacagggcgtgacaacgcacgcctgggccaaggcctggctcctcttatctataccccctacccctggcaggctgtgccgggggaaaagctggggcagtttcccctcctccgaggcccctgtacatacccatgaattgtgggggaccttccagagcttttcacttttcggaaaatagctcctgctggggctacaaagatggagtttgaagagggccttgggccacagggagccgcctgtggactaaggggagttcatgcaccccttctttccccagaggggctggactcaggtgagtatgggggtgggggctcctgcacttcgacacaggcagcggaagggttttctccccattccctctgcactcccaacttgagctatactttttaagaaagttgattcaccctgcctttgcccccttccccagaacagaacacgttgatcatgggcgatatttttcattgtgccaaaaagttgccatgaccgtcattaaccctgtttaactccaaataataaggaaaataaaacaaaaagttcgggcatggtgcagaaactcgctccaaataaattacctaccaaaatatttacataatggtggaaatattccaaaattccatatttttgggatttatacacaaaagataaacaaattagaggccaagaggctgaccgggaaggtaaaaacggggcctgggaatggccgacgtgaggaatgagctgggcctaaagaggccactggcaggacaggagctgggacctgccgaagtggccgaaaaggccaggacctttggacgggggaggcccgcagtgaggcgaagagctagctgggcgtggagagtccactgtgaggccgaggccgaggccgaggccgggcccgtgcaggcctttgagaggacaggagggccgggcctgcaaaggccgatgggagatttcaagttctgcgcctgaagaggctgcccaaaagtcaaaagcgggggcctgggaaggctgccgagagccatgagctgggctggggctgaaagaggccactgggaggcaggaggagctgggcctggagaggctcactcgaggaagttttgcacctggagaggccgccgagaggacggagctgggccccggggaggcccgaacttgctgctcttcccaggcccaattcccaggccgacttgaggacgacttgggcctgcagaagactgccgggaggctggagctaagcctggagagactgacttcgggacgatttgggcctgcagaggccgccgggaggcccaagctgggcctagaggagcccaccgaccggaggccatttggggcctgcaagatgtcatcggagggcccaggagctgaccctggagaggccaccgcgaggcctgagctgggcctggggagcttggcttagggaagtttgtgggcctaccagggcctctgggagctgggcaggagctgagtccaaagacgttgttgggaggccaaagtcgggccagagtccggcctggagatgcagccgggaggaagagctgggcccggagggggcgccgggaggctgcaagtgggtctggagaggccgacttaaggaggttctgggtccgcagaggccgccggaagggaaaaactgggcctggaaaggccgttgtgaggaatgagccccatgggcctgaagaggccactggcaggcgggagctgggcctgccgaagcggccgagaggcaggagctttggactcgggaggccgcaatgaggcgagagctagctgggcgtggagagtctgctgtgaggcagaggctgggcctgtgcaggccttcgggaggcaggaggccgggcctgcaaaggccgactggaggtcaagttctgggcctgaagaggccaccaaaagtcaaaagcggggcctgggaagcccgcccagaggcatgagctgggctggaccgaaagaggccactgggaggcaggaggagctgggcctggagaggctgactcggcccgggtattccggagcagcaa

SEQ ID NO: 9459 - DNA, 3468 bp, Homo sapiens
  SIMILAR (1)..(1287): 1001254mologous to Homo sapiens TBP associated factor,accession number Y09321,Smith-Waterman Score=2127.
gggaccctggtgaccaaagtggctccggtcagcgcccctcctaaagtcagcagcggccctaggctgcctgctcctcagatagtcgccgtgaaagcccccaacaccacgacaatccagtttcctgctaatttgcagcttcctccaggaaccgttttgattaaaagtaacagtggtccgttgatgttggtatctcctcagcaaactgtaacaagagccgagaccacaagtaacataacctcaaggccagcagtaccagcgaatcctcaaacagtcaaaatctgtacagtgccgaactctagctcacaattaatcaagaaagtggcagtgacacctgttaaaaaattggcacaaataggaactactgtggtaaccactgttccgaagccttcctcagtacaatctgtggctgtgccaaccagtgtcgtcacagttactcctggaaagccattgaatactgtaactaccctgaagccttcaagtttgggagcatcatccactccttcaaatgagcccaatcttaaagcagagaactcagcagctgttcagattaatctttctccgacaatgctagaaaatgtgaagaaatgcaagaacttccttgcaatgttaataaaactagcatgtagtggatcacagtcccctgaaatggggcaaaatgtgaagaagctggtggaacaacttttggatgcaaaaatcgaagcagaagaatttactaggaaactgtatgttgaactcaagtcttcacctcagcctcacctggttccttttcttaagaaaagcgtggttgccttacgacaacttctgcctaactcccagagcttcatccagcaatgtgttcagcagacttctagtgacatggtcattgctacctgtactacaacagtaacaacttctcctgtggtgacaactacagtgtcctcaagccagtctgaaaagtcaattattgtttctggagcaacagcacccagaactgtgtcagtgcaaactttgaacccacttgctggtccagtgggagcaaaagctggagttgtgacacttcattctgtgggcccaactgctgcaacaggaggaacaacagctggaactggtttgcttcagacttcaaaaccacttgtgacatctgtggcaaacacagtgaccacggtctcactgcaacctgaaaagccagttgtctctggaacagcagtaacactgtcccttccagcagtaacttttggagaaacttcaggtgcagctatttgtcttccatctgtgaaacctgttgtttccttctgctgggaccacatctgacaagcctgttattgggactccagttcaaatcaaacttgcccagccgggccctgtcctttcacaaccagctgggattccaacaggcagttcaagtcaagcaactattctcattgtttcacgtagttcagcagccttcaggaggcaatgaaaaacaagtgaccacaatttcacattcctcaacattgaccattcagaaatgtggacagaagacgatgccagtgaacaccataatacctactagtcagtttcctccagcttccattctaaagcaaattactctgcctggaaataaaattctgtcacttcaagcatctcctactcagaaaaatagaataaaagagaatgtaacatcatgcttccgagatgaggatgacatcaatgatgtgacttctatggcaggggtcaaccttaatgaagaaaatgcctgcatcttagcaacaaactctgaattggttggcacactcattcagtcatgtaaagatgaaccatttctttttattggagctctacaaaagagaatcttagacattggtaaaaagcatgacattacagaacttaactctgatgctgtgaacttgatctcccaagcaacacaggaacgactacgaggccttctagaaaaactgactgcaattgctcagcatcgaatgactacttacaaggcaagtgaaaattacatcctgtgtagtgataccaggtcacagctcaaatttcttgaaaagctggatcaattggagaagcagagaaaggatttggaagaaagagaaatgttacttaaggcagccaagagtcgttctaataaagaagatccagaacagctgagattaaagcagaaagccaaagagttacagcaattggaacttgcacagatacagcatagagacgctaatctcacagctcttgcagctattggaccaaggaagaagagaccactagaatctggaattgagggcttaaaagacaaccttcttgcttctgggacatccagcctgacagccaccaaacagttgcatcgtccaagaatcacgagaatctgcctcagggacttgatattttgtatggaacaggaacgggagatgaagtattctcgagctctatacctggcccttctgaagtgaccactccactcttccatccacatccttgctatttactgccaaagaagacacaaagcattgttgcactgtcctgaaatttcaatttctggaaaataatcaccaacatgaatgagcattgtttacagctagaaactttattaactcttacctatccatctcatgagactcttacagactcagattcatctttgtcttctgaaaatcagttatgaaatacactttgcacagaactaggcatctgcctatctgtgcattaaattaaagcaagctaaggccctatttgttactacctgcctcatttgccaaattgtaacaggtgaggtgtccttccctaatacagcatgcattgaaatgcatgagaaaggaagaggcatatcataatacaagaatgactatttcattctatattgaacctgtcccaaagtggtaggttttctgggctggaatcagaagttgcttagctaactatgacagtcaccctctgtacgtgacaggccactgtggtgactttggtcggctgagttccagtgttgtcaaaacaagacaaatggggatagattgtgcctggggttgctaattctctgcttcatatcaccatatgccgtttctggtaccaagtgaggggacatgcttgtcagggaaaccttaaaattgaatctactgatatatcttgttgaaaaaatggaaaaggtgcaaagtattagaaggaacgttagggccgttgctttcaaactgatgaggagaatgtgaaaatggtatcataaaacaggaaatgtgcttcatatgcccaagaggggaagaggtggaatcggaactccaaaacaactggtacatgttttgttgatgggcaaaaaaaaatcacagcacaaccagaaaggagaatgtaccagatgttttcaaattagagtatttcaaaaggaaaatgttattttttgttttgtattgttttaaatcccaaggatagtttttatagttccttctgtcataatatattttagttatcctaatttttaagcatgttggcacatttaaaaaatcctaattgatgatgagaattttt

SEQ ID NO: 9460 - DNA, 1658 bp, Homo sapiens
  SIMILAR (347)..(607): 771254mologous to Homo sapiens dJ889M15.3 (novel protein),accession number AL031177,Smith-Waterman Score=343.
atgctttccaatgtcaaaagaggcagaaagctccctaatggtacctgggcccacgacctggtgactccacctaccgcctctttgctactgctgctcacagagcctgccatgccatctgtggctttctgtcattccattctcattgtcaccaagggaggggttaagagaaccagagtgcctcctcccaacaacagcagtggggccaggaccggtaatcctttgaaggttaagcatatctccttcaaaacaggtgacgagctcatcttcttggaccctcatacaacccagacctttgttgacactgaagagaatggaacgggtaatgaccaaactttccattgcctgcagtccccacagcgaattgaacatcctaaacctggatccttcagttgcattgggatttttctgcaaagaagaaaaagactttgataactggtgtagccttgttcagaaggaaattctaaaggagaatttaaggatgtttgaattagttcagaaacatccatcacactggcctccctttgtacctccagccaagccacgaagtgacaaccactggggcagaattcatttgactctactgagcaactgggaggagtttgatctgggaggaagattttgagattctgagtgtgtaggatcctgggggaacttcaactttgaagggtcttgtctttccattctgggcaccattaaaaacatgaacttattgcataaaacttttctagtcagcaagtgcctgatatgccaatagcatacaaactcaatagcaatcatgactgagccaatcactgtttctcagaaaaacaaaacaaaacaaaacaaatgacagtaacccttccccggaaagaaatagaacaatcatggagcctaggagcagagagatgaggaggagttcattgcttcccagcttgtgttatatggctacagcaagtcttcagctgctgcaatgaggaaatgggcatctggaagacaaacagcaactctcagcttgcttcaagaaccagcagataaaagatgggttaagctgttcttcaccctttcagatgtgacctcttttggacttaagcagcaatctgttctcttgctcaaataataaagtgactggaatcaggggagggaaaaggttctttgtttaattattttgattgtgtagttggaagtaattataatttaatatccaaaaaccgttttgttccaaaagaaaaccgatgtccaaaatataccaccttccttgaacctccccttcctgtttgccggggatccttacctatttgaatgggtccactgtccccccattccttactgatacttttgtccagatatcaccctgtcccttaaatccatgatcacttaaatccaggggtcagcaaactttttctgtaaagggcccagacgggaaatattttgggctttgcaggccatgcggcctctgtcacatctactcaactctgctgttgacatgcaaaagcagcaatagacaatatgcgtgtaaatgagtgtggctgtaatccaagaaaactttatttacaaaagcaggtggagggctgggtttggcctgcaggctgtagcttgccaatcagtgacttaaattgttgatttttgtttgataaattaaaaataaattgtgtttgaagtataccctaaaaaaaaaaaaa

SEQ ID NO: 9461 - DNA, 315 bp, Homo sapiens
  SIMILAR (6)..(173): 911254mologous to Homo sapiens put. LLRep3 protein (AA 1- 221),accession number X17206,Smith-Waterman Score=268.
ggcacgaggccacctttgatgccatctctaagacctacaactacctgaccggggacctctggaaggagactgtattcaccaagtctccctatcgggaattcactgaccacctcgtcaagacccacactagagtctccgtacagaggacccgggctccagctgtggctacaacatagggtttttacacaagaaaaataaagtgaattaagcctggaaaaaaaacaacaacaaataaaaacctggtcatttatgctatatttaaagcatttaaatcactttcagaattaccactggggatgttgtattaaaaattaa

SEQ ID NO: 9462 - DNA, 898 bp, Homo sapiens
  SIMILAR (199)..(738): 871254mologous to Homo sapiens Similar to ribosomal protein S2,accession number BC001795,Smith-Waterman Score=815.
  misc_feature (1)...(898): n = a,t,c or g
atgaagcagtgcctggctccagccttcctctcactgatctttgctagcattgtgcaaagaatcctgctggaaggctttggtagtggcatccggcaccagggttgtggctgtggacagggccagggccaaggccgtggagttcgtggaggcaaggccgagtataaggagtggatgaccgtcaccaagctgggccacctggacgaggttttgaaaattatgctggtgcagaagcagacccataccagccagtgtaccaggttcaaggcgtttgttgccactggggactacaatggccacatcagtctgggtattaagtgctccaaggaggtggccactgccatctgtggagctatcatcctggccaagctctccattgtccctgcgtgcagaggctactgggggaacaaaatcagcaagccccacaccatcccttgcaaggtggcaggctgctgtggctctgtgctggtgtgcctcatttctgtgcccaggggcactggcattgtcttggcccctgtgcccaagaagctactcatgatgactggtatcaatgactgctacacctcagccaggggctgcactgccaccctgggcaactttgccaaggccacctttgatgccatctctaagacctacagctacctgacccccgacctctggaaggagactgtattcaccaagtctccctatcaggagttcactgaccacctcgtcaagacccacaccagagtctccgggcagggactcaggcttcagcttgggctacaacataggggttttaatacagaaaaataaagtggattaagcgggnnnnnnnnnnnnnnnnnggggcgcccgttttaaaggaaccaagtttacggccccgggcgggcaagggaatattttttttaagggggcccca

SEQ ID NO: 9463 - DNA, 656 bp, Homo sapiens
  SIMILAR (2)..(484): 901254mologous to Homo sapiens put. LLRep3 protein (AA 1- 221),accession number X17206,Smith-Waterman Score=746.
caatggccacgtcggtctgggtgttaagtgctccaaggaggtggccaccgccatccgtggggccatcatcctggccaagctctccatcgtccccgtgcgcagaggctactgggggaacaagatcggcaagccccacactgtcccttgcaaggtgacaggccgctgcggctctgtgctggtacgcctcatccctgcacccaggggcactggcatcgtctccgcacctgtgcctaagaagctgctcatgatggctggtatcgatgactgctacacctcagcccggggctgcactgccaccctgggcaacttcgccaaggccacctttgatgccatttctaagacctacagctaccctgacccccgaccttttgaaggaagactgtattcaccaagtctccctcaacaggaactcactgaccacctcgtcaagacccacaccagagtctccgtgcagcggactcaggctccagctgtggctacaacataggggttttataccagaaaaaaataaggtgaattaagcgtgaaaaaaaaagacaactaaaaaggggccgccgtttttaagggatccctgaggggccccaagttacgcggtgtttgcagtgacaaagcctttccctttcagggagccgatttttaacctccctggagacttt

SEQ ID NO: 9464 - DNA, 2991 bp, Homo sapiens
  SIMILAR (487)..(888): 761254mologous to Homo sapiens transcription initiation factor IA protein,accession number AJ272050,Smith-Waterman Score= 485.
atggcgcagtttaaaacccccggtgtgtgggaaaaggaagccaagggtgcagcactcaaggacttcaccggcaccaggttacaaagggagtggaggccgagacctcgctggggcagggacctcagctccccaggtgcgcacgtgctggtccagtggggcttcctatggggtgggtcagtttgtacagaacttgtggcctacgatgtcttatcagtgcactggtcacggatgctcatatggctgtgtggaccactctcaccgtcctggtcacggatgctcacagggctgtgcagaccattctcaccgtcctggtcacggatgctcatatggctgtgtggaccactcactgtcctggtcacggatgctcacagggccgtgcggaccactctcaccatcctgctgggcagcgtctgtctgtcgcagaacgtcaccacagcagcagacgccagccggagccagggtgctgggggcgtgccccgccagagcccttcacggccagtgaggaatagcacaaagaagcgggactggctgctgtccttcaaggagaatgttccacaatatcagctgatgtggtaccaggagaacttgtgtgaccttggaggaaagactgatgaccagatcatcaactggctgctagaattccgttcttctatcatgtacttgacaaaagactttgagcaacttatcagtattatattgagattgccttggttgaatagaagtcaaacagtagtggaagagtatttggcttttcttggtaatcttgtatcagcacagactgttttcctcagaccgtgtctcagcatgattgcttcccattttgtgcctccccgagtgatcattaaggaaggcgatgtagatgtttcagattctgatgatgaagatgataccacagagactgtggccatcattctggcagcagtgggagacacaggaagctctcgggtggggagcaccgactggggtccagggctgcgaattcaggccgatggaatcccagcccccaggggtgtgggccacttggccagcaccgctaggccctcctcgtccctcttcgtggaaaaccatgcagagggaggcagtaagtacttcgatagtacggctcatggtcaccccaagtccccgagaaggaaagagagtgacgccatggagatgggagtgaggacttggcgcccagcaccttccagtgcaagaagtcagggagttcaagatgagatcaaggctgatccaggccttgcgcggctcctgctcacaggatcctggggaccgtttcaagaagagcctcaggacacggagaatgctcagtctcctggctgtccccgccaggcaagagggcccgggggtggagggaatccaggggacacagtcctcaccccactgtcagcgccagcagaccccaacactcatcccccagccccaggcacacaacccgccctgccgcccctcgccaggccctgccgggtgtccaccctctgcggcagcagggcactgaggacgtggggcccgtccccggctgctgcagtgcagtgccacctgcaggccgtgtggcctgagcaggctgtgtcatctccaggcctgcagtctctcgtctgtaggaagaggatgatcagtagcccagccttgaagaatcctggctgtggcctcatgaaacaggtgccgttaaaatcagctgcattggaaacagccgagtcaggcaatgaaggcacagagaggccatgcactggctctgtgtctcctgcatcttcacttgtctgcctggctggcggccagcggcaccagaccaaggacccgccgctatttccctgtgttcactgccttcctcttcgcaaggacaccgagagcccctggctctgggcctcccatctgcccttcctcccgcccatcgtcagcgtttacgagggtctgccacgtgccaggcgcaggggaaacggcgcagggtcggaagcagaacccgcctactggggagacaggagtggggagtggcctcacaccccacaggaggggatggaggagcccaggaaagaggccctgggaggtacccccatcctggtccccggagcctgctatgaaacgctcagcctgggaaagaggtcctgggaggcacccccgtcctggtccccggagcctgctatgtgcctctcccacggcagtagggcctgtgcagatgggactgagcaaggggcctccaggtgggtgcagcttatccacgggggcacctggaatggcaatgagaggactttaggacccacaggcgggcaggacagccagagcctcactctaagcacccccggtcctgagcccgagccagagcagcctcctgcagctttgggcaagctcctgggctgtgttcagccacttctgtacgtggaaaatgcaaggttggtgtctgcctcacagtgcagccaccacatgactggtgtggggaacaagctgagctgtcttccccggaggccgggctgcaacccgagaaggcgccgcgccatcggccctcaccatgctccgcataagctgctgcttttcctctgcaaatgccctgggctggacgtcaaaccacagtcagttattggcggggggacttttccaggaatggccagtcaaggaatggtggatcaaccgctaaaggcatggggaattgaaaaattgttgcgctgcaagaggcatgaaagacactatgtacacatcagcagcatgttcgcattcattaagcataagcgctctcaagctttgacagcagacaagatgacagatcgtaccaagcctcccgatcgaatttttggcaaactttgcatcacaagcagaaatccaacaggcgcacagggcatccatttattactcatccgtaaccgattttgccaggtcacgcggctgcaggcatgcaagctttggcgcagcatatgtgtctaccggttatcaggggtgtattgcgcgatggcgttcaacaaagtttgcatgcttcaaccggcgtaccgtgccaaattcggttacgtttga

SEQ ID NO: 9465 - DNA, 730 bp, Homo sapiens
  SIMILAR (557)..(336): 1001254mologous to synthetic construct lac repressor,accession number A14595,Smith-Waterman Score=354.
tcaaacatgagaattggtcgacggcgcgccaaagcttgcatgcctgcagccgcgtaacctggcaaaatcggttacggttgagtaataaatggatgccttcccatgtcctgtgccttcttccttcacaatgactttgcagccagccaatctctcctcattactgattacaccaccagaatttggccctaaaatagcttcaccaatctgcacatcatgctcagttaattttcctagaacattgattagtccgttttcacactgctgattaaggcatacatgagagtttcccttggctggggaagcctccaatcctgggattaattgcgttgcgctcactgcccgctttccagtcgggaaacctgtcgtgccagctgcattaatgaatcggccaacgcgcggggagaggcggtttgcgtattgggcgccagggtggtttttcttttcaccagtgagacgggcaacagctgattgcccttcaccgcctggccctgagagagttgcagcaagcggtccacgctggtttgccccagcaggcgaaaatcctgtttgatggtggttccgaaatcggcaaaatccctggcgaggaaggaagggaagacagccaaagagcagcttaaggctgccagcagtcttctctagaggatcccccacgcctatgcctacagcatccagggtgacggtgccgaggatgacgatgagcgcattgttagatttcatacacggtgcctga

SEQ ID NO: 9466 - DNA, 2463 bp, Homo sapiens
  SIMILAR (1227)..(373): 911254mologous to Escherichia coli K12 putative ATP-binding component of a transport system,accession number AE000350,Smith- Waterman Score=1304.
ctatactgagagcagtttgcacagcgtttgcagtagcagcgtggatttccccgcaccagggttaccgccaatcagaatggcacttcctggcaccacgccgccgcctagtacgcggtcgaactctttaaatccggtggaaaaacgcggcagctcttcaaggctgatatcggagagtttctggacttttgccaccccggcgctaccggcatagccgctgagacgctcgttacgcgccaccattggcgacgcagcaagacgcacctcggtgatggtgttccaggcatgacaggcactgcactgcccctcgttaatgctgtgccgcccactcgatggcgggcgagcaattacttctgattcaggctgcccgtcatggattttgccgttggcattaataatcgtgtcaactgcgcgggaaccagtgacgactgttaatgagccagcgttttccagcactacatttttagcttctgaattccataactgttggttccttcgataagtgttccggaggtcgtggaagcaattaatgccgccgccggattgttgctcaacatgcttagcctcaccaccgtcctgaacctccagaacgccgccattattaagtctggtgctatctgttttagcctccttctggacaatcagcttaccgccagtatcaatggtagtatttttcgccgagggtttagccactaccgtcagttcgccggtattttccagcacaacataattagcctcccctccggtaatagtgaagtgagagagcttgttgtatccttcgatatcagtccctgcacccgtgttggcaactaaagcactgcccgtctcctggttaaccccatgtgcaataccgccggtatagacaatcagcgagcctccggcgctaatattgctgccaattgccgtaccatctttctcaacaacctgccggctcccggaggatataattgttgtgtcagctttcccgccgcttttgatattttgcgttccgctgttgatattggtgcctgtggctatgccataattattaatattctgtgtgccaccattaattatggtatttgtcgcgtttcctgcaacatccataaccccgccattatctattcgggtcgcatcagctttagcattggttaaaactgacattgttcctttatctttaataatcgtcttgtttgccgaaccatatgcgtttatgtctaaatgaccaccgttttccagcaacacattgtcagtgcggccccaaagcttgcatgcctgcagccgcgtaaccctggcaaatcggttacggttgagtaataaatggatgccccagttcggcgcatcgtacggcttacgcggtagcagcggtttcacttcattcactaccacgctttcaccacggaacagaatgttaccctgagcgatacctttcgctgcctgcaacaggtctttgtcgtcacgaccaaacaccaccagcagtttgacgtaaggattctgcggatggttaatcatctcaatcaccggggcttttaccgccggatgatcgcgcaggaagtccggccgtttgtcgttggttgcaaagacaatggcattgcgatccggcagttggttatagagtaccgggaagttctgcccacgccagccagaacgcgaaccaaaccacgaggcgacaatggcagaggccgcaaagaccatcggcaaggtgttggtgcggttatcgctcgggtcaaagaatgggcaccggaagtgtgacaggtcattcttcacattcaaggtctgataggtcagatccagtccactgctccgccaaacatccagcaaaagcgtggtgctggccggtttttcgcacacgtcctgataatgggccgacaaactccagccgtacacggttgaagtcgccaactgttctttggtcactggcagcacgcccatcagttcatcattgagataaacctttaactgcgactggacaggcagtaacgatggcgatggggtgtattcgaggttgagcatcgccttcgtcaccacttcatcgctgcgcataccaaactcaatgctgccgttcgggttaatgccacgtagcaccatgctgcccggcggcggtgcaatttgcgcaaaggtcagcttcacatcacgcgaaggaccgttctgcgccacgactggcgcatcagcgccctgcacgcccggcatcacttgccccacctgcggattttgttccgtctgggcggctacagctggctcagcattgatcagtggttgcgttgctggcgtcgccagagaagtcagcacacggaatatgcccttcaccgaagaaggcgcaaactccgccagatggcggtagccacggaagccgagcttcagaatatccagcagacctttcagcggcttatccttccggtagctgtcctgccagacgcccatgtatccgcacgggcaaacgtacactggacaaaatcgatatggtgcatttttgaagactttcttcat

SEQ ID NO: 9467 - DNA, 924 bp, Homo sapiens
  SIMILAR (196)..(570): 991254mologous to Cloning vector pZC320 SopA,accession number U26464,Smith-Waterman Score=666.
atggtatcagatcccagggtccaggtccagcccatgctgaagtccagaggggagtgggttgatgagcagaaagaacactccgggggccgtgagcaggtcgactctagaggatcccctatggaggagttttctgatgatgaagctgcattccagagggcagagcagaaagatgtgaagggggctcagaaatggacggaggatctggctctgaaggggctacgtgttttgctcgtggaaggtaacgacccccagggaacagcctcaatgtatcacggatgggtaccagatcttcatattcatgcagaagacactctcctgcctttctatcttggggaaaaggacgatgtcacttatgcaataaagcccacttgctggccggggcttgacattattccttcctgtctggctctgcaccgtattgaaactgagttaatgggcaaatttgatgaaggtaaactgcccaccgatccacacctgatgctccgactggccattgaaactgttgctcatgactatgatgtcatagttattgacagcgcgcctaacctgggtatcggcacgattaatgtcggcatccatttattactcaaccgtaaccgattttgccaggttacgcggctgcaggcatgcaagctttggcgcgccgtcgaccaattctcatgtttgacagcttatcatcgaatttctgccattcatccgcttaagcttgcatacctgcaggtcgactctagaggatcccctgtgcctttattcattctacccatagaacatcaattcccagggacaattaacacttaccttatcacagcaggcagagttgggtaccgagctcgaattcccacaacgactatagaggatcccttaagactcaccacacctataactgatgctccactcctgactaaagcctacattatttcctaa

SEQ ID NO: 9468 - DNA, 840 bp, Homo sapiens
  SIMILAR (490)..(669): 431254mologous to synthetic construct lac repressor,accession number A14595,Smith-Waterman Score=89.
atggaaaaactgtttggaaaagaggagcatgctaacaatgcacaggattttggagagttaggattgaagacaagaaaactagagagacatgatgcaaaatatcattcaccaaaggcagaggagaagcaaatgaagcacaaagcaggaagccagatagttaaaaaggaagaagccaaactggctcttgctttggagggattttgccgatttcggaaccaccatcaaacaggattttcgcctgctggggcaacccagcgtggaccgcttgttgcaattctctcagggccaggcggtgaagggcaatcagctgttgcccgtctcactggtgaaaagaaaaaccaccctggcgcccaatacgcaaaccgcctctccccgcgcgttggccgattcattaatgcagctggcacgacaggtttcccgactggaaagcgggcatggcccccattccggttatttttacctcataagggatttgcggattggggacccaccatcaaccaggattttcgcttgctggggcaacccagcgtggcccgcttcctcaacttctctcagggcccagccggtgaaggccaatcagctgttgcccgtctccctgggcatccatttattactcaaccgtacccgattttgccaggttacgcggctgcaggcatgcaagctttggcgcgccgtcgaccaattctcatgtttgacagcttatcatcgaatttctgccattcatccgcttattatcacttattcaggcgtagcaaccaggcgtttaagggcaccaataactgccttaaaaaaattacgccccgccctgccactcatcgcagtactgttgtaattcattaa

SEQ ID NO: 9469 - DNA, 1398 bp, Homo sapiens
  SIMILAR (247)..(1116): 941254mologous to Homo sapiens huntingtin interacting protein 1,accession number AJ238403,Smith-Waterman Score=1454.
atgcccctgccccttcccctgtgggctcaggttcttgttgcttatcccacatgtttttccatcctccttcaagggccaaccgcgcctttgtggacctatgcccccatggatgaaatccagaatgctgagatcaactcccaggtgcggaggtacctggaggggacactggacgagatcgacgtaaggaacccctctgtgaccactatgctcagccagcctgggcctcccagtcctgggcacaccccaacgcatgctctgctggcctcagagcctcatgtgaatgggtgcaaaactgtgtctacagttcatgaagattattctggctcttctgaaagttcaaatgatgaaagtgattcagaagatacagattcggatgatagcagtattccaagaaaccgtctccagtctgttgtggctgtgccaaagaattctactttgcccatggaagaaacaagtccttgttcttctcggagcagtcaaagttatagacactattctgaccattgggaagatgagagattggagtcaaggagacatttgtatgaggaaaaatttgaaagtatagcaagtaaagcctgtcctcaaactgataagtttttccttcataaaggaacagagaagaatccggaaatttcttttacacagtccagtagaaaacaaatagataaccgcctgcctgaactttctcatcctcagagtgatggggttgatagtacaagtcatacagatgtgaaatctgaccctctgggtcacccaaattcagaggaaaccgtgaaagccaaaataccttctaggcagcaagaagagctgccaatttattcttctgattttgaagatgtcccaaataagtcttggcaacagaccactttccaaaacaggccagatagtagactgggaaaaacagaattgagtttttcttcctcttgtgagataccacatgtggatggcttgcactcatcagaagagctcagaaacttaggttgggacttctctcaagaaaagccttctaccacgtatcagcaacctgacagtagctatggagcttgtggtggacacaagtatcagcaaaatgcagaacagtatggtgggacacgtgattactggcaagccaatgggttactgggatccaagatcaggtagacctcctggaactggggttgtgtatgatcgaactcaaggacaagtaccagattccctaacagatgatcgtgaagaagaggagaattgggatcaacaggatggatcccatttttcagaccagtccgataaatttcttctatcccttcagaaagacaagggggcatccagtttattactcaaccgtaaccgattttgccaggttacgcggctgcaggcatgcaagtctttggcgcgcgatcgaccaattctcatgtttga

SEQ ID NO: 9470 - DNA, 1860 bp, Homo sapiens
  SIMILAR (22)..(669): 941254mologous to Homo sapiens KIAA1322 protein,accession number AB037743,Smith-Waterman Score=1068.
atgaggagtgtggctgcggaaccccagcgcgtggcctgtgacccagcttccccacttgcccgccgggaatatgaagacaaggctggaagacctagcaagccaccctctccaaagcagaatgtgaggaagaatcttgactttgaaccactttccaccaccgcactcatcctcgaggacagaccagcaaatctcccagcaaaaccagctgaagaagctcagaagcacagacagcagtatgaagaaatggtggttcaggccaaaaagcgagagctgaaagaagcccagcgaaggaagaagcagctggaagaaagatgcagagtcgaggaaagcattggaaacgctgtgctcacctggaataatgagatcttacctaactgggaaacaatgtggtgctctagaaaagttcgagatttatggtggcagggaatccctccaagtgtgagaggcaaagtctggagcttagccattggcaacgagttaaatatcacccacgagctctttgacatctgtcttgcccgagccaaggagaggtggcggtcccttagcacaggaggctctgaagtggagaacgaagatgctggtttttcagcagcagacagagaagccagtctggagcttattaaactggacatttctagaacatttcctaatctctgcattttccagcaagttctcatctttgtggatttccgtgtgggtcttcagaaatcttttcagaagaggaaagagagggaatctacaaagctccagcagctttggtcctggtgtctgggtggtccatatcatgacatgttgcacagtattttgggcgcttatacttgttaccggccagatgtgggttatgtccagggcatgtccttcatagcagcagtgttgatcttgaacttagatactgcagatgcctttattgccttttctaaccttctgaataaaccctgtcaaatggcgttttttagagtggaccatggccttatgttgacttattttgctgcatttgaagtattctttgaagaaaatttgccgaaattatttgcgcatttcaagaagaacaacctaactccagatatctacctaattgattgtgattcaggctccttgttgggtgctgacagttcggtgaaagctcagatcagaaacaggttgggcagtagggaggaagcaaaggggaagaacagactttacataagacctgtcctagaagctgccatttcagaagcactcgtcactgtggtcttcagtgttcaggagcaggtgtacctatttctgggcacagaagaagtcactgaggcccatggtcccggggccctgattagtagacagggcagaggccagttctgttccgtggatgccgtcttcctccttcacgacagccctgaactgccctcgtccttaccccatggtgcttccttgcctctagcaagctcagacaagcaggcggaacagacctggctaggagctgtgggctctgtgcaatgcacgtccataactgcatgtcctcgggacctggaggacaggccgcatctaacggagcaccccccggccggaatccactgtgggcagaacccatgcccctgtcacttgatctttaccttatatagtaaatctctgcccctcgacctggcctgtcgtatctgggacgtgttctgtcgcgatggggaagagttcctgttccgcacggccctgggcatcctgaagctgttcgaggacatcctgaccaagatggacttcattcacatggcccagttcctgacccggctgcccgaggacctgcccgccgaggagctgtttgcctccatcgccacgatccagatgcagagccgaaacaagaagtgggctcagcgtagccggcaagtggcgtga

SEQ ID NO: 9471 - DNA, 991 bp, Homo sapiens
  SIMILAR (722)..(811): 931254mologous to Homo sapiens KIAA1322 protein,accession number AB037743,Smith-Waterman Score=134.
atggaggactggaaagttagaggccatcaggaaaagactctggcctttgaagtccagtcgttttcatgctctgaaagggagaccacactggtgctgctgctccggagtccagcagtccctcagctgctgcttcatgggctgtgtggcccggatttgtccacaaaggctgctcagtgtcattttaaagccatatggcagagcctgggaaacacgctgggggccgtcagcgatcaggccacacccggccatgtgaagagcctacctcccggggccctgattagtagacagggcagaggccagttctgttccgtggatgccgtcttcctccttcacgacagccctgaactgccctcgtccttaccccatggtgcttccttgcctctagcaagctcagacaagcaggcggaacagacctggctaggagctgtgggctctgtgcaatgcacgtccataactgcatgtcctcgggacctggaggacaggccgcatctaacggagcaccccccggccggagtccactgtgggcagaacccatgcccctgtcacttgatctttaccttatatagtaaatctctgcccctcgacctggcctgtcgtatctgggacgtgttctgtcgcgatggggaagagttcctgttccgcacggccctgggcatcctgaagctgttcgaggacatcctgaccaagatggacttcattcacatggcccagttcctgaccccggctgcccgaggacctgcccgccgaggagctgtttggcccctccatcgccacgatccagatgcagagccgaaacaagaagtgggctcaggaacctggccacgaactagagtggccagataggtctttcaggcccagagtgctggcctgccccatgggctcccgcgagcatcgcctgcagccagcctgctctggcagcaccggccagggccacaccaaggcactgtttcccgagacttgctgccaaagccccattttccaggatgcctga

SEQ ID NO: 9472 - DNA, 2679 bp, Homo sapiens
  SIMILAR (1311)..(154): 1001254mologous to Homo sapiens similar to yeast adenylate cyclase (S56776),accession number D86984,Smith-Waterman Score=1970.
ctactgacaccagattcttgtgttctcagctctcctatagccacaatgtgggcattcattagctatgccaatcagttgctcagactcggactttgaaccggggctaacattacaaagaagtggaagccatgaagaatctattctgtgggaggcattgttgttggtcacagcaaagtactgcaaattactcagatactggatttcttctggaatgaaggtcaagtggttatagcttagatccaaataatgtagtttagtgcataggaaaagctgcaagggcagattctcaatattattatggtccaaagagagctgctctaggttagataatgccccaatctgtgcaggaatataagcaatgttattgtgccacaactttaagcaggaaagattctgaagatgctgaaagctaatgatctcttccacagttttaaggttattttcccttaggtctaactcatgcaaattattcaggctgaaaatggaatgtgggatgcgttccaggtcacagctgatcagttctaggcttttcagattgaccatctttttcaagttgttcaacacaaccagtttgcttccctcattatcaagggacagtttctgcaatgaaggcaggaggtctgtaacaacttgtgggatccgggagaggctgctcttcaagtacagggtccttagattttttaagtcctgaaagccctccaactgcatagtactcaactgttcagggagaacacagcccgaaagataaagttccttgagattcttgaggtgaaatacccagcgtgggatttttcccatttcagtaaatttcaggcggaggatttttaaattctcctctagaaaggccagtgcaggatggtctacgaccagagatgaatggtacacacgaagctccttgaggttgaccagctgtgagactgcagagggcagcttcacctctgggataagctccaggcttagcacttccatttcagttaactcaaagacattgtctggaagaccgttgagcataaaaagatgcagttctatcttgtcctgggcatttttcacaagcttacttttcagtttctcaactgtccattcattattgaggttgatctgtttcagtttgttctcactgacctctgataggaatatggagaagcgtttggaataaagaggatcatactgatcagccagatgaaggatgaaggcaaagtcattcttgacatcagggatgtcactgtagttgcttttttctcttaacgcctcaaaggaatattgcttcagggaactcctcagcatccaccacaggctgtaggaagaggtcagaccataaagtataaccaaaatgacataaaatgaagccaggaccttaaagatttctgccaaggaatagacacactggtagcgcttatatcctgtaaaagcctgcacatcaactgaacagtcgatttcaagagtgatgtgggttaaaaaatatggaacataagttatgatgagcacaaacaaaatgactttgactattatctgtttcagatatactctataaatgatgtccttctgctccacatgcatgcggaatcttttcactttttcaaagatggctttggcctgttcaccctccttcttgtccaggacactggaagttgggctttctatgccagctgactccaaacctggctgtgggtagggcaatgactgtttgccggaatctatgtcagctgaacaccctgaggacgaaagcaaaatcttggacttggagagtttcagaggcctcactgactgctcagccactgtttctgaaagggcgcgggtggtccatggagaatcgaagcacttgtgaaggatggccacaaaatgctcgagcctggaactggtactggggtagtgaagccaaaagttgctgcaggctgcaaagatgagcgtgtgcaagagcaccagataggggaaaaactttgcaaaccaatggagctgtttctcgtaacagacggcatcaatatacgagtactgctgtcggaggaggtcattagggtcccagaagcaagggcagtgaggacctggcccacgtccctggcacgggctgtctgattctccttcgctgtggcgggaagatggccggatttgaaggtaatacccaagaccccgattccctattttgggggtacagacaacaggacactggacatcttggtccctacccttggcttctaggccagtggaacaagtcactgacttggaaaccagggcctgccttctttcggcttggggacccaaggtgcagctggtagtagcagttctgtggaacgctggcacaatcacctgccaaaaccacccacagtggtggatgggggacagggctgaggttgacactctggagcatggatgagcaaagggaaggatgtggccttggatgtggctctcagggatgccccagacctgggatgtgggcttcagggtagctggccaaggagctgccccttcggctgggtcagcaggcggaaaggcacaagcatgaggatggtcttggtcccttctccggaggccacagcccccaggatgcagggagcctggttttgccacagccagcaacaacttgacctggggctcctgtctccacctccatggattccagccaatcacaattgcaagcccagggcagggcaggcacgtgctggaggagcccctaggccccatcat

SEQ ID NO: 9473 - DNA, 1078 bp, Homo sapiens
  SIMILAR (456)..(740): 961254mologous to Homo sapiens unnamed protein product,accession number AK022579,Smith-Waterman Score=453.
agctgcagagggctggacccacaagtgggttcctggcgcaggagatgtgggttggtcagggggcacctgccatgggctcaggcctgcctgcactgtgccccttccaggatgacaccatctccatcaaccacaactgggtcaatggcttcaacctggccaacatgtggcgcttcttgcagcaggagctatgcgccgtgcaggaggaggtcagcgagtggagggactccatgcccgactggcaccaccactgccaggtggggtggctacgcatggaggctaccctcctgggggaggcttttaggctgcatggctcagactcccttggtcaccgcgcagcttctcagtgcctctgtcttaatggtcccttcttcgtccttggggactgggcacatgtcgggtcctttgcaggttggactgtgtccatggtgttagctcactggcctcttccctctgcccaggtcatcatgaggtcctgctcgggcatcaactttgaagagttttaccacttcctcaaggtcatcgctgagaagaggctcctggtcctgagggagtcagccgctgagcacggtgctgggttgggtttcgaacaggcagcctttgatgttgggcgcatcacagaggtgctggcctccttggttgcgcactccgacttccagagagtggacaccagcgcgttctcaccacagcccaaagagctgctgcagcagctgagagaggctgttgatgctgctgcggccccatagcacctgggcctgagggactgtgcctgctgtgcactcacagctgggtcttcccaaggatgctgttctcaggagtggtgggtccccagcccctcttcacactgggtatgatggaggtgtgggcgggctcgtccaggccgatcaaggcacagcagtgagcagcggaggccttcaaatccggccatcttcccgccacagcgaaggagaatcagacagcccgtgccagggacgtgggccaggtcctcactgcccttgcttctgggaccctgtgagggcaggaaccggagccttgccctcatgactttagcggccgctcgcgatctagacccacgcgtccg

SEQ ID NO: 9474 - DNA, 2415 bp, Homo sapiens
  SIMILAR (984)..(1190): 691254mologous to Homo sapiens unnamed protein product,accession number AK023030,Smith-Waterman Score=206.
gagagagatctcctcagcctccctagtacctgggattacaggaaggcgtctccactcccggcttttttttttttttttttttttttaaagagactaggtttcaccatgttgcccaggctggtcttgaactcctgagctcaggtgatgcatccacctcagcatctcaaagcactgggattataggcatgatcagtactttctaataagcagaaccattgtagtcagactgccccgccccctcccccgccagcagcgtctggctctagaggatgggtctgggggctcttttgggggcttgcagccatcctggaaggctccactggagccgattggtctcagttgccccactcgtgctgccctagtctcctcgtgcctcacgtgctgtcggtggtgcccttgcgccctcctcacagggactttccggtggaggacgttttcaccctgcctgtgtacttctcgtccgactggctgaatgagttctgggatgcactggatgtggatgactaccgctttgtctacgcggggcctgcgggcagctggtccccgttccatgctgacatcttccgctccttcagctggtctgtcaatgtctgtgggaggaagaagtggctcctcttccccccagggcaggaagaggccctgcgggaccgccacggcaacctgccctacgacgtgacctccccagcactctgcgacacacacctgcacccacggaaccagcttgctggcccacccttggagatcacgcaggaagcgggcgagatggtgtttgtgcccagtggctggcaccaccaggtgcacaacctggatgacaccatcttccatcaaccacaactgggtcaatggcttcaacctggccaacatgtggcgcttcttgcagcaggagctatgcgccgtgcaggaggaggtcagcgagtggagggactccatgcccgactggcaccaccactgccaggtcatcatgaggtcctgctcgggcatcaaactttgaagagttttaccacttcctcaaggtcatcgctgagaagagggctcctggtcctgagggaggcagccgctgaggacggtgctgggttggggtttccaacaggcagccttttattgttgggcgcatcacagaggtgctggcctccttggttgcgcaccccgacttccagagagtggacaccagcgcgttctcaccacagcccataaggtaggctgcagcagctgagagaggctgttgatgctgctgcggccccatagcacctgtcgtgaggatagaaggacgggtggacgagaggcagcctcctgctccggggcccttccagaaataaagaccgccctccctgtgacctggggcccacccctgtcgaggcttgtggcctggctgttcatggccactgcctgggtgcctgttttcagggtgaaggcccaatggaggtcagggacccaagatggggatggtggcccttctgacctgcaagcagggcctgctgggagctcggagatggtgccaggacctggctcttttgggggccctgcctccttaggccaggacgcctgagctgacaggagtctgtgtctggtgtgccttctctggtggcatcctcttaataggccagccctgtcccctcgtctcaggccattggaccacccctggctctgccctgtgggttcagggaggggttgaagcagtgctgggcaagctcaccagggcctccaggcagggctggggttggcctccatcacctccaggtgatgggctgtggaaccagcggcctgcgccttcctctgggtacccagagtggagggctgggttgggctggcctttgcccacctcccctgcctttgcagggccctgtggacagctggagaggccacagatggggtggaatcccatctgctgctgaatcctcacctgggcctgagggactgtgcctgctgtgcactcacagctgggtcttcccaaggatgctgttctcaggagtggtgggtccccagcccctcttcacactgggtatgatggaggtgtgggcgggctcgtccaggccgatcaaggcacagcagtgagcagcggaggcctgtggtggggaatggactctcgtgggatcctcttgcagaggatgccccaggcctgaaccctctagtggatccacagtttgtggagactggcactctcccagccctgtccttgaccgagagtccagcattttttcagttggcccctggttggctgcctcaccccagcaggggaggaggcatccgaatccacagggacggcacgtgccatggctatgcacattgcctgcccgtggcatcaactggggcccgctggcacttgtctaggatggaagcccccaagaagggcaggggtttctgtctgctctgttcagtgaatcatgtgaagtgcttgcaaaggcagctttacacagt

SEQ ID NO: 9475 - DNA, 888 bp, Homo sapiens
  SIMILAR (79)..(885): 801254mologous to Homo sapiens acidic ribosomal phosphoprotein (P0),accession number M17885,Smith-Waterman Score= 1050.
atgaaacggagggctgtcatgggcccaccccaggtgcaagcctggaaggccctggacctctgggagtcctctcaagtcatggaagggaaggccgtggtgccaatgggcaggaaccccatgatgcgcaaggccacccaaggacaactggaaaacagcccagctctggagaaactgttgcctcctctgcaggggaatgtgggctttgcgttcaccaaggaggacctcactgaggtcagggatctgctgctggccaataaggtgccagctgccacccgtgctggtgccattggcccatgtgaagtcactgtaccagcccagaacactggtctgggacccgagaagatttcttttttccaggctttaggcattaccactaaaatctccaggggcaccactgaaatcctgagtgatgtgcagctgatcaagactggagacagagtgggagccagcgaagccacactgctgaacacgccgaacatctctcccttctcctttgggctggtcatccagcaggtgttcaacaatggtagtatctacaaccctgaagtgcttgacatcacagaagaaactctgtattctggcttcctggagggtgtccgcaatgttgccagtgtgtctgcaaactggctacccacctgttgcatcagtacccccttctatcatcatgggtacaaaggatgcctggctctatctgtggagactgattacaccttcccgcctgctgaaaagatcaagaccttcttggctgatccatctgcctttgtggctgctgcccctgtggccactaccgccacggctgctcctgctgctgcggcagccccaactaagtttgaaaacgaggagtcggaggagttggatgaggatatgggatttggtctctttgactaa

SEQ ID NO: 9476 - DNA, 988 bp, Homo sapiens
  SIMILAR (77)..(988): 911254mologous to Homo sapiens acidic ribosomal phosphoprotein (P0),accession number M17885,Smith-Waterman Score= 1361.
tagtccagtgcggtggaattcgtggaagtgacatcgtctttaaaccctgcgtggcaatccctgacgcaccgccgtgatgcccagggaagacagggcgacctggaagtccaactacttccttaagatcatccaactattggatgattatccgaaatgtttcattgtgggagcagacaatgtgggctccaagcagatgcagcagatccgcatgtcccttcgcgggaaggctgtggtgctgatgggcaagaacaccatgatgcgcaaggccatccgagggcacctggaaaacaacccagctctggagaaactgctgcctcatatccgggggaatgtgggctttgtgttcaccaaggaggacctcactgagatcagggacatgttgctggccaataaggtgccagctgctgcccgtgctggtgccattgccccatgtgaagtcactgtgccagcccagaacactggtctcgggcccgagaagacctcctttttccaggctttaggtatcaccactaaaatctccaggggcaccattgaaatcctgagtgatgtgcagctgatcaagactggagacaaagtgggagccagcgaagccacgctgctgaacatgctcaacatctcccccttctcctttgggctggtcatccagcaggtgttcgacaatggcagcatctacaaccctgaagtggcttgattatcacagaggaaactctgcattctcgcttcctggagggtgtccgcaatgttgccagtgtctgtctgcagattggctacccaaactgttgcatcagtaccccattctatcatcaacgggtacaaacgagtcctggccttgtctgtggagacggattacaccttcccacttgctgaaaaggtcaaggccttcttggctgatccatctgcctttgtggctgctgcccctgtggctgctgccaccacagctgctcctgctgctgctgcagccccagctaaggttgaagccaaggaagag

SEQ ID NO: 9477 - DNA, 1196 bp, Homo sapiens
  SIMILAR (226)..(936): 721254mologous to Homo sapiens beta-tubulin,accession number U83110,Smith-Waterman Score=866.
atgagggagattgcgctcacgcagacccggcagtgcgggaagaagatcggtgccaaggttggcatccggggctctgaggtcccagctccggcctactgggtggccagggaagatgttggcagtggcagtggcttgggcggtggctggtacgtgccctgcgctgtgctcgtggacctggagccggtcaccatggactctctgcgctcggggcccttcgggctcatcttcaggccgacaacctcatctttgaaactcatagaaaatgcagataagaccttttgcatagataatgaagctctatatgacatctattccagaaccctaaaactgcccacacctacctatggtgacatgaaccacctgttatctgctaccatgagtggggtcaccatgtgcctgggcttcccaggtcagctgaatgctgacctacagaagctgtctgtgaacatggtcccatttcccaggctgcatttcttcatgcctggctttgccccactgaccagccggggcagccagcattaccaggccctgactgtggctgagcttactcagcagatgttttatgctaagaatatgatggctgcccgtgacccccgtcacggccgctacctaacggcggctgccattttccagggtcgcatgcccatgagggaggtggatgaacagatgttcaacattcaagataagaacagcagctactttgctgactggttccccgacaacgtaaaaacagccgtctgtgacatcccaccccggggggctaaaaatgtcaggcagcttcattgggaataatgcggccatccaggaactctttcacgtgtgtctcagagcagtttacagcaatgttcaggcgcaaggcccttcctccactggtacacgggcgagggccatggatgaagatggaattcacccgaggccgagagcaacatgaatgaccctggtgtctgaatatcagcaatatcaggatgccacggcccaaggaggaggaggatgaggagtatgctgaggaggaggtggcctagaactctccttttctaggtaaagcgggggaggcagtgtgtattcttcactgtgttgtgacagctatgtgtcactacgcacttgttcatttgtgtcttcacatctcctgctgctgcattttaaagcacttttatagtgtgcagttttgactaataaagtattctcacagcaaaaaa

SEQ ID NO: 9478 - DNA, 926 bp, Homo sapiens
  SIMILAR (402)..(677): 321254mologous to Caenorhabditis elegans F11C1.1,accession number Z54270,Smith-Waterman Score=153.
ccgaggcaggcgcgcggcgggcaggcctgggagggggcgggtccgcgcgagcttcggaggagcccgccctgccagaggagagggaggtcacggcgtaaaggtgcagctgccgccaccgccgcttctgcaaggtctcagggacgggctgcagccatgtcctattgccggcaggaaggctttgcccaggatggttccttctggaatgactattcccctccttccctccctgaagctctttgtcagggacaaaggtaggatccctccccttccgtcttctccactggatgcctgtgtcgtattcatctgtgaccaccaggtactaccacagagctggagctgaggaagggaaggatcgaatcatatttgtaaccaaaaaagatcatgaaactccaagcagtgcagaattggtggctgatgaccccaacgatccatacgaggagcatggattgatactgccaaatggaaacattaactggaactgcccatgccttgggggaatggccagcggtccctgtggagaacagtttaagtcagccttttcctgcttccactatagcacggaggagatcaaggggtcagactgtgtagaccagttccgggccatgcaggaatgcatgcacaaatacccagacctctatccccaagaggatgaggatgaggaagaggaaagagagaagaagccagcacaacaagcagaagaaacagctcccattgaggccactgcaaccaaagaagaggagggatcaagttaatgaaggccacaaggcactgagcaccagtccttttggagtggaccttttgcaaaaggccttgtcatcaccttccaagaaagtttccttctgttgtcctgtgcattataatatacaaaataacttattttgatgatcagaggtcttgaggtcttgacctcttgacatatacactgg

SEQ ID NO: 9479 - DNA, 807 bp, Homo sapiens
  SIMILAR (139)..(804): 931254mologous to Rattus norvegicus TIP120-family protein TIP120B,accession number AB029324,Smith-Waterman Score=1053.
atggggaagttgcgcacgatgtgggtgtacaccgaacaaccggggaaattggtgcgtaatgcgggaatgcgaagaaattggggcgatatcgggacgcaatgggtgacatattgggggcaacgcgcggcaatatcgggagagttcatggagagcctgcaggacccagacctgaacgtgcgccgtgcgactctggctttcttcaactcagctgtgcacaacaagccctcgctagtccgggacctgctggatgacatcctgcccctcctctaccaggagacaaagatccggcgggacctcatccgagaggtggagatggggccctttaaacatacagtggacgatgggctggacgtgcggaaggcggcctttgaatgcatgtattcactgcttgagagctgcctgggccagctggatatctgtgagttcctgaaccatgtggaggacgggctgaaggaccactacgacatccggatgctgaccttcatcatggttgcccggctggccaccctgtgtcctgcacctgtcctgcagagggtggaccgactcattgagccactaagggccacctgcactgccaaggtcaaagctggttctgtgaagcaggagtttgaaaagcaagatgaactgaagcgctctgcaatgagggcagtggctgccctgctgaccatccccgaggtggggaaaagccccatcatggccgacttctcttcccaaatcagatccaaccctgaacttgctgccctctttgaaagcatccagaaggattccgcttcagcccccagcacagactcaatggagctcagctag

SEQ ID NO: 9480 - DNA, 4159 bp, Homo sapiens
  SIMILAR (191)..(1159): 891254mologous to Rattus norvegicus TIP120-family protein TIP120B,accession number AB029324,Smith-Waterman Score=1517.
ctccagcctcctggagaagatgacgtccagcgacaaggacttcaggttcatggccaccagcgacctgatgtcggagttgcagaaggactccatccagctggacgaggacagcgagcgcaaggtggtgaagatgctgctccggctcctggaggacaagaacggtgaggtgcagaacctggctgtcaagtggctgggtgtcccgctgggcgccttccacgccagcctcctgcactgtctgctgccacagctgagcagcccgcgcctggcggtgcgcaagcgggcggtcggagcgcttggccacctggcgaccgcctgcagcaccgacctcttcgtcgagctcgctgaccacctactggaccggctgcccggcccgcgggtgcccaccagcccgactgccatccgcaccctgatccaatgtttgggcagcgtcggccgccaggccggccaccgcctcggggctcacctggaccgcctggtgcccctggtggaggatttctgcaacctggatgatgatgagctccgggagtcctgcctccaggcttttgaggccttcttgaggaagtgccccaaggaaatgggtcctcacgtgcccaacgtgaccagcctctgcctccaatacataaaacacgaccccaactacaactacgacagtgatgaggatgaggagcagatggagacagaggatagtgaattcagtgagcaagagagtgaagacgagtacagcgatgacgatgacatgagctggaaggtgcgccgggcagctgccaagtgcatcgcagccttgatcagctcgcggcctgacctgctgcccgatttccactgcaccctggcacctgtgctcatccgccgcttcaaagaacgcgaggagaacgtcaaggctgacgtcttcactgcttacatcgtgctgctgcggcaaacacggcccccgaagggatggctggaggccatggaggaacccacccagaccggcagcaacctccatatgctacgtggacaggtgccccttgtggtcaaggccctgcagcggcagcttaaagatcggagcgtcagagcccgccagggatgcttcagcctcctcaccgagctggcgggtgtcctcccaggcagcctggccgagcatatgcctgtgctggtatcaggcatcatcttctcgctggcccgaccgctccagttcctccaccatccggatggatgccctggccttcttgcaggggctgctgggcaccgaaccagctgaggccttccacccacacttgcctatcctcctgccacctgtgatggcctgtgtggctgactctttctacaagattgcagccgaggccctggtggtgctgcaggagctggtgcgggccctgtggccgctgcacaggcctcggatgctggatcctgagccatatgttggagagatgtctgctgtcaccctggcgcgacttcgtgccactgacctggaccaggaggtgaaggagcgggccatttcctgcatgggccaccttgtaggccacctgggtgaccggcttggggatgacctggagcccacgttactgctcctcctggaccgcctgcggaatgagatcacccggctgcccgccatcaaggcgcttacgctggtggccgtatccccactacagcttgacctacagcccatcctggccgaggcactgcacattctggcctcattcctgcggaagaaccagcgggctttgcgactggccacactggcagccctggacgccctggcccagagccagggcctcagcctcccaccgtctgccgtgcaggccgtgctggctgagctgcctgccctggtcaacgagagcgacatgcatgtggcccagctggctgtggacttccttgccacagtgacccaggcccagccagcctctttggtggaggtcagtggccctgtgctctcagagctgctgcggctgctgcgttcgcccctgttgccagccggagttctggcagctgctgaaggcttcctgcaggccctggtagggacccgtcccccgtgtgtggactatgccaaactcatcagcctgctcactgcgcctgtttatgagcaggctgtggatggtgggcctggcctgcacaagcaggtgttccactcattggcccggtgtgtggcagccctctcagctgcctgtccccaaagaggcggaaagcacagccagtcgcctggtctgcgatgccaggtcgccccactccagcacgggggtcaaggtcctggcattcttgtcgctggctgaggtgggtcaggtggctgggccaggcccccagcgggagctgaaggcggtgctcctggaagctttggggtcacccagtgaggatgtgagggctgcagcctcgtatgcactgggccgtgtgggtgctggcagcctgcccgacttcctgcccttcctgctggagcagatcgaggctgagccccgacgacagtacctgctgctgcactcactcagggaggccctgggggccgcccagcctgacagcctgaagccctacgccgaggacatctgggccttgctgttccagcgctgcgagggtgctgaggagggcacccggggggtggtggccgagtgcattgggaagctggtccttgtgaacccttcgttccttctgccccgcttgcggaagcagcttgctgcaggtcggccacacacccggagcaccgtcatcacagcggtcaagttccttatctcggaccagccccatcccattgaccccctcctgaagagcttcatcgctgtgcacaacaagccctcgctagtccgggacctgctggatgacatcctgcccctcctctaccaggagacaaagatccggcgggacctcatccgagaggtggagatggggccctttaaacatacagtggacgatgggctggacgtgcggaaggcggcctttgaatgcatgtattcactgcttgagagctgcctgggccagctggatatctgtgagttcctgaaccatgtggaggacgggctgaaggaccactacgacatccggatgctgaccttcatcatggttgcccggctggccaccctgtgtcctgcacctgtcctgcagagggtggaccgactcattgagccactaagggccacctgcactgccaaggtcaaagctggttctgtgaagcaggagtttgaaaagcaagatgaactgaagcgctctgcaatgagggcagtggctgccctgctgaccatccccgaggtggggaaaagccccatcatggccgacttctcttcccaaatcagatccaaccctgaacttgctgccctctttgaaagcatccagaaggattccgcttcagcccccagcacagactcaatggagctcagctagtcccctcagcaccaaggtgggccctcgcttaagagaaaggagcccacccaagtccgaggcctccccatcccaccatcgcaggtctctacttttgcccttccaccatctcactgggggccctgtcgctcctggtcagggcttacagtgccttctccagggacccaactcaaaggcccccagcccaagctgtgaggctgccaacagttgggccccttccttaactcaggacagtcatccaaagaaatagggtgaggaagttttccagtgacttcacactgtacccctccatagtctgtctggttccttcagagggtgtctctgcctcacaaactagtagtatttagaaataggctgtgctgtcagctgtaaaagatcaggaggcagcagacaccactctggtttcttcactgcattcagcaatgcctgaagttagtgctcaggccgggcatctcaaaagaaaagatacttgagttattcacattttaaaattcaaaacggttcatttttaagtggcagtgatgaatcagaaatttggaagatgatacgggtttcttttttccagggaggaggaatgggttgggtagggaactggacaggcttggacctcatgtttcatttctaatttcaaaatacttattagcaaattgggcaacaatgggcatcttccatgccaccacccaggcataaccagttggtttgtttccttctgaggaaggtttcaaatgtgtctagtgttcagtattgaggacaaagaaatacaagtggcaggcccaagtattttctgtgatatcccaggttaataaagattagattctaagtt

SEQ ID NO: 9481 - DNA, 3178 bp, Homo sapiens
  SIMILAR (904)..(2271): 901254mologous to Rattus norvegicus TIP120-family protein TIP120B, alternatiely spliced form,accession number AB029341,Smith- Waterman Score=2061.
atgggggttaagttacttgtccatggtcacacggccagggctcacctggaccgcctggtgcccctggtggaggatttctgcaacctggatgatgatgagctccgggagtcctgcctccaggcttttgaggccttcttgaggaagtatgtatggtgccccaaggaaatgggtcctcacgtgcccaacgtgaccagcctctgcctccaatacataaaacacgaccccaactacaactacgacagtgatgaggatgaggagcagatggagacagaggatagtgaattcagtgagcaagagagtgaagacgagtacagcgatgacgatgacatgagctggaaggtgcgccgggcagctgccaagtgcatcgcagccttgatcagctcgcggcctgacctgctgcccgatttccactgcaccctggcacctgtgctcatccgccgcttcaaagaacgcgaggagaacgtcaaggctgacgtcttcactgcttacatcgtgctgctgcggcaaacacagcccccgaagggatggctggaggccatggaggaacccacccagaccggcagcaacctccatatgctacgtggacaggtgccccttgtggtcaaggccctgcagcggcagcttaaagatcggagcgtcagagcccgccagggatgcttcagcctcctcaccgagctggcgggtgtcctcccaggcagcctggccgagcatatgcctgtgctggtatcaggtaggctggactgcaaccaggtatctgctgttctgggccacttccagaacccagaccccacccctgagttgagcccccagttcctgagacagtctgagacccaatcccaggctcagtccctggtcaagagtctccagtggcctcccactaccagcagtgagaacaaggctggctccagcatcatcttctcgctggccgaccgctccagctcctccaccatccggatggatgccctggccttcttgcaggggctgctgggcaccgaaccagctgaggccttccacccacacttgcctatcctcctgccacctgtgatggcctgtgtggctgactctttctacaagattgcagccgaggccctggtggtgctgcaggagctggtgcgggccctgtggccgctgcacaggcctcggatgctggatcctgagccatatgttggagagatgtctgctgtcaccctggcgcgacttcgtgccactgacctggaccaggaggtgaaggagcgggccatttcctgcatgggccaccttgtaggccacctgggtgaccggcttggggatgacctggagcccacgttactgctcctcctggaccgcctgcggaatgagatcacccggctgcccgccatcaaggcgcttacgctggtggccgtatccccactacagcttgacctacagcccatcctggccgaggcactgcacattctggcctcattcctgcggaagaaccagcgggctttgcgactggccacactggcagccctggacgccctggcccagagccagggcctcagcctcccaccgtctgccgtgcaggccgtgctggctgagctgcctgccctggtcaacgagagcgacatgcatgtggcccagctggctgtggacttccttgccacagtgacccaggcccagccagcctctttggtggaggtcagtggccctgtgctctcagagctgctgcggctgctgcgttcgcccctgttgccagccggggttctggcagctgctgaaggcttcctgcaggccctggtagggacccgtcccccgtgtgtggactatgccaaactcatcagcctgctcactgcgcctgtttatgagcaggctgtggatggtgggcctggcctgcacaagcaggtgttccactcattggcccggtgtgtggcagccctctcagctgcctgtccccaagaggcggcaagcacagccagtcgcctggtctgcgatgccaggtcgccccactccagcacgggggtcaaggtcctggcattcttgtcgctggctgaggtgggtcaggtggctgggccaggccaccagcgggagctgaaggcggtgctcctggaagctttggggtcacccagtgaggatgtgagggctgcagcctcgtatgcactgggccgtgtgggtgctggcagcctgcccgacttcctgcccttcctgctggagcagatcgaggctgagccccgacgacagtacctgctgctgcactcactcagggaggccctgggggccgcccagcctgacagcctgaagccctacgccgagggacatctatgtcttgctgttccagcgctgcgagggtgctgaggagggcacccggggggtggtggccgagtgcattgggaagctggtccttgtgaacccttcgttccttctgccccgcttgcggaagcagcttgctgcaggtcggccacacacccggagcaccgtcatcacagcggtcaagttccttatctcggaccagccccatcccattgaccccctcctgaagagcttcatcggagagttcatggagagcctgcaggacccagacctgaacgtgcgccgtgcgactctggctttcttcaactcagctgtgcacaacaagccctcgctagtccgggacctgctggatgacatcctgcccctcctctaccaggagacaaagatccggcgggacctcatccgagaggtggagatggggccctttaaacatacagtggacgatgggctggacgtgcggaaggcggcctttgaatgcatgtattcactgcttgagagctgcctgggccagctggatatctgtgagttcctgaaccatgtggaggacgggctgaaggaccactacgacatccggatgctgaccttcatcatggttgcccggctggccaccctgtgtcctgcacctgtcctgcagagggtggaccgactcattgagccactaagggccacctgcactgccaaggtcaaagctggttctgtgaagcaggagtttgaaaagcaagatgaactgaagcgctctgcaatgagggcagtggctgccctgctgaccatccccgaggtggggaaaagccccatcatggccgacttctcttcccaaatcagatccaaccctgaacttgctgccctctttgaaagcatccagaaggattccgcttcagcccccagcacagactcaatggagctcagctag

SEQ ID NO: 9482 - DNA, 318 bp, Homo sapiens
  SIMILAR (206)..(316): 971254mologous to Homo sapiens HSPC241,accession number AF151075,Smith-Waterman Score=193.
ccggggcgttcctgagtttatttggtccatacatgagtgttgacgcacagtctcttctcctcgcactcacagtagaagcaggagatgggtgggtgatgggacacttgctgtccccctttgcccagtcggcggggaggaggccgtatttctgctggccagagacgtcgcgtccctggctgggcattcagtcacccccaggaaaggaggtgtgcctagattgatcggtataaggctcactctcccgccccccaaagtggttgatcgttggaacgagaaaaggggcatgttcggagtgtatgacaacatcgggatcctggg

SEQ ID NO: 9483 - DNA, 318 bp, Homo sapiens; identical to SEQ ID NO: 5930
  SIMILAR (182)..(271): 1001254mologous to Homo sapiens unnamed protein product,accession number AK000370,Smith-Waterman Score=164.

SEQ ID NO: 9484 - DNA, 1455 bp, Homo sapiens
  SIMILAR (1)..(771): 981254mologous to Cloning vector pZC320 SopA,accession number U26464,Smith-Waterman Score=1327.
atgaaactcatggaaacacttaaccagtgcataaacgctggtcatgaaatgacgaaggctatcgccattgcacagtttaatgatgacagcccgaaagcgaggaaaataacccggcgctggagaataggtgaagcagcggatttagttggggtttcttctcaggctatcagagatgccgagaaagcagggcgactaccgcacccggatatggaaattcgaggacgggttgagcaacgtgttggttatacaattgaacaaattaatcatatgcgtgatgtgtttggtacgcgattgcgacgtgctgaagacgtatttccaccggtgatcggggttgctgcccataaaggtggcgtttacaaaacctcagtttctgttcatcttgctcaggatctggctctgaaggggctacgtgttttgctcgtggaaggtaacgacccccagggaacagcctcaatgtatcacggatgggtaccagatcttcatattcatgcagaagacactctcctgcctttctatcttggggaaaaggacgatgtcacttatgcaataaagcccacttgctggccggggcttgacattattccttcctgtctggctctgcaccgtattgaaactgagttaatgggcaaatttgatgaaggtaaactgcccaccgatccacacctgatgctccgactggccattgaaactgttgctcatgactatgatgtcatagttattgacagcgcgcctaacctgggtatcggcacgattaatgtcgtattaagtagcagaaatgcccaactactacttattagatttgattcccagaatctccgggccctgagaaaggcatgctgcctggtacaagcggagagtagaaccaacacagaggtggagctgggtagccctgggttcaaatctaggctctcggggtctttgaggaacctctggcgggaggtgacccgatacctgcggctgggggacattgacgcagccaccgagcagaagcggcacctggaggagaagcaacgggtggaggaacggaagcgcgagaacctccgcacaccatggaagcccaaatattttatccaggagtttgccacatcttgtcctaggtttggggaaacaacagtgaacagaagagacaaagtggcaccgagagcctgctgtttacaaatgacacttctctggcaccccttctctcgagtttctctccaatgtgctgcttctggtgctgatgaaggttttcagtgtcatccagttttttcccacatgccccactcctgttcagtttctgcttgtgatgagtttcctgctgctgtgccaagtgaaaaatgtctcccaagatggggctacacatttcacagggaagtgtggattgatgaactgctgccaacaggacagaaagggagaaagaatggagatcgaggaactgtgtcgcctcatgaaacagatttacacagacaagcttag

SEQ ID NO: 9485 - DNA, 1859 bp, Homo sapiens
  SIMILAR (2)..(196): 951254mologous to Homo sapiens unnamed protein product,accession number AK000370,Smith-Waterman Score=338.
  misc_feature (1)...(1859): n = a,t,c or g
catcaccgctggggccacaccagaggagagagtcatttgcttcgttgagtattatctcacagcctttcacgagggccgcaagggcgctttagccaagaagccctacaaccccatcataggcgagacatttcactgctcctgggaagttcccaaggacagggtcaagcctaagaggactgcttcccggctctcctgccagctgtcatgaacacccaatggccgatgacccttcccaaaagctacaaactaaggtttgtggctgagcaagtgtcccatcacccacccatctcctgcttctactgtgagtgcgaggagaagagactgtgcgtcaacactcatgtatggaccaaaagcaagttcatgggcatgtccgtgggggtctctatgataggggaaggtgtgttgaggctcctggaacacggggaggagtacgtattcaccctgcctagtgcctacgcccggtccattctcaccatcccgtgggtggagctcggaggaaaagtcagcatcaactgtgccaagactgggtactcagcgacagtgatattccacacgaagcctttctatggagggaaagtccacagggttaccgcagaagtgaagcacaacccaaccaacaccattgtttgtaaagcccatggggaatggaatggtactttagagttcacctacaacaatggagaaaccaaagtcatcgacacaaccacactgccagtgtatcccaagaagatcagacctcttgagaagcagggacccatggagtccaggaacctctggcgggaggtgacccgatacatgcggctgggggacattgacgcagccaccgagcagaagcggcacctggaggagaagcaacgggtggaggaacggaagcgcgagaacctccgcacaccatggaagcccaaatattttatccaggagggcgatggctggggtatacttcaatcccctctggaaagcacactgatggggttggaggtgcagagctttccagtatagccctgtttttgtaggaatattaaagtagtagagtatcaagggttttgttggcattcactgagaccttgtattagcatccaagaaatgatgagagagagagaaattatatactatgaaaagtggaacccccacactctgctagaggaatgaatttattcaagagccattcggggcacgtgtgtgtacacacccgtatacgttcacacacatgcactatgtaaacatctgagtatgattacacatttaaatacttgcacttcaccaaggttaaaagtggggtaatcctaagctcccttttttattcaatggaagttttgaagtttttctatttttcactttgcccaaaaatgttttacactcacaaagatattctcacttagtcaactcccggtcaaaatgaaggtgaactggcatggcccgatcacttgtccataagggagaaagtggctcattcctgggtagaagtatgggtgggtatccatttcaaaaattattgtgattctcacctccctccccacctcagtgttttgtctgtccgcgcccaagaaagataagcaagtatttcctgctggatgggggttggcaggaagctgttaaagatttatgccagagccttgcaggatggagcacctctgggacaactaagagccaaggcccaccaaggagttttccacccgtctctcatggtcacagcgctagtcattcatttttgagaagttgcttcttttacatcagaaaactagtcaatccatatggagacttcttttgtgatgaaaaagggctttagaagtttaaatacatgcatgcacatgaaaaacatgcacaaccacagccttcatcttgtatttagtttggngaag

SEQ ID NO: 9486 - DNA, 1005 bp, Homo sapiens
  SIMILAR (60)..(344): 861254mologous to Homo sapiens Amino acid sequence of protein PRO260,accession number Y13378,Smith-Waterman Score=451.
cttttcagtgacatttctttttgtataaaaagcttataccttttgttttaaaaaattgtatgtttcatttcagcccagttcggggcacagtagtcaccaatgatcgttggggagctggtagcatctgtaagcatggtggcttctatacctgcagtgatcgttataacccaggacatcttttgccacataaatgggaaaactgcatgacaatagacaaactgtcctggggctataggagggaagctggaatctctgactatcttacaattgaagaattggtgcagccacttgtagagacagttttcagtgcaggaaatcctttgatggataattggcccacacttagatggcaccattttctgtagtttttgaggagcgactgaggcaaatggggtcctggctaaaagtcaatggagaagctatttatgaaacctataccctggcgatcccagaaatgacactgtcaccccagatgtgtggtacacatccaagcctaaagaaaaattagtctatgccatttttcttaaatggcccacatcaggacagctgttccttggccatccccaaagctattctgggggcaacacgaggtgaaacctactgggccatggacagccacttaactggattttctttggagacaaaatgggcattatgggtagaactgcccacagctaacccattcatcagatgccgtgtaaatgggggctgggctctagcccctaactaatgtgatctaaagtgcagcatgagtggctgatgctgcaagttatgtctaaggctaggaacttatcaggtgtctataattgtagcaccatgggagaaagcaaatgtaaaaactgggataagaaaaattattttggccaggttcagcccctttccctttttcccacctaaaattttttccttaaaattaccccatgttaccattttaaactctccagtgcactttgccatttaaagtctcttcacattgatttgtttccaaaaaaaaaaaaaaaaaaa

SEQ ID NO: 9487 - DNA, 627 bp, Homo sapiens
  SIMILAR (154)..(501): 831254mologous to Manduca sexta ubiquitin-fusion protein (AA 1-155),accession number X53524,Smith-Waterman Score=471.
atgcagacagtgcttaacttgcgggcctggcacggcctggacgctgcgcccctgacccgcgaccagggcggcccaggctgccggttcgccgaccacagtttgagcagcaagggcttccctttcactgccatctgcggtgaagctgccaccaaactgcagattttcgtgaaaaccctaagggggaagaccatcacccttgaggttgaaccctcagatgcgatagaaaatgtaaaggccaagatccaggataaggaaggaattcctcctgatcagcaaagactgatctttgctggcaagcaactggaagatggacgtactttgtctgactgcaacattcaaaaggagcctactcttcatcttttgctgagactttgtggtgttgctaagaaaaggaagaagtcttaccccactcccaagaagaataagcacaagagaaagaaggtgaagctggatgtcctgaaatgttataaggtggatgagaatgacaaaattagtgcccttctgacgaatgtggagctggagtgtttctgccatacagaatgtgcctccttcctcttcgccttctgccatgattgttccaacctactgggcttgatcaaggacaggaccaattcctattcagattaa

SEQ ID NO: 9488 - DNA, 701 bp, Homo sapiens
  SIMILAR (591)..(121): 381254mologous to Homo sapiens ubiquitin,accession number X63237,Smith-Waterman Score=124.
gcgtcgactttttttttttttttttttgttagttcatgtcttttattaactcatacaggtaacttggtctttctggtttgttgaaaacagtaaagtcaggacaaccatttgccacaataaatgtctgtcaaaagtgacttggccataaaaacccccagcacccacatttcatcagaaggggcactctcggacggaaggcggacttaattttgcccattcttcaatccaccttaataatatttccagggcaagcccagctttaaccttcttttctctttgtgctttattcttccttgggagggggtgtaaagacttcttcttcctttttcttagcaccacccacgaagtctcaacacgaagatggaagagtaggactcctttttgaataattgtagtcagaccaaagtacgtcccatcttccagctggcttggccagcaaaaggatcagtctctggctgattcagggagggaattcccttccttaatcctgggatcttgggcctttaacattttgctatcgtatccgaggggttcaacctcgaggggtgatgggtcttcccccgtaaggtgtttttcacgaaaaatcggcattttggtggcggctccacctgaggttgaggaaaaggaagagacaggttaggtcagggatcacaagagaagcgaccatagggtgctaacccgagagcagccgaaggtcgagc

SEQ ID NO: 9489 - DNA, 718 bp, Homo sapiens
  SIMILAR (2)..(34): 901254mologous to Homo sapiens NADH:ubiquinone oxidoreductase PDSW subunit,accession number AF044954,Smith-Waterman Score=46.
ggtcgacctcgtgagagaatttatagagcggcaactgcaaagaacaggtattactactaccaccggcagtaccgccgcgtgccagacatcactgagtgcaaggaggaggacatcatgtgcatgtatgaagccgaaatgcagtggaagagggactacaaagtcgaccaagaaattatcaacattatgcaggatcggctcaaagcctttcagcaacagtcatacagagccacacagcaggggcacccacaagctgcctcaggaggtggcagctggcggcctcttttgcagattttctctcttgcagcatcctctgcctctgttaggccaggcacttcctggcagaactgcaggcccccaggtcctgatctggggaagcaatgaaaacaagctgggaaccgaggcctctgctacatgcaaagggggcaaagtcaagtgagcacaagggagggggagggaagatttgcaatgggttctgggcccccggcctcaggaggatggtggggggttgggggtgggtggggcacgcacagcggtcctggtaggccttggcaccctgggtgaactgctccacgtccgtgagaaggttagggcgggtagttttgtccttccctctgctggaagagctttgagccgatccttcataaatgttgataatttcttggtcgacttgttagtccgtcttcacgtggatttcggcttcgaacaggcacatgatgtc

SEQ ID NO: 9490 - DNA, 931 bp, Homo sapiens
  SIMILAR (826)..(491): 631254mologous to Homo sapiens Human NADH dehydrogenase subunit 1,accession number Y49536,Smith-Waterman Score=333.
  misc_feature (1)...(931): n = a,t,c or g
cccccccccaaaaaagggttttctccaaaaaaccccccgggggtttttttaaccccccccnnnnnnnnnnnnnnnttattttcccaccccccgtaaatttgggcccccccggggatttttttaaagggcccccccccgggacgtaaaatttgatccttttaaaaggnnnnnnnnnnnnnnnnnnnnnnnnnnnnnnnnnncaggttgcttgggctttatatttccagcaacagtcatacagagccacacagcaggggcacccacagctgcctcaggaggtggcagcggacggcctcttttgcagcttttctctcttgcagcatcctctgcctctgtttgggccaggcacttcctggcagaaccgtagggcccccaggtcctcgaagcgggtcctggtaggccttggsccacctggggtgaaactgctccaacttcccttgaataacagttctgactgggtagttcctgtcccttcccctcctgcctgaaaagactttgaagccgaatcctgcaataaatgttgaataatttcttggtcgaactttgtaagtccctctttccaactgcatttcgggctttcatacatgcacaatgatgtcctcctccttggcactcagtggatgtctggcacgcggcggtactgccggtggtagtagtaatacctgttctttgcggtctgccgctctataaattcctctcacgagggttaaggggtcggtccacgatgaggtcgaaacgctttcatcatgtagacgatgggattgggctgcaccggcgtgcggcgcgggggctcagggtacacatccttgtcccagctgtccggcatggcggcggcgggcgcggactccggctcccggacgcgctgccctggcctctacctccgtccgggtcccgcggcctaggtcgcccgctacagaggaccgaggcggct

SEQ ID NO: 9491 - DNA, 1163 bp, Homo sapiens
  SIMILAR (3)..(1160): 981254mologous to Oryctolagus cuniculus sarcolumenin precursor,accession number M25750,Smith-Waterman Score=1986.
atggagagattacctccaagcccatggtactgttcctgggaccgtggagtgttggtaaatctaccatgataaactacctccttgggctggaaaatactcgctatcagctctatacaggcgctgaacccaccacctctgagttcacggtcctcatgcatgggcctaagctgaaaaccatcgagggcatcgtcatggctgctgacagcgcccgttccttctcaccccttgagaagtttggccagaatttcctagagaagctgattggcattgaggttccccacaaacttctggagagggtcacttttgtggatacaccaggcatcatcgagaaccgcaagcagcaagaaagaggctaccccttcaacgacgtgtgccagtggttcatcgacagagctgacctcatctttgtcgtctttgacccaacaaagctggatgtgggtctagagctggagatgctcttccgccagttgaaggggcgtgaatcccagataaggatcatcctgaacaaggctgacaatctggccacccaaatgctcatgcgggtttacggggccctcttctggagcttggcccctctcatcaatgtcacagagcccccaagggtttacgtcagctccttctggccacaagagtataagccggacacccatcaggaactgttcctccaagaagagatctccctcctagaagacctgaatcaggtgatcgagaacagactggagaacaagattgccttcatccgccagcacgccatccgggtccgcatccacgccctcctggttgaccgctacctgcagacttacaaggacaaaatgaccttcttcagtgatggagaactggtctttaaggacattgtggaagatcccgataaattctacatcttcaagaccatcctggcaaagaccaatgtcagcaaatttgaccttcccaaccgcgaggcctataaggacttcttcggcatcaatcccatttccagtttcaaactgctctcccagcagtgctcctacatgggaggttgctttctggagaagattgagcgggccatcactcaggagcttccgggcctcctgggtagcctcgggctcgggaagaatccaggtgctctcaactgtgacaaaacagggtgtagcgaaacaccaaaaaatcgctacaggaagcactag

SEQ ID NO: 9492 - DNA, 581 bp, Homo sapiens
  SIMILAR (134)..(54): 481254mologous to Homo sapiens PRO0419,accession number AF130044,Smith-Waterman Score=67.
  misc_feature (1)...(581): n = a,t,c or g
tgactacacagaaaaacagatctgccaaagcagctcacagcatggaggagcaggcaggggaaagtgggagggcccatcccccaagagggcagacagtacagagatgaggcgaggggttctggggtttgcggagggtggttaatgagaagaaaagtccaggacagattccatctcatcagcccctatcacaggctccgtggatgccccttgcagaactcactgttctttcctggtcgactcgttccttggaaacattgtcctgagtgccctggaacctcgggtgttcttgtggaagggtccaggccctccacaaagccaaacgcaacggcccctgtgacagcatgcaccagagtgataacaattctgagaaccgggaattcctaactcgaggttnnnnnnnnnnnnnnnnnnnnnnngccaactggcttaccctgcctgacctcagagtgcctctccctttgcntgcctttccactgtcctgggtccaggaccacttcctggtgntgagctggtgcgtcctggtaactgcaaagtgggaaaggaacacaggacagctagttcccgcacgggtgggtggtccc

SEQ ID NO: 9493 - DNA, 955 bp, Homo sapiens
  SIMILAR (51)..(263): 451254mologous to Oryctolagus cuniculus sarcoplasmic reticulum glycoprotein,accession number J04480,Smith-Waterman Score =132.
ggttgcttccccataagcctttagcaggcttcttcaaagcctacttgccctcagagcccccaagggtttacgtcagctccttctggccacaagatataagccggacacccatcaggaactgttcctccaagaagagatctccccctagaagacctgaatcaggtgatcgagaacagactggagaacaagattccttcatccgccagcacgccatccgggtccgcatccacgccctcctgctggctcgagggctcgatcccttcatcggacccaggagggactggttggtgtatccagctgtcacaggggccgttgcgtttggctttgtggagggcctggacccttcacaagaacacccgaggttccagggcactcaggacaatgtttccaaggacgagtcgaccaggaaagaacagtcggtccgcctcgtgggctgtggggcagacgaccggaagccccgagatctccagatcctcgatcgggaccgaaaaggccctgaacttgtgcagtgacttgccattgagtccgggaggttctggagacctgggtgacggaagaacgcccaaggccgactgctgccctcagttatcggggtgatgataataaaggtggtttcatggaaaatatgggatcttgtaaagacaagaccccgatctgcgagtgtggcttgctaagttggggccttcccggagagcagggacggcggcctccgggcatggagctcgcgctgacgaaaggttctggaagcgccgtaaaaagtaatcaagaaacgggtgacaggacttttcgtaagacattaatttttacccagagtatccgaaacattgccgtgtcaatctcagtgcgatgggagactgccggccccaaggagctgctcgtccttctgccgagttccggcccggacccgcggaggaggagaccgccgcgccggagctcggacctgacgtttttgtga

SEQ ID NO: 9494 - DNA, 1368 bp, Homo sapiens; identical to SEQ ID NO: 8519
  SIMILAR (1)..(492): 851254mologous to Homo sapiens Protein encoded by the endogenetic fragment of HERV-W,accession number B07702,Smith- Waterman Score=719.

SEQ ID NO: 9495 - DNA, 1539 bp, Homo sapiens
  SIMILAR (895)..(1335): 721254mologous to Homo sapiens gag,accession number AF156961,Smith-Waterman Score=517.
atgaaacgcttgtcacattcggctttgtggctctccctcctgagccacctgtgcaggacgctatggctggaattaacctgtgccaatgggagcctgatccagtgtttggggatggtggagtttaagctggcctcgctgtatctttctgctcagccctgcagcctgagggggcctctctctggtagtgacagacaagacaggccaactcagagagctataacactcatcgcatggtgcaagattccattctttggaatccgtgaggccaaggcttgccaccatcttggaagtggcctgctgccatcttgggagctctgggagcaaggaacccccggtgacattttggtaaccacgaagagatctccaaagcagtatacagctctcgacatgggcagttatgtgggacccattccctaccacccttgccagggccccaagcttgtaatggcggaggagagagagcgcgagacagaggagagagcggagactcttgtggaagcagagttagaaaaattgcctaataattggtctcctcaaacgtgcaagctgtttgcactcagccaagccttaaagtacttacagaatcaaaagactatctcagtcctgactcaaaaccttacttacaccttctctgaaacgaatttgcataaaaactgttgtttatgggaatgcatcttgatggggcaggaacctagcctggctctaggactcacccctgagtgcaaaggcgatgttggacatgctggtaaaggaacactagaatccagtagcccagacccctttctttgtggtcaagagaggcaggaaaaggtgtgcaggactgctacatcgacaactcgcaattatgtagaaagtgtgatttatgccctacaggaagccctcagagtctacctccctacgccagcatccccccaactccttctccaactattaaggacccccttcaacccaaatggtccaaaagagacagacaaaggggtaaacaatgaaccaaagagtggcaatattccccaattatgccgcctccaagcagtgggaggaggagaattcggcccagccagagtgcgtgtacctttttctctctcagacttaaagcaaattaaaatagacctcggtaaattctcagataaccctgatggctatattgatgttttacaagggttaggacaatgctttgatctgacttggagagatataatgttactgctaaatcagacactaaccccaaatgaaaaaagtgccgtcataactgcagcccgagagtttggcaatctcttgtatctcagtcagctaaggcactggcctgtgacactccagccatcagctgtccccacaccagactctggcacttatgacacaaaagaatgcaaaatagtacaatctgttgaaatgagcatggaagttatgattgctgtcatgagtgtgcagagacagcaggggaagcagacacagcaacagccactgctggtagtggttaggtcagcagagccagcagaagagtctgtgccccataaaagcagcactaggggggcttcctga

SEQ ID NO: 9496 - DNA, 249 bp, Homo sapiens
  SIMILAR (59)..(247): 591254mologous to multiple sclerosis associated retrovirus element gag polyprotein,accession number AF123881,Smith-Waterman Score=188.
ggccttagaactgatgacccagtactttaacaactggaactgggtctacaacaacataacagatcaggatgaaagtgaattgaatgggaaacgttctccacaaggcaaaaacacccctaagatgtattctggagaattcagcccagtcagagtgcatgtacctttttccctctcagacttgaagcaaattaaaatagacctaggtaaattctcagatgaccctgatggctatattgatgttttacaagg

SEQ ID NO: 9497 - DNA, 385 bp, Homo sapiens
  SIMILAR (179)..(385): 941254mologous to Homo sapiens gag,accession number AF156961,Smith-Waterman Score=343.
agctataacacttaccgcatggcccaagattccattcctcggaatccgtgaggccaagagccccaggtcagagaacacaaggcttgccaccatcttggaagcgggtcaccgccatcttgggacctctgtgagcaaggaccacccggtaacattttggcgaccacgaagggacctccaaagtgacttaaagcaaattaaaatagacctaggtaaattctcagataaccctgatggctatattgatgttttacaagagttagggcaatcctttgatctgacatggagagatataatgttactgctaaatcagacactaaccccaaatgagagaagtgccaccataactgcagcccgagagtttggtgatctctggtatatcagtcag

SEQ ID NO: 9498 - DNA, 852 bp, Homo sapiens
  SIMILAR (208)..(648): 721254mologous to Homo sapiens gag,accession number AF156961,Smith-Waterman Score=517.
gaacctagcctggctctaggactcacccctgagtgcaaaggcgatgttggacatgctggtaaaggaacactagaatccagtagcccagacccctttctttgtggtcaagagaggcaggaaaaggtgtgcaggactgctacatcgacaactcgcaattatgtagaaagtgtgatttatgccctacaggaagccctcagagtctacctccctacgccagcatccccccaactccttctccaactattaaggacccccttcaacccaaatggtccaaaagagacagacaaaggggtaaacaatgaaccaaagagtggcaatattccccaattatgccgcctccaagcagtgggaggaggagaattcggcccagccagagtgcgtgtacctttttctctctcagacttaaagcaaattaaaatagacctcggtaaattctcagataaccctgatggctatattgatgttttacaagggttaggacaatgctttgatctgacttggagagatataatgttactgctaaatcagacactaaccccaaatgaaaaaagtgccgtcataactgcagcccgagagtttggcaatctcttgtatctcagtcagctaaggcactggcctgtgacactccagccatcagctgtccccacaccagactctggcacttatgacacaaaagaatgcaaaatagtacaatctgttgaaatgagcatggaagttatgattgctgtcatgagtgtgcagagacagcaggggaagcagacacagcaacagccactgctggtagtggttaggtcagcagagccagcagaagagtctgtgccccataaaagcagcactaggggggcttcctga

SEQ ID NO: 9499 - DNA, 1521 bp, Homo sapiens
  SIMILAR (1213)..(1172): 711254mologous to Homo sapiens ribosomal protein L6,accession number X69391,Smith-Waterman Score=55.
ctagtttggcagttgtttatcttctctgcttggcactgggaaaaaccaatagacccacttgctgaagacagtggaagggctgaaaatttgtttttcagaaaatgtaagatcttggaaaatatctgcaaaggcagctgttctgtctctcctctctagttcagcctccatggcctgttcccactgagatctatccataagaccttccggatggcttttaggactgtcctttacatctggcaatagcctgacatcccgcctacgtttagaaaaattttctagcttcccatccgtgtaggagcaaattcctgatatgcaatactcactttgcccagacaggggattgccacatgagagtcctcttcctggtctctggtggtcagccgacctgatgtctgacacagcataccaattatattgcagttgagatctcactgagttcaaaatgtctagcacaacaggagaattagtcttaaggaagttaaacacaatagtgatccaaaaccaagagtttctcagattgtagctgtatttggagataaagcctttaaagaagcgattaaggtaaaatgaagtcgtatgggtgggccctaattcaatacaatgggtgtctgtataagaagaaacaataaagacacagacgtgagcatgcagagagggaagtccatgtgagaacacagcaagaagatagctattagcagttactggtttaggttttgccagtgagaaactcgtgtgtgagacttggaaggtgaacaagaagaagaagccattgatcttcagtgggagctgcaggcagcactgctgtttgccgccatcgtagacccgcctctgacttccatccctccagatctggcagggtgtctgctgcgctcctattccagccaggggcccattgcccctcccgatggggctaaaggcttgccattgttcctgcaaggctaagtgctcaggttcgtcctcatcaagctgaatcctagtcactgggttccacggttctcttccgtgacccacggcttctaacagggctataacactcaccacatggcccaagattccattccttggaatccgtgaggccaagaaccccaggtcagagaacacaaggcttgccaccgtattggaagcagcccgctgccattttggaagtggcctgccaccatcttgggagctcttcctggtgtgtgggcttccatagccgcttcttcttgaaatgtcagtaagatgttttgggatttttacattactgatattaattttggttgagatggcaatgacaaatttctggtgtgttctttgtagaggaattcctcttgtgcatggcccttctgcaatatgtagcagattgggaacatctgccagttcctcagacaaggacaggatttcagctgcaatgaagcttccctttcgtgggctttttagctttgaggtcatgtaaccctttttcaccctgtcaccatcagccctcttggctttgagtttcttctctttagtatccagtttatcagctttttcatctgccat

SEQ ID NO: 9500 - DNA, 2343 bp, Homo sapiens; identical to SEQ ID NO: 2096
  SIMILAR (334)..(1041): 741254mologous to multiple sclerosis associated retrovirus polyprotein,accession number AF009668,Smith-Waterman Score=862.

SEQ ID NO: 9501 - DNA, 1776 bp, Homo sapiens
  SIMILAR (1)..(1041): 931254mologous to Homo sapiens putative p150,accession number U93563,Smith-Waterman Score=1695.
atgggatactttaacaccccactgtcaacattagacagatcaacgagacagaaagttaacaaggatactcaggaattgaactcagctctgcaccaagcagacctaatagacatctacagaactctccaccccaaatcaacagaatatacattcttctcagcaccacaccacacctattccaaaattgaccacatagttggaagtaaagctctcctcagcaaatgtaaaagaacacaaattataacaaactgtctctcagaccacagggcaatcaaactagaactgaggattaagaaactcactcaaaactgctcaactacatggaaactgaacaacctgctcctgaatgactactgggtacataacaaaatgaaggcagaaataaagatgttctttgaaaccaacgagaacaaagacacaacataccagaatctctgggacacattcaaagcagtgtgtagagggaaatttatagcactaaatgcccacaagagaaagcaggaaagatccaaaattgacaccctaacatcacatttaaaagaactagaaaagcaagagcaaacacattcaaaagctagcagaaggcaagaaataacaaaaatcagagcagaactgaaggaaatagagacacaaaaaacccttcaaaaaattaatgaatccaggagctggttttttgaaaagatcaacaaaattgatagaccactagcaagactaataaagaagaaaagagagaagaatcaaatagacgcactaaaaaatgataaaggggatatcaccaccaatcccacagaaatacaaacgaccatcagagaatactacaaacacctctacgcaaataaactagaaaatctagaagaaatggataaattcctcgacacatacaccctcccaagactaaaccaggaagaagttgactctctgaatagaccaataacaggatctgaaattgtggcaataatcaatagcttaccaaccaaaaagagtccaggaccagatggattcacagccgaattctacgagaggtacaagaaggaactgatccagcagggtgtccgctgtgcccctgatccagtgaggcatccattgccactcccaatcaggctaaagtctcgccattgttcctgcgcagctaagtgcccaggcatgcagctctcgacatgggcagttatgtgggacccgttccccaccacccttgccagggccttagaactgataacccagtactttaacaactggaactgggtctacaacataatatatcaagatgaaaatgaattgagtaaattaaagggaggcacatattcctatagcggcaaatgggggcaacaagtgaacgaccctccactgtgtttccaaaatccacctacagagacagagaggagagagacagagagagacagagaggtgggggtggtggatgggaaatgttccccccaaggcaaaaaagctcctaagatatattctggagaatttggcccagtcagagtgcacgtaactctttccctctcagacttgaaacaaattaaaatagacctaggtaaattctcagataaccctgatggctacattgatgttttacaaggaatcgaagctgtaaaactgcaaacagttcttcaaatggacccccagatgcagtccatgactaagacctaccacggacccctggaccggcttgctagcccatgctctgatgttaatgacatcgaagccaccctttccaaggaaatctcaactgcacaacccctactatgccccaattcagcaggaagcagttaa

SEQ ID NO: 9502 - DNA, 1349 bp, Homo sapiens
  SIMILAR (206)..(274): 781254mologous to Homo sapiens Protein encoded by the endogenetic fragment of HERV-W,accession number B07702,Smith- Waterman Score=99.
atgaggcagattcagatgaggaagaggaagacgagtgtaaaaatcgaacttcagattctgaatgaacccagcccagctctaggactcacccctgagcacaaaggcaatgttgggcacactggtaaaggaccactagaatccagcagcccggacccttttctttgtggtcaagaaaggggaaaacaggtgcaggactgctacatcgatgggaaatgttccccccaaggcaaaaacgcccttaagatgtattctggagaattcgacccagtcagagtgtgtgtacctttttccctctcagatttgaagcaacttaaaatagacctaggtagattctcagataaccctgatggctatattgatgttttacaagggttaggacaatcctttgatctgacatggagagatataatgttactgctagatcagacactaaccccaaatgagagaaatgccaccataactgcagcccgagagtttggtgatctctggtgtctcagtcaggtcaatgataggatgacaacagagcaaagagaacgattccccacaggccagcaggcagttcccagtgtagaccctcgctgggacacagagtcagaacatggagatgggtgccacagacatttgctaacttgcatgttagaaggactaaggaaaactaagaagaagccgatgaattactcaatgatgtccactataacacagggaaaggaaaaaaatcctaatgcctttctggagagactaaggcaggcattgaggaagcatacctctctgtcacctgactctattgaaggccaactaatcttaaaggataagtgtatcactctgtcagctgcagacattagaaaaaacttcaaaaacttagaaaccctattgaacttggcaaccttggtttttcataatagagataaggagaagcaggcagaacaagacaaacgggatttaaaaaaggctaccgctttagttatggccctcaggcaagcagactttggaggctctggaacacggaaaggctgggcaaatccaatgcctaatagggcttgcttccagtgtggtctacaaggacactttaaaaagattgtccaaatacaaataagccaccccctcatccatgccccttatgtcaaaggaatcaatggaaggcccactgccccaggggacaaaggtttccaaaccaaagctcaactctgctcagaacaggctaaatacttagggctaaaattatccaaaggcaccagggccctcagtgaggaacgtatccagcccatactggcttatcctcatcccaaaaccctaaagcaactaagagggttctttggcataccaggcttctgccgaatatggattcccag

SEQ ID NO: 9503 - DNA, 1264 bp, Homo sapiens
  SIMILAR (308)..(1057): 701254mologous to Homo sapiens gag,accession number AF156961,Smith-Waterman Score=842.
agcgacccagtgtggagagaaagatagaaggggtatcccccttctctttcctcccatctcctctgggtcccagcgaacatcacaggtgccacccatggatgcaagcatgaccttcaccaatggatctggagaagctagtcagcaggaagagtcatgtttatctgaagctataacactcaccacatggcccaagattccattccttggaatccgtgaggcgaaaaccccaggtcagagaacacaaggcttgccaccatcttggaagtggcctgctgccattttggaagcagcccaccaccatcttgggagctctgggagaaaggacccaccactaacatttggtgaccacgaagggacctccaaagcagaacccagcccagctctaggactcacccctgagcacaaaggcaatgttgggcatgctgctagaatccagcagcctggacccctttctttgtggtcaagaaaggcgggaaaaggggtgcaggactgctacattgacttaaagcaaattaaaatagacctagataaattctcagataaccctgatggctatattgatgttttacaagggttaggacaatcctttgatctgacatggagaaatataatgttactgctaaatcagacactaaccccaaatgagagaagtgccaccataactgcagcccgagagtttggcgatctctggtatctcagtcaggtcaatgataggattgcagcagagaaaagagaaaaattcctcacaggccagcaggcagttcccagtgtaggctctcattgggacacagaatcagaacatggagattggtgctgcagacatttgctaacttgcatgctagaaggactaaggaaaactagaaagaagcctatgaattattcaatgatgtccactataacacagggaaaggaagaaaatcctactgcctttctggagagactaagggaggcattgaggaagcatacctccctgtcacttgactctattgaaggccaactaattttaaaggatacgtttatcactcagtcagctgcagatattagaaaaaaacttcaaaagtccaccttaggcccagagcaaaacttagaaaccctattgaacttggcaacctcggttttttataatagagatcaggaggagcagacggaatgggacaaatgggataaaaaaaaaagaaaaggccacagctttagtcatggctctcaggcaagtggactttggaacctctgcaaaagggaaaagctgggcaaatcgaatgcctaa

SEQ ID NO: 9504 - DNA, 2044 bp, Homo sapiens
  SIMILAR (1731)..(1862): 701254mologous to multiple sclerosis associated retrovirus polyprotein,accession number AF009668,Smith-Waterman Score=147.
aaggtagatgctataaaagtaccatggttcaaccatattgctgttatcagtccagcatttctgctttataatgtgagtcaaaataatcctcttttctttataaattacccagtctcaggtattcctttatagcaacgcaaaagagaacacgaggcttgccaccatcttggaagtggcctgccaccattgtggaagtggcccacaacctcaggtgttacgctatctgcggaagggctttctaacaacccccaacccttctgggttggggacgttggtctgcttggagccagcttccactttcaattttcttggggaatccgagggctgactagaggcagaaagcgttgtgtccttaggcacctgggctgtaacccagggagtcttatccctggtgtccctcctgattcaggtatgcagctctcgacatgggcagttatgtgggacccgttccccactacccttgccagggccccaagtacaattccccacaggccagcaggcagttcccagtgtagaccctcattgggacacagaatcagaacatggaaattggtgccgcagacatttgctaacttgtgtgctaggactaaggaaaactaggaagaagcctatgaattatgcaatgatgtccactataacacagggaaaggaagaaaatcctactgcctttctggtgagactaagggaggcattgaggaagcatacctctctgtcacctgactctattgaaggccaactaatcaggcaagcggactttggagtctctggaaaagggaaaagctgggcaaatcgaatgcctaatatggcttgcttccagtgtggtctacaaggacactttaaaaaagattgtccaagtagaagtaagctgccccctcgtccatgccccttatgtcaagggaatcactggaaggcccattgccccaggggactagtaaaaccatgcaatagcccctgcaatactccagttttaggagtacagaaacctaatggacagtggaggttagtgcaagatctcaggattatcaatgaggctgttcttcctctataccctgctatacctaacccttgtactctgctttcccaaaaaccacagaaagcagagtggtttacagtcctggaccttaaggatgcctttttctgcatccctgtacaccctgactctcaattcttgtttgcctttgaagatcctttgaacccaatgtctcaactcacctggactgttttaccccaagggttcaagcatagcgcccatctatttggccaggcattagcccaagacttgagccaattctcatacctggacactcttgtccttcagtacggggatgatttaattttagccacccgatcagaaacctggtgccatcaagccacccaagcactcttaaatttccttgctacctgtggctacaaggtttccaaacaaaatgctcagctctgctcacagcaggttaaaaacttagggctaaaattatccaaaggcacaagggccctcagtgaggaacgtatccagcctatactggcttatcctcatcccaaaaccctaaagcaactaagagggttccttggcataacaagcttctgccgaatatggattcccaggtacagtgaaatagccaggtcattatatacactaattaggaaaactcagaaagccaatgcccatttagtaagatggacacctgaagcagaagtggctttccaggccctaaagaaggccctaaaccaagccccagttaagtttgccaatggggcaagacttttctttatatgtcacagaaaaaacaggaatagctctaggaggccttacaccggtctgaaggatgagcttgcaacctgtggcatacctgaaatcgaagctgtaaacctaaaaattgttcttcaaatggagccccagatgcaatccatggctaagatctaccgcagacctctggactggcctgctagcccatgcttcgatgttaatgacattgaaggcacccctcttgaagaaatctcaactgcacaacccctagtatgccccaattcagcaggaagcagttag

SEQ ID NO: 9505 - DNA, 1715 bp, Homo sapiens
  SIMILAR (668)..(868): 831254mologous to Homo sapiens Protein encoded by the endogenetic fragment of HERV-W,accession number B07702,Smith- Waterman Score=300.
ctatttcactctattaaatcttgcaactgcattcttctggtccgtgtttgttacagctcgagctgagctttcacttgctgcccaccactggtgtttgccgctgtcacagacccgccgctgtcgcagacccgctgctgactgccatccgtctggatccggcagggtgtccactgtgctcctgatccaatgaggcacccattgccgctcccgatccggctaaaggcttgccattgttcctgcacagctaggtgcccgggtttgtcctaatcaagctgaacactacttgctgggttccacggttctcttccgtgacccacggcttctaatagagctaacagagctataacactcaccgcacggcccaagattccattccttcgaatccgtgaggccaagaatccccaggtcagagaatacgaagcttgccaccatcttggaagcggcctgctaccatcttggaagtggttcaccaccatcttgggagctctgtgagcaaggaccccccggtaacattttggcaaccacgaacggacatccaaagtgatgggaaacgttccccgcaagacaaaaacgcccctaagacgtattctggaaaattgggaacaatttgaccctcagacactaagaaagaaacgacttatattcttctgcagtgccgcctggcactcctgagggaagtataaattataacaccatcttacagctagacctcttttgtagaaaaggcaaatggagtgaagtgccataagtacaaactttcttttcattaagagacaactcacaattatgtaaaaagtgtgatttatgccctacaggaagccttcagagtctacctccctatcccagcatccccgactccttccccacttaataaggaccccccttcaacccaaatggtccaaaaggagatagacaaaagggtaaacagtgaaccaaagagtgccaatattccccaattatgacccctccaagcagtgggaggaagagaattcggcccagccagagtgcatgtgcctttttctctcccagacttaaagcaaataaaaacagacttaggtaaattctcagataaccctgatggctatattggtgttttacaagggttaggacaattctttgatctgacatggagagatatatatgtcactgctaaatcagacactaaccccaaatgagagaagtgccaccataactgcagcccgagagcttggcgatctctggtatctcagtcaggtcaatgataggatgacaacagaggaaagagaacgattccctacaggccagcaggcagttcccagtgcagaccctcattgagacacagaatcagaacatggagattggtgctgcagacatttactaacttgcgtgctggaaggactaaggaaaaccaggaagaaggctgtgaatttttcagtgatgtccactgtaacacagggaaaggaagaaaatcctactgcctttctggagagactaagggaggcactgaggaagcatacctccctgtcacctgactctattgaaggccaactaatcttaaagattaagtttatcactcggtcagctgcagacattagaaaacaaacttcaaaagtccaccttaggcctggagcaaaacttaagacaccctattgaacttggcaacctcggttttttataatagagatcaggaggagcagtcggaatgggacaaacgagattaaaaaaaaaaaaaaaaa

SEQ ID NO: 9506 - DNA, 299 bp, Homo sapiens
  SIMILAR (297)..(163): 1001254mologous to Homo sapiens hypothetical protein,accession number AL050225,Smith-Waterman Score=250.
caaatactaaataaatagagtttaatgccataatgagaaacttttattcttctgggaacaggaccttaaacagttccacaggctcgcctcttcagaatggcaaaactcttctcagtgtcctcagaagcaccctcgcttggaacggccttcagatcctttgggcttggcctgtgggctaatgccatagctggtgaaggcatattgccactggggcaggcccaggtgggtgatgagcaggcggtaataggcagtaaaggtgtctgtgagaaaatgccagtataacgctctgtccaggaacc

SEQ ID NO: 9507 - DNA, 1055 bp, Homo sapiens
  SIMILAR (9)..(725): 511254mologous to Homo sapiens FH1/FH2 domain-containing protein FHOS,accession number AF113615,Smith-Waterman Score=628.
tacgccagcttggcacgaggaactttctaaatggaactaaagccaaagcgtttgagttaagttacctcgagaaggttccagaagggaaagacacagtgcacaagcagtcgcttctccaccatgtgggcaccatggggggagaaaacttcccagacagctccgatctgtactcggagatcggggccatcaccaggtcagccaaggatgactttgatcaacttcaggataatttatgccagatggagagaagatgcatagcttcatgggatcacctcaaggcaattgcaaaacatgaaatgaaaccacttttaaaacaacggatgtcagagctcctgaaagactgtgcagagcgaattataattttaaagattgtccatacaaggataatcaacagattccactcctttttactctttatgggccatccaccttatgcaattcgggaagtgaacataaacaaattctgcaggattattagtgaatttgcactagagtatcgcacaaccagggaaagggttttgcagcagaaacagaaacgggccaaccacagagagagaaataagaccagagggaagatgatcaccgattctggcaagttctccggcagttctccggcgcccccaagccagccgcagggtctgagctatgcggaggacgcggctgagcacggggaacatgaaggctgtgctgaaaacctcgtccccctccaggagtcccctgcacataccttctccatcgtgtcagctgtgtttctcttgattccgtgacacccggtttattagttcaaaagtgtgacaccttttctgggcaaggaacagcccctttaaggagcaaatcacttctgtcacagttattatggtaatatgaggcaatctgattagcttcacagactgagtctccacaacgaccaaaatatccagatgtaaaccccaaacttgtacacaaaagaaagcacagattgtttacctgttgtggattttagatgtaacaaatgtttatacaaatacatacatgtacaccatgtttcaaatactaaataaatagagtttaatgcc

SEQ ID NO: 9508 - DNA, 1090 bp, Homo sapiens
  SIMILAR (139)..(333): 961254mologous to Homo sapiens Human secreted protein, SEQ ID NO: 7443,accession number G03362,Smith-Waterman Score=330.
  misc_feature (1)...(1090): n = a,t,c or g
gaggaggcatcgtccccggggctgggctgcagcaagccgcacctggagaagctgaccctgggcatcacgcgcatcctagaatcttccccaggtgtgactgaagtgaccatcatagaaaagcctcctgctgaacgtcatatgatttcttcctgggaacaaaagaataactgtgtgatgcctgaagatgtgaagaacttttacctgatgaccaatggcttccacatgacatggagtgtgaagctggatgagcacatcattccactgggaagcatggcaattaacagcatctcaaaactgactcagctcacccagtcttccatgtattcacttcctaatgcacccactctggcagacctggaggacgatacacatgaagccagtgatgatcagccagagaagcctcactttgactctcgcagtgtgatatttgagctggattcatgcaatggcagtgggaaagtttgccttgtctacaaaagtgggaaaccagcattagcagaagacactgagatctggttcctgggacagagctgttatactggcattttctcacagacacctttactgcctattaccggtctgctcatcaccccacctgggcnctgccccagtgggcaatattgcctttcaccagctatggcattagcccacaggccaaggattcccaggtgataagggtgaagagcagtagtgaagaccagccagagggtgacatggtgaaaacatataccaccaccacaagaactgaaatgctgctttttaaagcattattgtaaggtggatttagctgttaaacagataacttataatatcaaaatggataagaagaaaatgtgttcactgggaaactggctgttgagcccctccaatgggagctgaggagctgtgtctctgcaggcatgggggactggccacaagcaaagagtcagcagcatggaagccccgggagctgttagcgtgttgcagcaggcgcccaatccaacagcctggggaacaacagtgtcgcaatcattcctcagttatggcaagaatgtgctatttttcactgttaggtgttgcttctgagaactacaaataaaactctccaacc

SEQ ID NO: 9509 - DNA, 3398 bp, Homo sapiens
  SIMILAR (1793)..(2176): 481254mologous to Homo sapiens FH1/FH2 domain-containing protein FHOS,accession number AF113615,Smith-Waterman Score=279.
  misc_feature (1)...(3398): n = a,t,c or g
atgcccaagccttccctggaagcaggttcctgccccaggctggagttcccagtagaagatgcacaacctgtaatcaaaggagaggaatttactcctccacccccaaattcctacctggcacttggggacatttccacggaggagtgggatttggaagttgcccaggaatatcaggaaaggatgcctccacagagagctgccctgatctgcgtgttctcatggaatctgggcaggtcccttccagcccctgccatgcgtagaccctgccagaatttctgtgttgctttgagcacttttgccggggatcctgaacccgaatcagaggcagaaccggaagcagaggcaggggcggggcaggttgctgatgaagctggccaggacatagcctctgcccacgagggtgcagagactgaagtggagcaggcactagagcaagagccggaagaaagagcctccctcagtgaaaaagagaggcagaacgagggggtgaacgagagggacaactgctctgcctccagcgtctcgtcctccagcagcacgttggagagggaggagaaggaggacaagctctccagggacaggacaactggtttgtggcccgcaggtgtccaggatgcaggtgtaaatggacagtgtggcgacatcctcaccaacaaacggttcatgcttgacatgctgtatgcccataacaggaagtctccggatgatgaggagaagggggatggggaggctgggaggacccagcaggaggcagaggcggtagcgagccttgctaccaggatatccaccctgcaggccaactctcagacccaggatgagagtgtcaggagggtggatgtcggctgtttggacaatcggggcagtgtgaaagcatttgctgagaaattcaacagtggggacctggggagagtgttcaacgctcctcagggcttagggtggtcccaggtacccaggggtcagcccacattcactaagaaaaagaagaccatccgcttgttctggaatagaaattcggccttttgactggccatgtaaaaacaaccgacgctgcagagaattcctgtggtcaaaactggaacccattaaggtggacacttccagactggagcacctgtttgagtctaaatccaaggaactgtctgtctcaaaggcctctaagctggttcgtcccctattcatcctcaccagtgcatgccctttcctttcttttccttggaaggctcctcttcattcatctaccaggcagctgcacagaggcctaagtgcacaggaaaggtggaggtgctctggtataaggggcatggaatgtttgaatggcaagggcccactcgaatccaggaatccagcctatcgaaagagtgagggcacacggcagaccggagcaggggacatgaaggatggtgtctggcagggagtacccgcaacccctgacaccccacagggcatgtgtacagtgtgcactgttagctttgccatcatggatggcttaaatgttaactcagttggccctctgccttttcatgaagtcgcagaaccactcctggacctgaaggaaggaatagaccagttggattacactcttgggtttttctttctggtgtctatgctttccggcggtgggctcttaggaggtagcgctagtgccaaagcgtttgagttaagctacctcgagaaggttccagaagtcaaagacacagtgcacaagcagtcgcttctccaccatgtgtgcaccatggtggtagaaaacttcccagacagctccgatctgtactcggagatcggggccatcaccagattccactcctttttactctttatgggccatccaccttatgcaattcgggaagtgaacataaacaaattctgcaggattattagtgaatttgcactagagtatcgcacaaccagggaaagggttttgcagcagaaacagaaacgggccaaccacagagagagaaataagaccagagggaagatgatcaccgantgtgttcggcattgtgtacgtatgttctccggcagttctccggcgcccccaagccagccgcagggtctgagctatgcggaggacgcggctgagcacgagaacatgaaggctgtgctgataacctacgcgcccctccgaggaggacgccacccccgcgctgggcgtccgcacacgcagccgagcaagccgaggatccactagttcctgggactatgggaactgatgactcgcccaatgtcacagatgatgcagctgatgagatcatgggaccgcatcgtcaagttcagccacccaagtgcccagttcagcgagtggtgccgagggagaggaagcgagcccgggccaaccggaaatctttgcgaagaaccctgaagagcggcctgaccccagaagaagccagagccctgggcttggttggcacctcggagttgcagctgtgacactcataggttactcccaggagtgtgctgagcagaaggcaagctcttgctggatgaaacccctccaggtggggttggggagacttgatattccacatcccaaccagtttgaaaaaaggggagagctcaattccccaggcgtcaccccccatggcttggtggttggccccgacgcattgacttgggatccccccaggagtccccctgcacataccctcctcccatccgtgtcagctgtgtttcctcttgattcccgtgacacccggtttattagttcaaaagtgtgacaccaattctgggcagaggaacagcccctttaaggagcaaatcacttctgtcacagttattatggtaatatgaggcaatctgattagcttcacagactgagtctccacaacaccaaaatatccagatgtaaaccccaaacttgtacacaaaagaaagcacagtattgtttacctgttgtggtattttagtatgtaacaaatgtttatacaaatacatacatgtgacaccatgttttcaaatactaaataaataagagtttaatgccataatgagaaacttttattcttctgggaacaggaccttaaacagttccacaggctcgcctcttcagaatggcaaaactcttctcagtgtcctcagaagcaccctcgcttggaacggccttcagatcctttgggcgagacagggagcttgttgaagcagacatttgtcaaatagtacatgatggatgtgaacaccccaggagagcctggaacttgcgagagttgggtctgtacattatagacggttgtgtttaatcaccttggcctgtgggctaatgccatagctcggtgaaggcatattgccactggggcaggcccaggtgggtgatgagcaggcggtaataggcagtaaaggtgtctgtgagaaaatgccagtataacgctctgtccaggaaccagatctcagtgtcttctgctaat

SEQ ID NO: 9510 - DNA, 469 bp, Homo sapiens
  SIMILAR (167)..(331): 541254mologous to Caenorhabditis elegans F18H3.1,accession number Z50110,Smith-Waterman Score=166.
  misc_feature (1)...(469): n = a,t,c or g
acgggtcagaatgtcgcatngcgcgnacnttnggggtagggcagcgncgcctcggtctaaggacgnccgcggagtcggtggtccctgtgcgattgccacctcggtgttgtgctgcctgcggggctgcagagacggggggactggccacatccctctgaaggagatgccggccgtgcagctggacacgcagcacatgggaacagatgttgttattgtaaagaatggaagaagaatatgtggaacaggaggttgtttagccagcgcacctttacatcaaaacaaaagctattttgaattcaaaaacccgtccacaggaatctgggggattggtggtgcaactcaaaaggtaacttgaatcagattcctcttggccgagatatgcacagtctggggatgaaaaatgaaggagccctttaccacaacaatgaagagaaaaataggctggcagcaaacaggctttcgcaggaac

SEQ ID NO: 9511 - DNA, 489 bp, Homo sapiens
  SIMILAR (163)..(489): 391254mologous to Caenorhabditis elegans F18H3.1,accession number Z50110,Smith-Waterman Score=215.
  misc_feature (1)...(489): n = a,t,c or g
acgaggaacttcgtagagancntccncacnnccnngggcannnnnacctcggtctagggacggcggcggagtcggtggtccctgctttaggccacctttttgttgtgctgcctgcggtgctgcagagacggggggactggccacatccctctgaaggagatgccggccgtgcagctggacacgcagcacatgggaacagatgttgttattgtaaagaatggaagaagaatatgtggaacaggaggttgtttagccagcgcacctttacatcaaaacaaaagctattttgaattcaaaatccagtccacaggaatctggggtattggtgttgcaacctagaaagttaacttgaatcagattcctctttggcgagatatgcacagcctggtgatgagaaatgatggagccctttaccacaacaatgaagagaaaaataggctgccagcatacaatctttcccaggaaggagatgtggtgggtattacttat

SEQ ID NO: 9512 - DNA, 411 bp, Homo sapiens
  SIMILAR (268)..(357): 501254mologous to Arabidopsis thaliana heat shock protein (AA 1 - 161),accession number X17295,Smith-Waterman Score=85.
tcaacatcgcttcctctttgaatactcatcccacatggtcaccttctctatgaagctttcccagcgtggtactgtggaaggatcttcagaacctgaaaattcaggtcccagggctgatccttttgggagtgggactgatttcagtccctgggggtaggatctaattgctaagaactggaagcaggaaaccgatttcacaggtttgcccctgagcgcccctggtttgaacagtctccatacattcagtccctgtcctgacatctgatcaccaatatccatgatccctttaacactgacatctggtggccctttcatttctttttcttgccttatatggcactggctagaacttccagcattatacttccgcagttccactgtcacttcatttctatgtcttcgcattgtcat

SEQ ID NO: 9513 - DNA, 379 bp, Homo sapiens
  SIMILAR (32)..(85): 501254mologous to Homo sapiens APMCF1,accession number AF141882,Smith-Waterman Score=58.
gaacgaggggctacctgggggtcactatcaacccttgaacttgagccatgtgtgcggatatgtgtatcctacagcaccccatgtacctcatgtcactgacactcaatgcaagcaccccacaacacacaggctttgcacctaatgtcaggcaatccttcaggagtggcagggcctatctcccttgaaggcttttgaaaccatgcctctacaatgtcagtcagcccttttaatcaatatcctctcctgcttcctattaacttgatgacatcatgatctccctggttgatcttaagctctgctggtcaaataacggacattccttgtgtaaagaggagagcctctcaccaatcctccctaccagtgatggtgtgtgaaaggt

SEQ ID NO: 9514 - DNA, 743 bp, Homo sapiens
  SIMILAR (146)..(457): 331254mologous to Caenorhabditis elegans F18H3.1,accession number Z50110,Smith-Waterman Score=176.
agctgaccggcggggggcagtgtatcctcgatctagggacgggggcggagtccgtgggccctgcgcgatggccacctcggtgttgtgctgcctgcggagctgcaaagacagggggactggccacatccctctgaaggatatgctgtccgtgcatatggacacgcagcacatgggaacagatgttgttattgtaaagaatggaagaaaaatatttggaacaggaggttgtttagccagcgcacctttacatcaaaacaaaagctattttgaattcaaaatccagtccacaggaatttggggtattggtgttgcaactcagaaggttaacttgaatcaaattcctcttggccgagatatgcacagtctggtgatgaaaaatgatggagccctttaccacaacaatgaagagaaaaataggctgccagcaaacagtcttccgcaggaaggagatgtgttgatgacagtgcaattttggattgccagttcagtgagttttatcatacgcctccacctggttttgaaaaaatattatttgaacagcaaatcttctgaatgtatttgtttttaaaacttgtatttctgcactgttaaaaaatgttcatcatttaataaaactttacctggcctatagatgaaaatatattcttaaaaatatgcttgttgatgctgtctaaggaaccaatgtattcagtataccaccctgaagttgtgatttaaaatactttatgttttgtgaaatgaaa

SEQ ID NO: 9515 - DNA, 1475 bp, Homo sapiens
  SIMILAR (141)..(650): 461254mologous to Caenorhabditis elegans F18H3.1,accession number Z50110,Smith-Waterman Score=407.
ctgagcggcggggggcagtgtcgcctcggtctaggcacggcggcggagtcggtggtccctgcgcgatggccacctcggtgttgtgctgcctgcggtgctgcagagacggggggactggccacatccctctgaaggagatgccggccgtgcagctggacacgcagcacatgggaacagatgttgttattgtaaagaatggaagaagaatatgtggaacaggaggttgtttagccagcgcacctttacatcaaaacaaaagctattttgaattcaaaatccagtccacaggaatctggggtattggtgttgcaactcagaaggttaacttgaatcagattcctcttggccgagatatgcacagtctggtgatgagaaatgatggagccctttaccacaacaatgaagagaaaaataggctgccagcaaacagtcttccgcaggaaggagatgtggtgggtattacttatgaccatgtcgaattaaatgtatacttgaatggaaaaaacatgcattgtccagcatcaggtatacgagggacagtgtatccagttgtttatgttgatgacagtgcaattttggattgccagttcagtgagttttatcatacgcctccacctggttttgaaaaaatattatttgaacagcaaatcttctgaatgtatttgtttttaaaacttgtatttctgcactgttaaaaaatgttcatcatttaataaaactttacctggcctatagatgaaaatatattcttaaaaatatgcttgttgatgccgtctaaggaaccaatgtattcagtataccaccctgaagttgtgatttaaaatactttatgttttgtgaaatgaaaataagcatttgggcagtttatttaattcttatttaaataaatagaattatgggtttaattaacagtataacatgactatatatacatatatatttaaagggaattctttcttacataatatatttgttttgatagagatgtagagttgggtgggtgtttttgtcactctgaagtttagacctcattaaatatttgacatctacagttggataattttgccgcttagtgtccttttttatatacaatataacaaagtgagagaaatttatattactggcaatttcatttttggcagtctatttctgtatcatgtaccgcttttcttaaaacttaaattgcttattttgttgtgtaatgtcattgcttttgatttgctttgtgaaaggagataaacgtttcagtaattgtcagagcattttgttgcctcaggctgtgttacctcaatttcagagtaagtagtggttgattagtaatgtagtatacactggcagacatctagaatagtatgatgctttacatttaaatgaggttattcttttaaggacttttatttgtatgttttctgtaaggaataataaaataattgtaattaaggaatataccatactatattaaacacattcttcct

SEQ ID NO: 9516 - DNA, 1561 bp, Homo sapiens
  SIMILAR (790)..(963): 361254mologous to Mus musculus Pro-Pol-dUTPase polyprotein,accession number Y12713,Smith-Waterman Score=111.
atggtcaccttctctatgaagctttcccagcgtggtactgtggaaggatcttcagaacctgaaaattcaggtcccagggctgatcctatcagatcaagcccagggatccagcctttggccccatctgtagagtcacagcagctctgctgctgctcatccgctggggctactgccaattgctgctcagtcccttgctgtcttcatagagccttggtcacaagcttcttctcgaggacaactacagggtctgccccaggaatctggggtattggtgttgcaactcagaaggttaacttgaatcagattcctcttggccgagatatgcacagtctggtgatgagaaatgatggagccctttaccacaacaatgaagagaaaaataggctgccagcaaacagtcttccgcaggaaggagatgtggtgctctgctggtcaaataacggacattccttgtgtaaagaggagagcctctcaccaatcctccctaccagtgatggagaagaaaggagaagaaaaaggaagaagaggaagaggaagaagaggaagcagaagcagcagcagcagcaagaagcagcagcaccagcagaagcagatgcagaagcaacagcagcagaagcagcagttgaagaagcagcagcaagaaaggaggaggaggaggaaggggaggagggggaggggaatggggaggaggaggaggagaaggcagcggcggcagcaagaggggactggtcccagcaggagaaggcatgtaaatcgtcccttcaagcaatattatttggacatgctaagctggaaccagggagactgcccaggcccacacagtgcagagtagaagctacggtgctggtagggacaaattctccacttgataaccctctatggagcatttcctggagcttatggcaaaagcctgtgggcacctcccagcaacaaccactgggactttggactagagaatttccacttgaagggcatttactgactcgcaatgaaacatttactgaagccaccccactgatacctgaaataggcatgctgtctcagatgatgtcagaggaacatatctaatggggatgggcagtgcccagaagagttccatgacacaatggaaatggtttatagaggatcatgctactcaaggcatgcagagaatttcttttcccctaggactgactctggaactgtgtgagaaactgctggattctacagtgccaaataaacaactttcaactgaccaaacaagagcttcttggtttatggatggcaattccaaggcacaaaatgctaggaagaactgttctgtttctcagtaagagagacagaaactggctatgggaaagatttcctggtgggaaggccctgaacatagctggcaagtgagactgatgctggcagccctgggggactacaaatggaataggaattcttgataggaatagacactgactctagtgcaggctttgcttatccaatggaagatgaaagtgttcagagtgccataaaaaaaaaattaaaaaaaataaacaacagaagatatttcaaggaaaaaaaaaaaaaaaaa

SEQ ID NO: 9517 - DNA, 2365 bp, Homo sapiens
  SIMILAR (1)..(1191): 951254mologous to Homo sapiens dJ130E4.2 (KIAA0796),accession number AL078582,Smith-Waterman Score=1949.
gagcttcagagagacatagagaagcacagtacaggtgttgcatctgtcctcaacctgtgtgaagtcctgctgcacgactgtgacgcctgtgccactgatgccgagtgtgactctatacagcaggctacgagaaacctggaccggcggtggagaaacatttgtgctatgtccatggaaaggaggctgaaaatcgaagagacgtggcgattgtggcagaaatttctggatgactattcacgttttgaagattggctgaagtcttcagaaaggacagctgcttttcccagctcttctggggtgatctatacagttgccaaggaagaactaaagaaatttgaggctttccagcgacaggtccacgagtgcctgacgcagctggaactgatcaacaagcagtaccgccgcctggccagggagaaccgcactgattcagcatgtagcctcaaacagatggttcacgaaggcaaccagagatgggacaacctgcaaaagcgtgtcacctccatcttgcgcagactcaagcattttattggccagcgtgaggagtttgagactgcgcgggacagcattctggtctggctcacagagatggatctgcagctcactaatattgaacatttttctgagtgtgatgttcaagctaaaataaagcaactcaaggccttccagcaggaaatttcactgaaccacaataagattgagcagataattgcccaaggagaacagctgatagaaaagagtgagcccttggatgcagcgatcatcgaggaggaactagatgagctccgacggtactgccaggaggtcttcgggcgtgtggaaagataccataagaaactgatccgcctgcctctcccagacgatgagcacgacctctcagacagggagctggagctggaagactctgcagctctgtcggacctgcactggcacgaccgctctgcagacagcctgctttctccacagccttcctccaatctctccctcttcgcttcgcttcagcccctccggagcgagcggttcaggacgagacaccccgggttagtgtggactccatccccctgggagtgggatcacgactatgacctcagtcgggacctggagtctgcaatgtccagagctctgccctctgaggatgaagaaggtcaggatgacaaagatttctacctccggggagctgttggcttatcagatgtaatgatccccgaaagccctgaggcctatgtaaaactcacagaaaatgcaatcaaaaatacctccggggaccacagtgccctagagtcacagatccgacaactgggcaaagccctggatgatagccgttttcagatacagcaaaccgaaaatatcattcgcagcaaaactcccacggggccggagctagacaccagctacaaaggctacatgaaactgctgggcgaatgcagtagcagtatagactccgtgaagagactggagcacaaactgaaggaggaagaggagagccttcctggctttgttaacctgcatagtaccgaaacccaaacggctggtgtgattgaccgatgggagcttctccaggcccaggcattgagcaaggagttgaggatgaagcagaacctccagaagtggcagcagtttaactcagacttgaacagcatctgggcctggctgggggacacggaggaggagttggaacagctccagcgtctggaactcagcactgacatccagaccatcgagctccagatcaaaaagctcaaggagcttccagaaagctgttgggaccaccgccaaagccatcatcctctccatcaatctctgcagccctgagttcacccaggctgacagcaaggagagccgggacctgcaggatcgcttgtcgcagatgaatgggcgctgggaccgagtgtgctctctgctggaggagtggcggggcctgctgcaggatgccctgatgcagtgccagggtttccatgaaatgagccatggtttgcttcttatgctggagaacattgacagaaggaaaaatgaaattgtccctattgattctaaccttgatgcagagatacttcaggaccatcacaaacagcttatgcaaataaagcatgagctgttggaatcccaactcagagtagcctctttgcaagacatgtcttgccaactactggtgaatgctgaaggaacagactgtttagaagccaaagaaaaagtccatgttattggaaatcggctcaaacttctcttgaaggaggtcagtcgtcatatcaaggaactggagaagttattagacgtgtcaagtagtcagcaggtaagcaataaacagacatcatcgtgtagcatttcttactggagaccaaagaagcatcatcttcatgcattttag

SEQ ID NO: 9518 - DNA, 4060 bp, Homo sapiens
  SIMILAR (2)..(952): 871254mologous to Mus musculus Syne-1B,accession number AF281870,Smith-Waterman Score=1432.
agaaaatgcagttgggagctggacagatgacttgacccagttgagcctgctgaaggacaccctctctgcctatatcagtgctgatgatatctccattcttaatgaacgcgtagagcttctgcaaaggcagtgggaagaactatgccaccagctctccttaaggcggcagcaaataggtgaaagattgaatgaatgggcagtcttcagtgaaaagaacaaggaactctgtgagtggttgactcaaatggaaagcaaagtttctcagaatggagacattctcattgaagaaatgatagagaagctcaagaaggattatcaagaggaaattgctattgctcaagagaacaaaatacagctccaacaaatgggagaacgacttgctaaagccagccatgaaagcaaagcatctgagattgaatacaagctgggaaaggtcaacgaccggtggcagcatctcctggacctcattgcagccagggtgaagaagctgaaggagaccctggtagccgtgcagcagcttgataagaacatgagcagcctgaggacctggctcgctcacatcgagtcagagctggccaagccaatagtctacgattcctgtaactcggaagaaatacagagaaagcttaatgagcagcaggagcttcagagagacatagagaagcacagtacaggtgttgcatctgtcctcaacctgtgtgaagtcctgctgcacgactgtgacgcctgtgccactgatgccgagtgtgactctatacagcaggctacgagaaacctggaccggcggtggagaaacatttgtgctatgtccatggaaaggaggctgaaaatcgaagagacgtggcgattgtggcagaaatttctggatgactattcacgactttgaagattggctgaagtcttcagaaaggacagctgcttttcccagctcttctggggtgatctatacagttgccaaggaagaactaaagaaatttgaggctttccagcgacaggtccacgagtgcctgacgcagctggaactgatcaacaagcagtaccgccgcctggccagggagaaccgcactgattcagcatgtagcctcaaacagatggttcacgaaggcaaccagagatgggacaacctgcaaaagcgtgtcacctccatcttgcgcagactcaagcattttattggccagcgtgaggagtttgagactgcgcgggacagcattctggtctggctcacagagatggatctgcagctcactaatattgaacatttttctgagtgtgatgttcaagctaaaataaagcaactcaaggccttccagcaggaaatttcactgaaccacaataagattgagcagataattgcccaaggagaacagctgatagaaaagagtgagcccttggatgcagcgatcatcgaggaggaactagatgagctccgacggtactgccaggaggtcttcgggcgtgtggaaagataccataagaaactgatccgcctgcctctcccagacgatgagcacgacctctcagacagggagctggagctggaagactctgcagctctgtcggacctgcactggcacgaccgctctgcagacagcctgctttctccacagccttcctccaatctctccctctcgctcgctcagcccctccggagcgagcggtcaggacgagacaccccagctagtgtggactccatccccctggagtgggatcacgactatgacctcagtcgggacctggagtctgcaatgtccagagctctgccctctgaggatgaagaaggtcaggatgacaaagatttctacctccggggagctgttgccttatcaggggaccacagtgccctagagtcacagatccgacaactgggcaaagccctggatgatagccgctttcagatacagcaaaccgaaaatatcattcgcagcaaaactcccacggggccggagctagacaccagctacaaaggctacatgaaactgctgggcgaatgcagtagcagtatagactccgtgaagagactggagcacaaactgaaggaggaagaggagagccttcctggctttgttaacctgcatagtaccgaaacccaaacggctggtgtgattgaccgatgggagcttctccaggcccaggcattgagcaaggagttgaggatgaagcagaacctccagaagtggcagcagtttaactcagacttgaacagcatctgggcctggctgggggacacggaggaggagttggaacagctccagcgtctggaactcagcactgacatccagaccatcgagctccagatcaaaaagctcaaggagctccagaaagctgtggaccaccgcaaagccatcatcctctccatcaatctctgcagccctgagttcacccaggctgacagcaaggagagccgggacctgcaggatcgcttgtcgcagatgaatgggcgctgggaccgagtgtgctctctgctggaggagtggcggggcctgctgcaggatgccctgatgcagtgccagggtttccatgaaatgagccatggtttgcttcttatgctggagaacattgacagaaggaaaaatgaaattgtccctattgattctaaccttgatgcagagatacttcaggaccatcacaaacagcttatgcaaataaagcatgagctgttggaatcccaactcagagtagcctctttgcaagacatgtcttgccaactactggtgaatgctgaaggaacagactgtttagaagccaaagaaaaagtccatgttattggaaatcggctcaaacttctcttgaaggaggtcagtcgtcatatcaaggaactgggagaagttattaggacgtgtcaagtagtcagccaggatttgtcttcctgggtcttctgctgatgaactggacacctcagggtctgtgagtcccacatcaggaaggagcaccccaaacagacagaaaacgccacgaggcaagtgtagtctctcacagcctggaccctctgtcagcagtccacatagcaggtccacaaaaggtggctccgattcctccctttctgagccagggccaggtcggtccggccgcggcttcatgttcagagtcctccgagcagctcttccccttcagcttctcctgctcctcctcatcgggcttgccatgccttgtaccaatgtcagaggaagactacagctgtgccctctccaacaactttgcccggtcattccaccccatgctcagatacacgaatggccctcctccactctgaactaagcagatgccatcagcagaagagctggatagcataaggaggatcgggtcataagcaatcctaaactactaacaagaggaccttgatcttggcgaaagccctcgggtgtggcagctttagccctcctccagatcacatgtgacgcaaataatggcttcacaggtggaagataaacagtgacaggggagcaaccagacaacatgaaggtatggaagaaatctgggttgagactcctgaacccttaagcactaaaggagatttgagtaaaggaccctcccaaaagtttcccccgggactccatggaatttccgggcccttggccccattcctgtgcacagcccaaggactttcagtagacccatcctgggcagctttccccatggtgctgcctccaacccatcagattaaatgaccctccccaagcgacccatgtccagtgtcgtacaatctaccgaaccaaccagtgctgaagagattttagaaccttgtaacatacaattttttaagagcttatatgggcagcttcctttttaccttgttttccctttggggcatgatgttttaaccttttgctttagaagcacaagctggtaaatctaaaaggcacttttttttaagaggtataaagaaaaactaagatgtaataaataaggttcatgggaaggcttttatgtgaaaaaagttgaatgttatagtaaaaaaaaaaagatatttatgtatgtgccgtttggttaagccaaaagtttgtttggattgatttctttgcatttaattatagatattataaaataaaaaaaaaaaaaaaaa

SEQ ID NO: 9519 - DNA, 1326 bp, Homo sapiens
  SIMILAR (295)..(1176): 251254mologous to Babesia bigemina 200 kDa antigen p200,accession number AF142406,Smith-Waterman Score=246.
atgctcaacatcactaatgatcagggaaatgcaaatcaaaaccacagtgcgataccaccttacttctgcaagaatggccataataaaaaaatcaaaaaaatagtagatgttggcatggatgtggtgaacacggaacacttctacactgctgtaacctatggaaagaaagaaatgtctcatatgtttctgcctaaattggtctttaatactttagcgattctcttgagtttggattataaaatagtttttggtctttttgtattttctgctgtaagcctgtatgattatgtaatgaagaattccgcgaggcggaggccgcacgagaaaaaaaaactcagaaaacccaacgacaggatcggagcacgaaagaacgagaagaagagcgagcaggggagagcgcgcggagtcagagaagagcaaaagcgaagacaaaagagaaaagagaaccagcccgaagaagaaaacggggcgggaacgcgaaagaaccgaggacgaaggtcgaggagggcctgcacaactacaaggcggcagagcgagggaaggcggacaaaagcacacagagcgccggcgccgccggcccatagaaacggaacggcggcgaggcgcaggaaaaacaagaggctaggggaggaccgagggcagaccgggcaagggacgcgagcgtgggggaaggctgaccaaggatgcaaacaaaggaaggagggggcaagaaggcagagaggaacgaaaagcggccagaaggacaggacaggtgcgaacaacagggacgaaaggcggggggagcgggagacgcagaaatcgagagcagtgagagataggaaaagaaacaaacggagccggcgagcgcagcgcgggtcaggagcagagcgaggctgcagcgggagcgaaccgggggccacgagacacaggacagaggaacaaacaccgaagcgggaagaccgacgacggacagagagcgaggaaacgaggagggaatcgggagacgggaagggcgggacggaaacgcgaacggcaaggaggcagatacggaaggaggagccgccggaggggagacaagaagccagagaagaaagagaagaaaagaaaacgggagagaggaagggagaggagaggagagaaaagaagaggacaagaagaagagaaagaagaacgaaaaaagagaaagaagaaacagagggcaaaggcacccataaccatgcataccacacgacaggcccccctcaccttgcctcctcccctctcactcttatgccagcccctgccattccccaccccctgtgtagactgcaagactcaacaagtgacttgctgagcaaaccctgctga

SEQ ID NO: 9520 - DNA, 571 bp, Homo sapiens
  SIMILAR (560)..(450): 541254mologous to Homo sapiens Fragment of human secreted protein encoded by gene 93,accession number Y02895,Smith-Waterman Score=88.
cggacgcgtgggtgcaaaaagggcacggggcagagggactatgttgtgagcctgcgaaagaagtttgtgtggggactgtgggcagtgaatgcgttgggaacaatatggaaaactgggagctgccttggaatctacagggccgggctgaagaaaagaagaatggtattcatgcagttcccattttacagatgaaaacaagaggactttttctgtgaagtcaagaaagtggttacaatggtactttcagcctgtccgaattatgtgttgcccctcccctttttattaataacattgaagtgtgatgggacaaccactgaagccgtctgttgaaacctgctgggactttttagccattctcttcaacataaagaatgggtgttttttgagggggtgagaggaatgtggaaatgttgtcaaagagtacaatgttttagttgagacaggaggaatatattttgttgagatctacagcacagcatggtgactgtagttaacaatgaagtattgtgtatttcaaaattgctaagacaataaatttcaaatgttctcaccacaaaaaaaaaaaaaaaaa

SEQ ID NO: 9521 - DNA, 1141 bp, Homo sapiens
  SIMILAR (144)..(206): 661254mologous to Homo sapiens Human secreted protein, SEQ ID NO: 7193,accession number G03112,Smith-Waterman Score=86.
  misc_feature (1)...(1141): n = a,t,c or g
atgaatagccatttcttaaaagaagatatccaaatggccaataaacatatggaaaaatgctcacacattactaatgatcagggaaatgcaaatcaaacccacagtgcgataccaccttacttctgcaagaatgcccataataaaaaaatcaaaaaaatagtagatgttggcatggatgtggtgaacacggaacacttctacactgctgattatcctggttcctatattgttcgtcccagttctagtatcagacatttcttcaaagagcctgattcctttcagaatggtaggaaaacttacatctggctgctgaatgagcacattgtatcttctccctcattggcaatgctaggaagtatatcgcatggtctagctgtccgccagcctcgggtcctccttgcagccctcgccctggttttgtccgccttccctgcctcctcttctgggggagttagattgagttgtaacaagaacatgccactgtctcactggctgcagcgtgtggtccccttaccagaggtaaggaagagatggatctccactcatgttgtagacagaatgtttatgtcctctccaaattcttatgttgaaaccctaacccctaatgtgatggtatgtggagatgggcctttggtagtgaggatgcgaagagaaggtggctgtctgcaaaccaggaagagagccctcaccagaaaccggcagagctaagacttaggggactggcagactattgcaaaaagggcacggggcagagggactatgttgtgagcctgcgaaagaagtttgtgtggggactgtgggcagtgaacgcgttgggaacaatatggaaaactgggagccgccttggaatctacagggccggagagaccgnnnnnnnnnnnnnnnnnnnnnnnnnnnnnnnnnnnnnnnnnnnnnnnnnnnnnnnnnnnnnnnnnnnnnnnnnnnnnnnnnnnnnnnnnnnnnnnnnnnnnnnnnnnnnnnnacctaaaatattgaatgctgttaataaatctcctgaggccagcataagaaggtgatgggcaaaactaatgcagtaggagctgaaatcgaccagggggttcttatccaacagacagcagcaaaactctttgtgtatctgcgttcctttcaacaagtgtga

SEQ ID NO: 9522 - DNA, 289 bp, Homo sapiens; identical to SEQ ID NO: 9341
  SIMILAR (137)..(81): 841254mologous to Homo sapiens glutathione peroxidase,accession number Y00433,Smith-Waterman Score=82.
  misc_feature (1)...(289): n = a,t,c or g

SEQ ID NO: 9523 - DNA, 484 bp, Homo sapiens
  SIMILAR (3)..(188): 1001254mologous to Homo sapiens glutathione peroxidase,accession number Y00433,Smith-Waterman Score=336.
agatgaacgagctgcagcggcgcctcggaccccggggcctggtggtgctcggcttcccgtgcaaccagtttgggcatcaggagaacgccaagaacgaagagattctgaattccctcaagtacgtccggcctggtggtgggttcgagcccaacttcatgctcttcgagaagtgcgaggtgaacggtgcccctacgcaggtacagccgccgcttccagaccattgacatcgagcctgacatcgaagccctgctgtctcaagggcccagctgtgcctagggcgcccctcctaccccggctgcttggcagttgcagtgctgctgtctcgggggggttttcatctatgagggtgtttcctctaaacctacgagggaggaacacctgatcttacagaaaataccacctcgagatgggtgctggtcctgttgatcccagtctctgccagaccaaggcgagtttccccactaataaagtgccgggtgtcagc

SEQ ID NO: 9524 - DNA, 552 bp, Homo sapiens
  SIMILAR (112)..(549): 991254mologous to Homo sapiens glutathione peroxidase,accession number Y00433,Smith-Waterman Score=782.
atgtgtgctgctcggctagcggcggcggcggcggcggcccagtcggtgtatgccttctcggcgcgcccgctggccggcggggagcctgtgagcctgggctccctgcggggcaagatgaacgagctgcagcggcgcctcggaccccggggcctggtggtgctcggcttcccgtgcaaccagtttgggcatcaggagaacgccaagaacgaagagattctgaattccctcaagtacgtccggcctggtggtgggttcgagcccaacttcatgctcttcgagaagtgcgaggtgaacggtgcgggggcgcaccctctcttcgccttcctgcgggaggccctgccagctcccagcgacgacgccaccgcgcttatgaccgaccccaagctcatcacctggtctccggtgtgtcgcaacgatgttgcctggaactttgagaagttcctggtgggccctgacggtgtgcccctacgcaggtacagccgccgcttccagaccattgacatcgagcctgacatcgaagccctgctgtctcaagggcccagctgtgcctag

SEQ ID NO: 9525 - DNA, 1195 bp, Homo sapiens
  SIMILAR (365)..(970): 421254mologous to Homo sapiens glutathione peroxidase,accession number M83094,Smith-Waterman Score=232.
  misc_feature (1)...(1195): n = a,t,c or g
acggagccctcgaggggcccagccttggaagggtaactggaccgctgccgcctggttgcctgggccagaccagacatgcctgctgctccttccggcttaggaggagcacgcgtcccgctcgcgcgcactctccagccttttcctggctgaggaggggccgagcctccggtagggcgggggccggatgaggcgggacctcaggcccggaaaactgcctgtgccacgtgacccgccgccggccagttaaaaggaggcgcctgctggcctccccttacagtgcttgttcggggcgctccgctggcttcttggacaattgcgccatagtgtgctgctcggctagcggcggcgacggcggcggcccagntcggtgtatgccttctcggcgcgcccgctggccggcggggaagcctgttgagcctgggctccctgcgggggcaagggtcctacttatcgaaaaatgtggcggtcccttctgaggccaccacggtccgggaactacacccataatgaacgagcttgcagcggccgccttcggacccggggggctgggtggtgctcggcttccccgtgcaaccagtttgggcatcaggagaaccgccaagaacgaaagagattctgaattccctcaaagtacgctccggccctggtggtgggttcgaagcccaacttcatggctcttcgagaaagtgcgaggttgaacggttgcgggggcgcaccctctcttcgcctttctgcgaggaggccctgccagctcccaagcgacgacggcccccgcgctttatgaccgacccccaagcttattcacctggttctccggtgtgttcgcaacgatagttgcctggaacttctttgagaagttcctgggtgggccctgacggtgtgcccctacgcaggtacagccgccgctttccagaccattgacatcgagcctgacatcgaagccctgctgtctcaagggcccagctgtgcctagggcgcccctcctacccccggctgctttgcagtttcaagtgctgctgtctcgggggggttttcatctatgaggatgatacctactaaacctacgagggaggaacaccttgatcttacagaaaataccaacctcgagatgggtgctggtcctgttgatcccagtctctgccaggaccaaggcgaggtttccccactaataaagtgccgggtgtcagcagaaaaa

SEQ ID NO: 9526 - DNA, 480 bp, Homo sapiens
  SIMILAR (13)..(126): 841254mologous to Homo sapiens DKFZp566D244.1 hypothetical protein,accession number AL390093,Smith-Waterman Score=169.
tatcttaaatggcagcaattgaagtttatgcatactccacatcagttccttcttctcagcagtccaccagccaaagaatccaattttagagctgctaaaaaactctttggaagcacctttgcatttcagtgagtaaggcttaatgttaatgggggtgtgctcccattaacattttccagaaatgtatggggaagatatcactgtctttcagtaaatgatcattcagtagatggtcattcaacagatggtcatgtagtcaactacataatacttgatttggcaatccagaaccttcagaaggcaccatgacttattatgttttgaccactttgaagataattaattttctggttttgctttttcctttccgtctgtttttttagtggctcacacattgaaaactggcactccatcctgaggaatggtctggttgttgcttctaatacacgattgcagggagattttctgaatgctttcaca

SEQ ID NO: 9527 - DNA, 737 bp, Homo sapiens; identical to SEQ ID NO: 9398
  SIMILAR (1)..(210): 981254mologous to Homo sapiens Human secreted protein, SEQ ID NO: 7656,accession number G03575,Smith-Waterman Score=353.

SEQ ID NO: 9528 - DNA, 1055 bp, Homo sapiens
  SIMILAR (423)..(629): 711254mologous to Homo sapiens hypothetical protein,accession number AL122091,Smith-Waterman Score=243.
atcaagcaatagatcacatattgtgaaactgccagttaacaggcgattgaagtttatgcatactccacatcagttccttcttctcagcagtccaccagccaaagaatccaattttagagctgctaaaaaactctttggaagcacctttgcatttcatggctcacacattgaaaactggcactccatcctgaggaatggtctggttgttgcttctaatacacgattgcagctccatggtgcaatgtatggaagtggaatctatcttagtccaatgtcaagcatatcatttggttactcagggatgaacaagaaacagaaggtgtcagccaaggacgagccagcttcaagcagtaaaagcagcaatacatcacagtcacagaaaaaaggacagcaatcccaattcctgcaaagccgtaacttaaaatgccatagccttatgtgaagtgatcacctcatctgacctgcacaaaccatggggagatatggggttgtcccccaatactgaccatgtctgcacacgattctttttcgtctatgaagacggccaagtgggagatgcaaatattaatacacaagaaggaggcattcacaaagagatcctccgagtaattggtaatcaaactgctactggttaaaggaccaccatttaattaacatgattccgaaagcccttccctcgggttcaaagctggattttgaactgaagaagattataaaaattatttattggttattataaacaaaattaaccctttgaatactggattttttttcttagtatttctaagtatctcattaaatacctaaaatgggtataaggtttatccaattgtaggggttatggaatctagtaataaaatttcaacagcacttaaactgaagtttgggttgctcatacaataaacagattgaaaaaactgttttgtgctgatatttttatactaaactctttaactggatatttggtattatataccgacattttaggttaccaaaatagaattgagaacattttataatggcatctaaatctatcagatactttgcaataagat

SEQ ID NO: 9529 - DNA, 3685 bp, Homo sapiens
  SIMILAR (2228)..(3613): 781254mologous to Felis catus lysosomal alpha- mannosidase,accession number AF010191,Smith-Waterman Score=1883.
gcttcggggtctgcgctcgcggctgcctggactcagcaggcccctggaccatgtcccgcgccctgcggccaccgctcccgcctctctgctttttccttttgttgctggcggctgccggtgctcgggccgggggatacgagacatgccccacagtgcagccgaacatgctgaacgtgcacctgctgcctcacacacatgatgacgtgggctggctcaaaaccgtggaccagtacttttatggaatcaagaatgacatccagcacgccggtgtgcagtacatcctggactcggtcatctctgccttgctggaagatcccacccgtcgcttcatttacgtggagattgccttcttctcccgttggtggcaccagcagacaaatgccacacaggaagtcgtgcgagaccttgtgcgccaggggcgcctggagttcgccaatggtggctgggtgatgaacgatgaggcagccacccactacggtgccatcgtggaccagatgacacttgggctgcgctttctggaggacacatttggcaatgatgggcgaccccgtgtggcctggcacattgaccccttcggccactctcgggagcaggcctcgctgtttgcgcagatgggcttcgacggcttcttctttgggcgccttgattatcaagataagtgggtacggatgcagaagctggagatggagcaggtgtggcgggccagcaccagcctgaagcccccgaccgcggacctcttcactggtgtgcttcccaatggttacaacccgccaaggaatctgtgctgggatgtgctgtgtgtcgatcagccgctggtggaggaccctcgcagccccgagtacaacgccaaggagctggtcgattacttcctaaatgtggccactgcccagggccggtattaccgcaccaaccacactgtgatgaccatgggctcggacttccaatatgagaatgccaacatgtggttcaagaaccttgacaagctcatccggctggtaaatgcgcaggtcagtgaaacatgacgacttcttcccttacgcggatggcccccaccagttctggaccggttacttttccagtcggccggccctcaaacgctacgagcgcctcagctacaacttcctgcaggtgtgcaaccagctggaggcgctggtgggcctggcggccaacgtgggaccctatggctccggagacagtgcacccctcaatgaggcgatggctgtgctccagcatcacgacgccgtcagcggcacctcccgccagcacgtggccaacgactacgcgcgccagcttgcggcaggctgggggccttgcgaggttcttctgagcaacgcgctggcgcggctcagaggcttcaaagatcacttcaccttttgccaacagctaaacatcagcatctgcccgctcagccagacggcggcgcgcttccaggtcatcgtttataatcccctggggcggaaggtgaattggatggtacggctgccggtcagcgaaggcgttttcgttgtgaaggaccccaatggcaggacagtgcccagcgatgtgagcccaaacaacgaatattcccccgctgggactcctcccccagtgggcatttcctcatcgcccccatggatatcgcctgcttccatgaatacctcccactcatgcatatctcttcccccctcttgtatcttctccctctgccccttaatatcagtctccccttgggaacatatgcctcctgtgagtggtcctcccttttttttttttttttgagacggagtctcgctctgtcacccaggctggagtgcagtggcgcgatcttggctcacttcaaactccgcctgctggattataggcatgagccaccgtgcctggctggtcctccattttaataccccgcttccccaggaaaatttattgctgtttatggacatctccttcattccagaaaacgtcctcccccaaacctcttcctcccccgagaacctgcctcaagggtttcttcccctacttcctccttcactcccccgactccatggtctctccaccctcccggtgggtttttttttccacctggtgaatcttctctgcaatcatttccttggaatctgactgtccccccaccacacacacctccatttcctttccccatctcaggactcttttccttccttgagttttttgtctccatgcatgtacagctttccatgggtactcttgactcagtttccctcctcctttatccgaggtggtaatatttcccagctcagacagccaggcgcaccctccggagctgctgttctcagcctcactgcccgccctgggcttcagcacctattcagtagcccaggtgcctcgctggaagccccaggcccgcgcaccacagcccatccccagaagatcctggtcccctgctttaaccatcgaaaatgagcacatccgggcaacgtttgatcctgacacagggctgttgatggagattatgaacatgaatcagcaactcctgctgcctgttcgccagaccttcttctggtacaacgccagtataggtgacaacgaaagtgaccaggcctcaggtgcctacatcttcagacccaaccaacagaaaccgctgcctgtgagccgctgggctcagatccacctggtgaagacacccttggtgcaggaggtgcaccagaacttctcagcttggtgttcccaggtggttcgcctgtacccaggacagcggcacctggagctagagtggtcggtggggccgatacctgtgggcgacacctgggggaaggaggtcatcagccgttttgacacaccgctggagacaaagggacgcttctacacagacagcaatggccgggagatcctggagaggaggcgggattatcgacccacctggaaactgaaccagacggagcccgtggcaggaaactactatccagtcaacacccggatttacatcacggatggaaacatgcagctgactgtgctgactgaccgctcccaggggggcagcagcctgagagatggctcgctggagctcatggtgcaccgaaggctgctgaaggacgatggacgcggagtatcggagccactaatggagaacgggtcgggggcgtgggtgcgagggcgccacctggtgctgctggacacagcccaggctgcagccgccggacaccggctcctggcggagcaggaggtcctggcccctcaggtggtgctggccccgggtggcggcgccgcctacaatctcggggctcctccgcgcacgcagttctcagggctgcgcagggacctgccgccctcggtgcacctgctcacgctggccagctggggccccgaaatggtgctgctgcgcttggagcaccagtttgccgtaggagaggattccggacgtaacctgagcgcccccgttaccttgaacttgagggacctgttctccaccttcaccatcacccgcctgcaggagaccacgctggtggccaaccagctccgcgaggcagcctccaggctcaagtggacaacaaacacaggccccacaccccaccaaactccgtaccagctggacccggccaacatcacgctggaacccatggaaatccgcactttcctggcctcagttcaatggaaggaggtggatggttaggtctgctgggatgggccctccaagcccaagcctcctgctccgggggcagaccgagactct

SEQ ID NO: 9530 - DNA, 3877 bp, Homo sapiens
  SIMILAR (64)..(3066): 861254mologous to Homo sapiens mannosidase, alpha, class 2B, member 1,accession number BC000736,Smith-Waterman Score=4478.
atgtcccgcgccctgcggccaccgctcccgcctctctgctttttccttttgttgctggcggctgccggtgctcgggccgggggatacgaggcgagatcaggcctctctgagtcactcacctctagatcaagacttactctgcagcccccgacctcgggggttattgacaaggtatgtgtgtttggggtccctgtgcagacatgccccacagtgcagccgaacatgctgaacgtgcacctgctgcctcacacacatgatgacgtgggctggctcaaaaccgtggaccagtacttttatggaatcaagaatgacatccagcacgccggtgtgcagtacatcctggactcggtcatctctgccttgctggcagatcccacccgtcgcttcatttacgtggagattgccttcttctcccgttggtggcaccagcagacaaatgccacacaggaagtcgtgcgagaccttgtgcgccaggggcgcctggagttcgccaatggtggctgggtgatgaacgatgaggcagccacccactacggtgccatcgtggaccagatgacacttgggctgcgctttctggaggacacatttggcaatgatgggcgaccccgtgtggcctggcacattgaccccttcggccactctcgggagcaggcctcgctgtttgcgcagatgggcttcgacggcttcttctttgggcgccttgattatcaagataagtgggtacggatgcagaagctggagatggagcaggtgtggcgggccagcaccagcctgaagcccccgaccgcggacctcttcactggtgtgcttcccaatggttacaacccgccaaggaatctgtgctgggatgtgctgtgtgtcgatcagccgctggtggaggaccctcgcagccccgagtacaacgccaaggagctggtcgattacttcctaaatgtggccactgcccagggccggtattaccgcaccaaccacattgtgatgaccatgggctcggacttccaatatgagaatgccaacatgtggttcaagaaccttgacaagctcatccagctggtaaatgcgcagcaggcaaaaggaagcagtgtccatgttctctactccacccccgcttgttacctctgggagctgaacaaggccaacctcacctggtcagtgaaacatgacgacttcttcccttacgcggatggcccccaccagttctggaccggttacttttccagtcggccggccctcaaacgctacgagcgcctcagctacaacttcctgcaggtgtgcaaccagctggaggcgctggtgggcctggcggccaacgtgggaccctatggctccggagacagtgcacccctcaatgaggcgatggctgtgctccagcatcacgacgccgtcagcggcacctcccgccagcacgtggccaacgactacgcgcgccagcttgcggcaggctgggggccttgcgaggttcttctgagcaacgcgctggcgcggctcagaggcttcaaagatcacttcaccttttgccaacagctaaacatcagcatctgcccgctcagccagacggcggcgcgcttccaggtcatcgtttataatcccctggggcggaaggtgaattggatggtacggctgccggtcagcgaaggcgttttcgttgtgaaggaccccaatggcaggacagtgcccagcgatgtggtaatatttcccagctcagacagccaggcgcaccctccggagctgctgttctcagcctcactgcccgccctgggcttcagcacctattcagtagcccaggtgcctcgctggaagccccaggcccgcgcaccacagcccatccccagaagatcctggtcccctgctttaaccatcgaaaatgagcacatccgggcaacgtttgatcctgacacagggctgttgatggagattatgaacatgaatcagcaactcctgctgcctgttcgccagaccttcttctggtacaacgccagtataggtgacaacgaaagtgaccaggcctcaggtgcctacatcttcagacccaaccaacagaaaccgctgcctgtgagccgctgggctcagatccacctggtgaagacacccttggtgcaggaggtgcaccagaacttctcagcttggtgttcccaggtggttcgcctgtacccaggacagcggcacctggagctagagtggtcggtggggccgatacctgtgggcgacacctgggggaaggaggtcatcagccgttttgacacaccgctggagacaaagggacgcttctacacagacagcaatggccgggagatccttgagaggaggcgggattatcgacccacctggaaactgaaccagacggagcccgtggcaggaaactactatccagtcaacacccggatttacatcacggatggaaacatgcagctgactgtgctgactgaccgctcccaggggggcagcagcctgagagatggctcgctggagctcatggtgcaccgaaggctgctgaaggacgatggacgcggagtatcggagccactaatggagaacgggtcgggggcgtgggtgcgagggcgccacctggtgctgctggacacagcccaggctgcaagccgccggacaccggctcctggcggagcaggaggtcctggcccctcaggtggtgctggccccgggtggcggcgccgcctacaatctcggggctcctccgcgcacgcagttctcagggctgcgcagggacctgccgccctcggtgcacctgctcacgctggccagctggggccccgaaatggtgctgctgcgcttggagcaccagtttgccgtaggagaggattccggacgtaacctgagcgcccccgttaccttgaacttgagggacctgttctccaccttcaccatcacccgcctgcaggagaccacgctggtggccaaccagctccgggaggcaagccttcagggttcaagtggacaacaaacacaggccccacaccccaccaaactccgtaccagctggacccggccaacatcacgctggaacccatggaaatccgcactttcctggcctcagttcaatggaaggagtgtgccactgaagattctgggtgtcgccccatgggcccgccgccccggcccgttgttacccggtattgtaagaacaagccggtacccaaagttctcgcttctgccgaaggtgtcccctgatgccaagattccgcattttttgacctggggcggaaaaaaggcaaaaagtggaatgagttttccgcttttgtggcccacatgggtggtcagatgaatatgagcagctgtcctctgaaagccctggagggctgcccgaaatttgtggccaataaggtccatgggaaaaagttgtggcaaaagatggcttcccatatcccgggtgccgcttccaccccttccacgtcatccgcatcgaacaagatgttgtcctgtgctggggctgaacaggctccaaaacaggccatgcgaaggtgcctttgggaaaggccccagggcactgtggccagggttcacattgggccaagttatcatgtccattccgcaccaaggctgcagaacaaggagcatgtgaatgaaggccctgcgcagggccaaagttcaagtttcctggccgccaagaagatccacatcttcaaagaagtgggggttcaccaagtttcaatgctgatgaattttgaagacatggtggctgaaaagcggctcatcccagatggctgtgggggtcaagttacatcccccagtcgtggcccctctggaacaagttggcgggcccctgccactccatgaagggcttcccaatgttgctgcccccctcttaatactcccccaataaaattcctacttccctggtccaaaaaaaaaaaaaaaaaaa

SEQ ID NO: 9531 - DNA, 513 bp, Homo sapiens
  SIMILAR (1)..(432): 931254mologous to Cricetulus griseus ribosomal protein S14,accession number M11241,Smith-Waterman Score=680.
atggcacctggaaaggggaaggaaaagaaggaagaacaggtcatcaacctcggacctcaggtggctgaaggggagaatgtatttggtgtctgccatatctttgcatccttcaatgacacttttgtccatgtcacggatctttctggcaaacaaaccatctgccgtgtgactggtgggatgaaggtgaaggcagaccgagatgaatcctcgccatatgctgctatgttgaccacccaggatgtggcccagaggtgcaaggagctgggtatcattgccctacacatccaactccgggccacaggaggaaataggaccaagacccttggacctggggcccagtcggccctcagagcccttgcctgctcgggtatgaagatcgggaggattgaggacgtcacccccatcccctctgacagcactctcaggaagggggtcaccgtggtcgccgtctgtgaacaagattcctcaaaatattttctgttaataaattgccttcatgtaaaaaataaataa

SEQ ID NO: 9532 - DNA, 529 bp, Homo sapiens
  SIMILAR (77)..(190): 781254mologous to Homo sapiens carboxyl terminal LIM domain protein,accession number U90878,Smith-Waterman Score=153.
  misc_feature (1)...(529): n = a,t,c or g
aaacaggagttgaatgagcccccgaaacagtccacgtctttcttggttttgcaggaaatcctggagtctgaaganaaaggggatcccaacaagccctcaggattcagaagtggttaaagctcctgtcactaaagtggctgcgtcgattggaaatgctcagaagttgcctatgtgtgacaaatgtggcactgttctccagcaggcctctgctgcagctttttctctcagtgttntggccctctcctctcttgaaagttctctgccaactttggttttccctctgcttgtaaaacattgagtcccctccctgccttggttaattgactcacaccagctgtgcgatgcccgcttttacaattaaaggaaaactgttgtgttcagtgtccccttgtcagcaacactgtgtcccttcgccccgccgtttttttttggtgcatttggacatcagccaaatttgaacccaatcaaatataacgtgtctgacactgattttgtttttacccaataaatgtatagcctccaaaacaaa

SEQ ID NO: 9533 - DNA, 469 bp, Homo sapiens
  SIMILAR (3)..(251): 971254mologous to Homo sapiens carboxyl terminal LIM domain protein,accession number U90878,Smith-Waterman Score=421.
acctcactgtagccagatctgaacataaagtctggtctcctctggtgacgggggaagggaagcgtcatccatacaagatgaatttagcctctgaaccccaggaggtcctgcacataggaagcgcccacaaccgaagtgccatgccctttaacgcctcgcctgcctccagcactactgccagggtcatcacaaaccagtacaacaacccagctggcctctactcttcagaaaatatctccaacttcaacaatggcaagcagccttgtcatcgacaaagaatctgaagtttacaagatgcttcaggagaaacaggagttgaatgagcacccgaaacagtccacgtctttctgggttttgcaggaaatcctggagtctgaagaaaaaggggatcccaacaagccctcaggattcagaagtgttaaagctcctgtcactaaagtggctgcgtcgattggaaatgctcagaagt

SEQ ID NO: 9534 - DNA, 1600 bp, Homo sapiens
  SIMILAR (261)..(1004): 351254mologous to Homo sapiens carboxyl terminal LIM domain protein,accession number U90878,Smith-Waterman Score=239.
  misc_feature (1)...(1600): n = a,t,c or g
atgaccacccagcagatagacctccagggcccggggccgtggggcttccgcctcgtggggcgaaaggacttcgagcagcctctcgccatttcccgggtcactcctggaagcaaggcggctctagctaatttatgtattggagatgtaatcacagccattgatggggaaaatactagcaatatgacacacttggaagctcagaacagaatcaaaggctgcacagacaacttgactctcactgtagccagatctgaacataaaaggtctggtctcctctggtgacggaggaagggaagcgtcatccatacaagatgaatttagcctctgaaaccccaggaggtcctgcacataggaagcgcccacaaccgaagtgccatgccctttaccgcctcgcctgcctccagcactactgccagggtcatcacaaaccagtacaacaacccagctggcctctactcttctgaaaatatctccaacttcaacaattgcccttggagtcaaaagactggctgccagcgggggtggaggcgaacagcagacccttagaccatgcttcagcctccaaagcagccttgtcatcgacaaaagaatcttgaaagtttacaagatgcttcaggagaaacaggaagttgaatgaagcccccgaaacagtccacgtcttttcttgggttttgccaggaaatcctgggagtctgtaagaaaaaggggatcccaacaagccctgcaggattcagaagtgtttaaagctcctgtcacttaaagtggcttgcgtcgattgggaaatgctccaggaagtttgccttttgtgttgacaaatgttggcacttgggatttttgggtgtgttttttgaagctgcgggcaccgtcaccgccacccctgagtgtttatgtgttgcactggactgtgggcaccaaacctgaaaacagaaggggccatttcttttgtggatggatcaaaatctactgtgaagaaagcatggccccgggaagcgaagtcaacacccaccctgaggggttatgaaagtgggtcaactgtgtttcccccaagtggagcccagcaagatctggacccactgttcctcccagcaggccttctgctgaagcttttcctcctcaagtgttctgggcccctctccctctcttgaaagttctctgccttactttgggttttcccctctgcttgtaaaacattgagtcccctccctgccttggttaattgactcacacccagctgtgcgattgcccggcttttacaattaaaggaaaactgttgtgttcagtgtccaccttgtcagcaacactgtgtcccttcaccccggccggtcttctctgctgcatttggacatcaggccaaatttgaacccaattcaaatataaccgtgtctgacacttgattttgtttttactcaataaatgtatagactacaaagcnnnnnnnnnnnnnnnggggcgccctttaaaaagaacaaattttaaataccgcgggttgggaaggaaaaattttttaattggggcccaaaataaaatcctgggcgggtttttaaaacgggggggtgggaaaaacccgggggtccccaaataaatcctttggaaaaaaaca

SEQ ID NO: 9535 - DNA, 565 bp, Homo sapiens
  SIMILAR (101)..(271): 911254mologous to Homo sapiens Homo sapiens B268 sequence,accession number W57572,Smith-Waterman Score=267.
tccactggtacgtaaggcagcctgtgcgggcgagaccagactgggccctcccctcctgcagtgatttgtttcttcttcttttttaaatcacgttttcctgccttttctaggttataggtaccagcctctggcttctacagcctcagacaatgactttgtcacaccagagccccgccgtactacccgtcggcatccaaacacccagcagcgagcttccaaaaagaaacccaaagttgtcttctcaagtgatgagtccagtgaggaaggtatgatgctcccgcctgttcccggccgagaaggcacacagctagggtgcagagggctggtttccataggacctgctgcgggggcctgagtgtagatgctctgccccactgccgcagaagggcctctcctgtacagcttggattttatttcttctgtgcggtgtgggattgtctcacttgttctctgatatctattttttcaccatgtttgtgactcagctttttcttattcctttaattctttgcatagatctttccgccgagatgacagaagacgagacacccatgaaacaactccc

SEQ ID NO: 9536 - DNA, 1977 bp, Homo sapiens
  SIMILAR (893)..(1030): 471254mologous to Homo sapiens Human prostate protein HPA20,accession number W23314,Smith-Waterman Score=76.
atgaatggggttccagttggagcacaaaagcgggtggacaaggaagaagtcaagaatggggcaatagctgagcttttcagtgaggattggtcagattgtgcttataaagcaaacgaggtgtccaggattagacctctagaagagtctgagctgttgtaccccatactggggcaaagtaagttgtttgtgctgagtggggagtggagccaaagctcagaggaggcatcggaagaggtggcagtgaccctcatttaccaactggcagagagtcccacagtgatctgtgcccagatatggcagggctgtgcaaaacaggccctggagaagctagaagagaagagaaccagtcagggggacccgaaggagtctcccacaatgctccccactttcctgttgatgaacctcttgtccctggctggggatgtggctctgcagcagctggtccacttggagcaggcagtgagtggagagctctgtcagcgccgagttctccgggaagaacaggagcacaagaccaaagatcccaaggagaagaatacaagtttcgagaccactatggaggaggagctggggctggttggggcagcagatgacacggaggcagaactaatccgcggcttctgcaagatggaactgttggatggcaaacagacactggctgcctttgttccactcttgcttaaagtctacaacaactcaggcctctatagcaacccagacctctctgcagctgcttcacctacccttggcaagttctgcatgatcagtaccactttctgcaactcccagcctcatcttctgttcaccatgctagaaaagtctccacttcccattgtccggtctaatctcatcgttgccactggggatctggccatccactttcccaatctggtggacccctggactcctcatctatatgctcaccttcaggaccctgctcagccagtgtggaaaacagtggggctggtgatgactccacctgatcctcaaggacatggtgaaggtaaaggggcagagcaaggcccttgcaagatgcttggcaattttgactgttttggagataaactgtcagatgagtccatcttcagttcttttttgtcagttatgggcaagctacaacatggggccaagcctgagggcaaggctataatagatgaatttgagcaaaagcttcaggcctgtcatgccagaggtttggatgggattgaggagcttgagattaaccaagcaggtagccagagagccccaacagccaagaaaccatccactgtttgtaggcaccagcctctggcttctgcagcctcagacaatgacttcgtcacaccagagccccgtcgtactacccatcggcatccgaacacccagcagcgagcttccgaaaagaaaccaaaagttgtcttctcaagtgatgagtcaagcattaagactgaggttgaaggtttggggtacaacatcaaactgagagtggccacacagaggctcagctttgtttgggtcatgaacattgcagagggagaatcagctgtgctggtgactgtggcatggcctgagtgtgaagtggctgtgatggggtccttggggagtgctgccagaggcactgggaaaaggctacaaggagaaggaaacctccagctgaacttcgtaacaattgctaccaaactagaagtctcctggacagaacttgggggagggtgtgtatctgctttgttcgccagtgtgggtacaaagagagaaaaagcaggattttaccagggttgtagttttgccagtaatatcatgaaaagaggcagggtgaaggaagttgaggatgtgcaaaagagacttataaaaatgactgtggaattcaatctggcatggtcatctctgcctccacacatggctatgaatggagaccagggaggggatagagtcacccatgaatcattcctcaggtgcatgaccctgatgagggccaagggagtggagagactctcttga

SEQ ID NO: 9537 - DNA, 5590 bp, Homo sapiens
  SIMILAR (2447)..(4111): 891254mologous to Homo sapiens Human prostate protein HPA20,accession number W23314,Smith-Waterman Score=2436.
aagttttggagcgccggacaagctgaggtccgcgactcgtcgctaagattccccaaaactgagatttcaagaaaattcaccctttccgctttctttggcgcccttcaaccgtgaaggaaatgaaggttgagaacctggaacccgcttccaaagaccaagccctttctctgtgcctcacaacagtcttgcgctgtagctgtttttattacccctattttactactggggaggagatttgaggtcctgaaagtgaagtgacttgctggacgtcacttagcagaggagatggcgaaacctggattagaggcgatgccttctaactcccagcgtggacttgcctcctttcctgggggtgactgaatgcccagccagggacgcgacgtctctggccagcagaaatacggcctcctccccgccgactgggcaaagggggaccttgcggccaaggagggattcgcaggcgggccgggggtgggagcgggggccggagccggagccttggcccgcccccgggcggcgctgtgattggccggccgctccggcgggcgtcgcgattggccgtcctgcagccgttgagatttgaactcggtatttgtggctttgcccgcgcgttgccagactcagaggcggccctttgcctctgcctgccggggattggccggattctccgccgacttgaaaactgccttgctaattggtgcgtgttgtgcacgcgtgttttttccttttcatttcagcctgactgccggaatcagagccgcgggtgagatccccagccctgtgagcctgtaggagtagaatggctccccaaatgtatgagttccatctgccattatccccagaggagttgttgaaaagtggaggggtgaatcagtatgttgtgcaagaggtactgtccatcaaacatcttccaccacagcttagagcttttcaggctgcctttcgagctcaggggcccctggctatgctgcagcactttgatactatctacagcattttgcatcactttcgaagtatagatcctggcctcaaagaagatactctggaattcctgataaaaggtgtttatgggtcaggggtggtatcccgccactcccaggagcttccagctatcctggatgatacaactttgagtggatcagatagaaacgcccatctaaatgccctcaaaatgaactgttatgctctgatacgtctcctggaatcctttgagaccatggccagccagacaaaccttgtggacctggaccttggtgggaagggtaagaaagctcggaccaaggcagcccatggctttgactgggaagaagagaggcaaccaattcttcagcttttaacacagctacttcagttggacatccgtcacctgtggaaccactcaataattgaagaagaatttgtcagtttggttactggctgttgctaccgccttctggagaatcccaccattaatcaccagaagaaccgccccactcgggaagccataacacacctgcttggtgtagccttgacccgttataaccatatgctcagtgctacagtgaagatcatccagatgctgcagcactttgaacacctggcacctgtactggttgcagccgtgagtctatgggcaactgactatggaatgaagagcatagtgggagagattgtaagagagattggacaaaagtgtccccaagagctgagtcgagacccttcagggacaaagggctttgcagcattcctgacagaactagcagaacgtgtcccagctatcctgatgtccagcatgtgcattttgctagatcacctggatggagaaaattacatgatgcgtaatgctgtgctggcagccatggcggagatggtgctgcaggttctcagtggcgatcaactggaagcagcagcccgagacaccagagaccagttcttggatactttacaagcccatggccatgatgtcaactcctttgtgcggagccgtgttttgcagctcttcacccgaattgtccagcagaaggctctccccctgacacgtttccaggcagtggtggctttagctgtgggacgtctggcagacaagtcagtgctagtatgtaaaaatgccatccagctgctggccagttttctagccaataatcctttctcctgcaagcttagtgatgctgaccttgccggaccactgcagaaggagacccagaaattacaagagatgagggcccagaggcgaactgcagcagcttctgcagtgctggacccagaggaggagtgggaagccatgctgccagagttgaagtctaccctgcagcagcttctacagcttccccagggagaggaggagattcctgagcaaattgccaatacagagacaactgaagatgtgaaaggacgcatctatcaactgcttgccaaagctagttacaaaaaggccatcattctcactcgagaagccacaggccacttccaggagtccgaacccttcagtcatatagacccagaggagtcagaggagaccaggctcttgaatatattaggacttatcttcaaaggcccagcagcttccacacaagaaaagaatccccgggagtctacaggaaacatggtcacaggacagactgtctgtaaaaataaacccaatatgtcggatcctgaggaatccaggggaaatgatgaactagtgaagcaggagatgctggtacagtatctgcaggatgcctacagcttctcccggaagattacagaggccattggcatcatcagcaagatgatgtatgaaaacacaactacagtggtgcaggaggtgattgaattctttgtgatggtcttccaatttggggtaccccaggccctgtttggggtgcgccgtatgctgcctctcatctggtctaaggagcctggtgtccgggaagccgtgcttaatgcctaccgccaactctacctcaaccccaaaggggactctgccagagccaaggcccaggctttgattcagaatctctctctgctgctagtggatgcctcggttgggaccattcagtgtcttgaggaaattctctgtgagtttgtgcagaaggatgagttgaaaccagcagtgacccagctgctgtgggagcgggccaccgagaaggtcgcctgctgtcctctggagcgctgttcctctgtcatgcttcttggcatgatggcacgaggaaagccagaaattgtgggaagcaatttagacacactggtgagcatagggctggatgagaagtttccacaggactacaggctggcccagcaggtgtgccatgccattgccaacatctcggacaggagaaagccttctctgggcaaacgtcacccccccttccggctgcctcaggaacacaggttgtttgagcgactgcgggagacagtcacaaaaggctttgtccacccagacccactctggatcccattcaaagaggtggcagtgaccctcatttaccaactggcagagggccccgaagtgatctgtgcccagatattgcagggctgtgcaaaacaggccctggagaagctagaagagaagagaaccagtcaggaggacccgaaggagtcccccgcaatgctccccactttcctgttgatgaacctgctgtccctggctggggatgtggctctgcagcagctggtccacttggagcaggcagtgagtggagagctctgccggcgccgagttctccgggaagaacaggagcacaagaccaaagatcccaaggagaagaatacgagctctgagaccaccatggaggaggagctggggctggttggggcaacagcagatgacacagaggcagaactaatccgtggcatctgcgagatggaactgttggatggcaaacagacactggctgcctttgttccactcttgcttaaaagtctgtaacaacccaggcctcttatagcaaccccagacctcttctgcagctgcttcactttgcctttggcaagttttctgcatgattcagtgccactttctgcgactcccagctttggtctttctgttcaccatgctggaaaaagtctccactttccatttgtccggtctaaacctcatggttgccactggggattttggccatccgcttttccaatctgggtggacccctgggactcctcatctgtatgctcgcctccgggaccctgctcagcaagtgcggaaaacagcggggctggtgatgacccacctgatcctcaaggacatggtgaaggtgaaggggcaggtcagcgagatggcggtgctgctcatcgaccccgagcctcagattgctgccctggccaagaacttcttcaatgagctctcccacaagggcaacgcaatctataatctccttccagatatcatcagccgcctgtcagaccccgagctgggggtgggaggaagagccttttccacaccattcattgaaacagctcctctcctacattcaccaagggacaaggcagacagagagcctggtggaaaagctgtgtcagcggttccgcacatcccgagactgagcggcagcagcgagacctggcctactgtgtgtcacaagctgcccctcacagagcgaggcctccgtaagatgcttgacaattttgactgttttggagacaaactgtcagatgagtccatcttcagtgcttttttgtcagttgtgggcaagctgcgacgtggggccaagcctgagggcaaggctataatagatgaatttgagcagaagcttcgggcctgtcataccagaggtttggatggaatcaaggagcttgagattggccaagcaggtagccagagagcgccatcagccaagaaaccatccactggttctaggtaccagcctctggcttctacagcctcagacaatgactttgtcacaccagagccccgccgtactacccgtcggcatccaaacacccagcagcgagcttccaaaaagaaacccaaagttgtcttctcaagtgatgagtccagtgaggaagatctttcagcagagatgacagaagacgagacacccaagaaaacaactcccattctcagagcatcggctcgcaggcacagatcctaggaagtctgttcctgtcctccctgtgcagggtatcctgtagggtgacctggaattcgaattctgtttcccttgtaaaatatttgtctgtctcttttttttaaaaaaaaaaaaggccgggcactgtggctcacgcctgtaatcccagcactttgcgataccaaggcgggtggataacctgaggtagggagttcgagaccagcctgaccaacatggagaaaccccatctctactaaaaataaaaaattagccgggcgtattggcgtgcgcctgtaatcccagctactcaagaggctgaggcaggagaatcgcctgaacccagaggcggaggttgtagtgagccgaaatcacaccattgcactccagcttgggcaacaatagcgaacctccatctcaaattaaaaaaaaaatgcctacacgctctttaaaatgcaaggctttctcttaaattagcctaactgaactgcgttgagctgcttcaactttggaatatatgtttgccaatctccttgttttctaatgaataaatgtttttatatactttt

SEQ ID NO: 9538 - DNA, 487 bp, Homo sapiens; identical to SEQ ID NO: 1994
  SIMILAR (168)..(299): 551254mologous to Homo sapiens calbindin D28K,accession number S46006,Smith-Waterman Score=116.

SEQ ID NO: 9539 - DNA, 448 bp, Homo sapiens
  SIMILAR (1)..(105): 911254mologous to Homo sapiens dystrophin-related protein (490 AA),accession number X15488,Smith-Waterman Score=172.
tttgctgtcacagcgggagaggacctgctggccccaccgcacgacaccagcacggatctcacggaggtcatggagcagattcacagcacgtttccatcttgctgccgtgagtatgaaagattgcagcaccacagctgcacgtgttccttccctttctctttttctgcatgcggcccttcgccttctggcagccactcccagagcccctggaactccggcccaaggctctctgactgactccttcccagatcttctcggcttagcggctgaagactgctgctcggttgcctcggaagccctgggctgtacttccgcaaggcttcacagacagaccccactacctcagtcaagcccaaatttcatcctcatctgttacctatctcagcataattctcgtaaaaacacacgtgctctgctctcccgaattccaccgcactggagtagtgat

SEQ ID NO: 9540 - DNA, 732 bp, Homo sapiens
  SIMILAR (1)..(300): 731254mologous to Homo sapiens Human secreted protein, SEQ ID NO: 7534,accession number G03453,Smith-Waterman Score=366.
atgggcaatgacttcatgactaaaacaccaaaagcaatggcaacaaaagccaaaatagaaacacatgatctaattaaactaaagagcttctgcacagcaaaagaaactaccatcagagtgaacaggcaacctacagaatgggagaaaatttttgcaatctacccatctggcaaaggtctaatatccagaatctacaaagaacttaaacaaatttacaagaaaaaaatcaaacaaccccatcaaaaagtgggcaaagaatatgaacagacacttttcaaaagaagacatttatgcagccaacagacacatgaaaaagtgctcatcatcactggtcatcagagaaatgcaaatcaaaaccacagtaatgacatttatttgtctcccttgtcttctgactttcaactagacatgaccattagtagccatggcaaaatttggagggcttctgaggcgatcgggcagtgtcagtcttcagctgctaagccgagaagatctgggcaggagtcagtcagacagccttggaccagagtcccaggggctctggaagtggctgccagtctggtttctgtccacatcccttcatggaaacgacttttactaaggtcttcctataaactctttcaaccaattgccaataaggaaatctttgaatccacctactacctggaagttttccacttcaagttgtcctgcctttatggactgaatcagtgtccatcttacacgtattga

SEQ ID NO: 9541 - DNA, 420 bp, Homo sapiens; identical to SEQ ID NO: 448
  SIMILAR (106)..(219): 841254mologous to Homo sapiens Human secreted protein, SEQ ID NO: 5576,accession number G01495,Smith-Waterman Score=161.

SEQ ID NO: 9542 - DNA, 928 bp, Homo sapiens; identical to SEQ ID NO: 2002
  SIMILAR (704)..(925): 901254mologous to Homo sapiens RCK,accession number D17532,Smith-Waterman Score=342.

SEQ ID NO: 9543 - DNA, 1065 bp, Homo sapiens
  SIMILAR (151)..(783): 791254mologous to Cloning vector pZC320 SopA,accession number U26464,Smith-Waterman Score=871.
atgaaactcatggaaacacttaaccagtgcataaacgctggtcatgaaatgacgaaggctatcgccattgcacagtttaatgatgacagcccggaagcgaggaaaataacccggcgctggagaataggtgaagcagcggatttagttggggtttctctcaggctatcagagatgccgagaaagcagggcgactaccgcacccggatatggaaattcgaggacgggttgagcaacgtgttggttatacaattgaacaaattaatcatatgcgtgatgtgtttggatctggctctgaaggggctacgtgttttgctcgtggaaggtaacgacccccagggaacagcctcaatgtatcacggatgggtaccagatcttcatattcatgcagaagacactctcctgcctttctatcttggggaaaaggacgatgtcacttatgcaatatatttcacttgctggccggggcttgacattattccttcctgtctggctctgcaccgtattgaaactgagttaatgggcaaatttgatgaaggtaaactgcccaccgatccacacctgatgctccgactggccattgaaactgttgctcatgactatgatgtcatagttattgacagcgcgcctaacctgggtatcggcacgattaatgtcgtatgtgctgctgatgtgctgattgttcccacgcctgctgagttgtttgactacacctccgcactgcagtttttcgatatgcttcgtgatctgctcaagaacgttgatcttaaagggttcgagcctgatgaccccactggaaatcggactgttcaactcacctggcagccactcccagagcccctggaactctggctgaaggctctctgactgactccttcccagattttctcagcttagcagctgaagactgacgctgccggatcgcctcggaagcccctagatctgatgatttaataagagggtatttttccttttgctcagcacgtctcctttctgctgccatgcgtagagggatgtgtttgctttcccttctgtcattactgtaagtttcctgaggcttctccaacc

SEQ ID NO: 9544 - DNA, 1365 bp, Homo sapiens
  SIMILAR (85)..(23): 861254mologous to Escherichia coli K12 uroporphyrinogen III methylase; sirohaeme biosynthesis,accession number AE000412,Smith- Waterman Score=98.
tcatactttctccctcccggctcggtaccaacggaatacccgcgttgcacagtgtttccagctcttcgccaccacggccaaaaataacggatcgccacctttcagccgcaccacgcgtttgcctttttgcgcttcccgcagcaggatctggttaatctcttcctggggtacgcagtggtatcccgcgcgtttgccgacgaaaacacggtccgcatcgcggcgtaccagattcataatatcgtcagaaaccagacggtcgtagaccaccacatctgcctgctgaatttgttgcagtcctttcagtgtcagcagcccggcatcgcccggacctgcaccaaccagcaccacttcaccgcgatggtcgagcggttcgttgattaactgttcggtcgtttcagtaatggctttctgatcgttgtttgccagcgactgcgccaggcggtcgttaacgaacaatttctcccagaaacggcgacgctcacccatcgtggcgaactgttgtttcactcgcccgcgtaattgcccggcgtatttcgctacctggcccagatgtaacggcagcagtgattcaagtttttcgcgcaacaggcgtgccagaaccggagaggtgccgccagaggagaccgctaccatgagcggtgagcggtcaataatcgacggcataataaagctggcggctttcggcgcatcgaccacgttacagaagatgcgacgagcttcagcggcttcgctgacgcgctggttaagcgcgtcagtcatccgtcgctgcaatcgccagccagcaggtgtcgagaaggcactgccagttcgtggctcgccatattcccaccaacacccaggtgtatgacttgtcacagacgccgtgtccacagttgtggcccgcacaattgggtcagacccagatgtcaattgacggagggtcactatgtatccatcgccgtaatcaccggcccactcccacgctactgagtcactacgacgtgttatcctacggacacaccacgctactgagtcactacggctggttatccatagcgacacaccacggctactgagctcactacgctggtttcctggcagccactcccagagcccctggaactctggcccaaggttctctgacttcttcccagatcttctcggcttagcagctgaagactgagactgcccgattgcctcggaagccagctcctccttgtacctctggtagaattcagctgtgaatccatctggtcctggagtttttttggttggtaagctattaattattgcctcaatttcagagcctgttattggtctattcagggattcaagttcttcctggtttagtcttgggagggtgtaggtgcccaggaatttatccat

SEQ ID NO: 9545 - DNA, 806 bp, Homo sapiens
  SIMILAR (118)..(339): 1001254mologous to synthetic construct lac repressor,accession number A14595,Smith-Waterman Score=354.
atgcccgggcaccaaaaagcacctctgagacccgcagtttccaaaaaggtagtcaatgttggagaaaggcaaaatcaagtaattattgaaaccggaggggattttgccgatttcggaaccaccatcaaacaggattttcgcctgctggggcaaaccagcgtggaccgcttgctgcaactctctcagggccaggcggtgaagggcaatcagctgttgcccgtctcactggtgaaaagaaaaaccaccctggcgcccaatacgcaaaccgcctctccccgcgcgttggccgattcattaatgcagctggcacgacaggtttcccgactggaaagcgggcaggggcttccgaggcgatcgggcagtgtcagtcttcagccactaagccgagaagatctgagaaggagtcagtcagagagctttgggccagagttccaggggctctgggagtggctgccaggtgagttgaacagtccgattttcagtggggtcccacacagatgggacgcggcttaggaggaatcccaggctgcgggcattccttggcccagtggccagatttccggcacatgtagcaagctccggatttgaaattggtgagatgtttcttgggctggtcggtctgaggacctgaggtcgtaggcggatgtttctcacagagcaaagagcaggaggacaggggattgatctcccaagggaggtcccccgatccgagtcacagcaccaaatttcatgcgcgtccgtgtgaagagaccaccaaacaggctttgtgtgagagcagtaaagctgtttatttcacctgggtgcag

SEQ ID NO: 9546 - DNA, 894 bp, Homo sapiens; identical to SEQ ID NO: 945
  SIMILAR (744)..(887): 451254mologous to Homo sapiens hnRNPcore protein A1,accession number X79536,Smith-Waterman Score=91.

SEQ ID NO: 9547 - DNA, 478 bp, Homo sapiens
  SIMILAR (82)..(285): 981254mologous to Homo sapiens hnRNPcore protein A1,accession number X79536,Smith-Waterman Score=378.
cccacggatgagtcttcggaaccgccccggaatttccggggcgacccacgcgtacgcccacgcgtccgcccacgcgtccgcaattttggaggtggtggaagctacaatgattttgggaattacaacaatcagacttcaaattttggacccatgaagggaggaaattttggaggcagaagctctggcccctatggcggtggaggccaatactttgcaaaaccacgaaaccaaggtggctatggcggttccagcagcagcagtagctatggcagtggcagaagattttaattaggaaacaaagcttaccaggagaggagagccagagaagtgacagggaagctacaggttacaacagatttgtgaactcagccaagcacagtggtggcagggcctagctgctacaaagaagacatgttttaaacaaaaacttatgtgtgttggggcaaaaaactcaaggaacggttttgtgactaattgt

SEQ ID NO: 9548 - DNA, 1677 bp, Homo sapiens; identical to SEQ ID NO: 4253
  SIMILAR (1)..(771): 961254mologous to Homo sapiens hnRNPcore protein A1,accession number X79536,Smith-Waterman Score=1344.

SEQ ID NO: 9549 - DNA, 1855 bp, Homo sapiens
  SIMILAR (486)..(1088): 631254mologous to Homo sapiens hnRNPcore protein A1,accession number X79536,Smith-Waterman Score=535.
gagagggcgaaggtaggctggcagatacgttcgtcagcttgctcctttctgcccgtggacgccgccgaagaagcatcgttaaagtctctcttcaccctgccgtcattggtctaaagtcaaagtttcttaaaaagcccgaccagttgaggaagctttttcattggagggttgagctttgaaacaactgatgagagcctgaggagccattttgagcaatggggaacgctcacggactgtgtggtaatgagagatccaaacaccaagcgctccaggggctttgggtttgtcacatatgccactgtggaggaggtggatgcagctatgaatgcaaggccacacaaggtggatggaagagttgtggaaccaaagagagctgtctccagagaagattctcaaagaccaggtgcccacttaactgtgaaaaagatatttgttggtggcattaaagaagacactgaagaacatcacctaagagattattttgaagagattattttgaacagtatggaaaaattgaagtgattgaaatcatgactgaccgaggcagtggcaagaaaaggggctttgcctttgtaacctttgacgaccatgactccgtggataagattgtcattcagaaataccatactgtgaatggccacaactgtgaagttagaaaagccctgtcaaagcaagagatggctagtgcttcatccagccaaagaggtcgaagtggttctggaaactttggtggtggtcgtggaggtgggtttcggtgggaatggacaacttcggtccgtggaggaaacttcagttggtccgtggtggcctttggtggcaccccgtggtggtggtggatatggtgggcagtgggggatggcttataatgggatttggtaatgatggaagcaattttggaggtggtggaaagctacaatgattttgggaattaacaacaaatcagtcttcaaattttggaccccatgaaagggaggaaattttggaaggcagaagctctggccccctatggtggtgccaggccaatacttttgctaaaccccgaaaaccaagggtggctatggcgggttcccagtagcagcagtagctatcggcagtggcagaagattttaatttaggaaaccaaagcttagcaggaagaggagagccagagaagtgccaggggaagctacaggtttacaacagatttgtgaactcagcctaagcacagtggtggcaaggccctagctggcttacaaagaagacatgtttttaggacaaattactcatgttgtatggggcaaaaaactcggagggactgttatttgtggactaattggttattaacaggttattttagtttcccgttctgtggggaaagttgttaaagcctttccaacaaaagggttttaatggtagattttttttttttgcaccccatgctgtttgattgctaaatgtaacagtctgatcgtgacgcttgaataaatgtcttttttttttaatgtgctgtgtaaagttagtccactccttaagccatcttggtaaattttccccaagagtgtgaagttagaattccttcagggtgatgccaggttctttttggagtttatatacaacctgcttgggtggagaagccattgtcttcagaaaccttggtgtaggtgaactgatggttactgttgcgatctgaagttcaccattaaaagggattacccaagcaaaatcatggaattattggttataaaagtgattgttggcacatcctatgcaatatatctaaattgaataatggtaccagataaaattatagatggaaatgaagtttgtgtatcattcattatcatgtgtaatcaataaacgatttaattctcttgaa

SEQ ID NO: 9550 - DNA, 852 bp, Homo sapiens
  SIMILAR (366)..(791): 491254mologous to Mus musculus lymphocyte specific formin related protein,accession number AF006466,Smith-Waterman Score=333.
tacaacagggcaatgtttcatccccacgctgtcaataagattgcattaagcttgaacaacaagaatccccagatcaaaagtcttgtttttagaactgttggcagccgtttgtcttgtaagaggcgggcataaattattttatctagcatttgataactttaaagaggtttgtggagaaaaacagcgctttgagaagttgatggaacatttcaggaatgaagacaataacatagattttatggtggcttctatgcagtttattaatattgtagtccattcagtagaagatatgaatttcagagttcacctgcagtatgaatttaccaaattaggcctggacgaatacttggacaagctgaaacacactgagagtgacaagctttcaagtccagatccaggcttacctggacaatgtttttgatgtaggagctctactggaagatgctgaaactaagaatgctgccttggagagggtggaagaactggaagaaaacatttctcatttatctgaaaaactgcaagacacagagaatgaagccatgtccaagattgtggaactggaaaagcaactcatgcagaggaacaaggagctggatgtcgttcgggaaatctacaaagatgcaaatactcaagttcacacattaagaaaaatggtcaaagaaaaagaagaagcaattcaaagacagtctaccctggaaaaaaagattcatgagctagagaaacaagggaccattaaaattcacaagaaaggggatggggatatcgccatactgccagttgtggcttctgcacattgtccatggggtcagaagtggtagcaggtaactctgtgggacccacaatgggggccgg

SEQ ID NO: 9551 - DNA, 1432 bp, Homo sapiens
  SIMILAR (1136)..(1303): 481254mologous to Mus musculus formin-like protein,accession number AF215666,Smith-Waterman Score=127.
atggctttactgaccctaaaacagcaacagaatgaggatttacaagatattagccactttaccacaacaagaacacctagacaagggaccccagtccagaaggaaaagagtgaagagacaaggttagaatgggctagaaggatgctcagaagagaccagcacagtacaaaggggaaggtggtcaagaggatgagaggattcctggtgggtctggtatattgtgataaacaaagtggggctctggaatccttgctgtgcctgtggaatgtgtcaggaaacacaaccctgagttcattagttgagattggcagcaaagcagccttgggtctggtttgtggagaaaaacagcgctttgagaagttgatggaacatttcaggaatgaagacaataacatagattttatggtggcttctatgcagtttattaatattgtagtccattcagtagaagatatgaatttcagagttcacctgcagtatgaatttaccaaattaggcctggacgaatacttggacctcttagatacaaagtcaacagacagaaagcaaacactgttgcactatatatccaatgtggtgaaagaacaatatcaccaagtgtccctgttttataatgagcttcattatgtggaaaaagctgctgcagtctcccttgagaatgttttgctggatgtcaaggagctccagaggggaatggactttaccaagagagagtacaccatgcatgaccataacacgctgctgaaggagttcatcctcaacaatgaggggaagctgaagaagctgcaggatgatgccaagatcgcacaggatgcctttgatgatgttgtgaagtattttggagaaaaccccaagacaacaccaccctctgtcttctttcctgtctttgtccggtttgtgaaagcatataagcaagcagaagaggaaaaatggagctgaggaaaaagcaggaacaagctctcatggaaaaactcctagagcaagaagctctgatggagcagcaggatccaaagtctccttctcataaatcaaagaggcagcagcaagagttaattgcagaattaaggaagacggcaagttaaaggataacagacatgtatatgagggaaaagatggtgccattgaagatattatcacagtctcccttgagaatgttttgctggatgtcaaggagctccagaggggaatggacttgaccaagagagagtacaccatgcatgaccataacacgctgctgaaggagttcatcctcaacaatgaggggaagctgaagaagctgcaggatgatgccaagatcgcacaggcaagtattggtgcccctgaaacctgtgaagaggctgcatccattaaagctgcctgtggtgcaggccctgtatttggggagaaatgttccatttccctctgtttgtggagggtagctttcttgttgtaa

SEQ ID NO: 9552 - DNA, 286 bp, Homo sapiens
  SIMILAR (113)..(229): 941254mologous to Homo sapiens c399E4.1 (similar to D.melanogaster unkempt protein.),accession number AL031721,Smith- Waterman Score=221.
  misc_feature (1)...(286): n = a,t,c or g
caggcatgaattgagaagatcctgagcgaggacccccggtggcaagatgcaacttcgtgctgggcagctacaagacggagcagtgcccgangccgcnacgcctgtgcngccaggctatgcgtgcccacactaccanaatagccgggacaggcggcgcaanccccggcggttccagtacaggtccacgccctgccccagcgtgaagcacggggatgagtggggggaacctcacgctgcgatggcggcgacggctgccagtattgccantcccgcacgagcagtagtt

SEQ ID NO: 9553 - DNA, 429 bp, Homo sapiens
  SIMILAR (71)..(97): 661254mologous to Drosophila melanogaster CYS3HIS finger protein,accession number Z11527,Smith-Waterman Score=37.
ccgggtcgacgatttcgtaatgccgtcggtttcgaaagcggcggcagcggcgctgagcgggtcccccccgcagacggagaagccgacccactacagcacaagtgcgcgcagcaccggccgttcacctgcttccactggcacttcctcaaccagcggcgccgcaggcccctccgcaggcgcgacggcaccttcaactacagccccgacgtgtactgctccaagtacaacgaagccaccggcgtgtgccccgacggcgacgagtgtccctacctgcaccggacgacgggggacacagaacgcaagtaccacctgcgttactacaaaacaggaacctgcatccacgagacagacgcacgtggccactgcgtgaagaatgggctgcactgtgccttcgcgcacggccccctggacctgcggccgctctagagg

SEQ ID NO: 9554 - DNA, 2017 bp, Homo sapiens
  SIMILAR (575)..(943): 561254mologous to Drosophila melanogaster CYS3HIS finger protein,accession number Z11527,Smith-Waterman Score=417.
atgccgtcggtttcgaaagcggcggcagcggcgctgagcgggtcccccccgcagacggagaagccgacccactacaggtacctgaaggagttcaggacggagcagtgccccctgttttcacagcacaagtgcgcgcagcaccggccgttcacctgcttccactggcacttcctcagaccaggcggcgccgcagggcccctcggcaggcgcgacggcaccttcaactacagccccgacgtgtactgctccaagtacaacgaagccaccggcgtgtgccccgacggcgacgagtgtccctacctgcaccggacgacgggggacacagaacgcaagtaccacgtgctgttactacaaaacaggaacctgcatccacgagacagacgcacgtggccactgcgtgaagaatagactgcactgtgccttcgcgcacggccccctggacctgcggccgcccgtgtgtgacgtcagggagctgcaggcccaggaagccttgcagaacggccagctgggcggcggggaaggggtcccggatctgcagcctggggtcttggccagccaggccatgattgagaagatcctgagcgaggacccccggtggcaagcattgcttccagtcgcgctgctcaggcaccgtgtggcccatttttcagatgccaacttcgtgctgggcagctacaagacggagcagtgcccgaagccgccacgcctgtgccgccagggctatgcgtgcccacactaccacaatagccgggacaggcggcgcaacccccggcggttccagtacaggtccacgccctgccccagtgtgaagcacggggatgagtggggggaaccctcacgctgcgatggcggcgacggctgccagtattgccactcccgcacggagcagcagttccatcccgaggggcctgtccgggagtccggtgtccggggcgttttctgtgttcagtcacgcaggccttggttgcagaccccagtctctggtacccagctgaagtggagctggcaccacgtgggccacagccgcaccataaatcctgagggagataaaccctcccgcctgggccccgccccagaaaatatcaagcggggaaatgactttgcctgtgatgggagggcagatgctgcgggaatggccccacatgtgtgcgtgttccctatctacaaatctacaaaatgcaacgacatgcgccaaaccgggtactgcccgcgcggccccttctgtgcctttgcacacgttgagaagagcctggggatggtgaatgaatggggctgtcacgacctccacctcacgagtccttcctccacgggcagcggccagccgggaaatgccaagcggagagactcgccggccgagggtggccctaggggcagcgagcaagacagcaagcagggggtgcgcgctcacggtgtttatgtctttgaacagaaccacctggccgtgtttgcagcggtccacccgccggcccccagcgtgagctccagcgtggcgtccagcctggcgtccagcgccggctccggcagctcctcccccactgcgctgcccgcgccccccgcccgtgccctcccgctcggccccgccagcagcactgtggaggccgtcctcgccctggagcccaccccttcctctcctacatcctctgctgtgcagggtgtggcgggggagctgggcatgggatcaggaggacagggctgctggagccacgtggtgggggccctcgctgcagtccctgcctggacacactctggggacttggagtgggaccccagcaccatcaggacccgcgtcaatgtgggcggcggcccggcggccagacccgcaatgactcttgcccgagagccgcagcttctggtcgttggtggttgccccacacggaactgctcaggcccagctgcaagcccccagcaactcctagacgatgccggccaaggaggccgaggagagagagactcttcccagcggccacttaggccacagaccacacatcggcaggacactagaccagtcccatcctga

SEQ ID NO: 9555 - DNA, 612 bp, Homo sapiens
  SIMILAR (540)..(430): 1001254mologous to Homo sapiens Human secreted protein, SEQ ID NO: 6411,accession number G02330,Smith-Waterman Score=199.
aatacattctctctgtgtgtctccttgcctctctccctgtcactgtctctctctctcccctgcctccctcttggtctcttttttttgctgtctctttctgatgaccttgttcccatctctgtgcgtgtgtggctctctccctgtccatctcttaccatctctgccttcctctcccaggtcttaaacgaatatttccacaatgtctgtgaactggacctggtgttcaacttctacaaggtggaatgtttcccacttaagagcccagtggtcccggaaagtaaagagatcggaagtcaggtggacggacagagtcggatggagcaaagaagcccggcacacaccaacagagagaacgacatagcgcgggaaggagggtccgaggagacacattccaaacccggaaagggaaatttggaatttaggtttaggtgctcgcacttgcaactgggtgagtgcccgatcccgccgtggcagaaggaaaggaccatcgctcaggggccggagccggaggcacgagcagcagtacctgcaggccgccatgacacccggcacgcggtcaacgcaggctgtgccctgattggctcactccgcagaccgtggggcggagcctga

SEQ ID NO: 9556 - DNA, 464 bp, Homo sapiens
  SIMILAR (443)..(288): 941254mologous to Homo sapiens Human secreted protein, SEQ ID NO: 6411,accession number G02330,Smith-Waterman Score=261.
aaaaagtagccagctggaaagagcggtctaattgaacgatctattattcgacttgttagaatttctttatcagaagtaccaacctctcttctcagatagtttgtgggaattctacctgctgcagcagctttttgtctgtagtcaaccaccaaaggcataatctgggaaggggaaggttttgttttactgaccgctgtgaccattactgcagtgtcacctgcctgtactacagcagagccatctgcaaatctggccagctttccagaagatatttctaatttcctgttgcctaagtccgcggccacagctcgagaccctgcgctactccatagtgctcgcacttgcaactgggtgagtgcccgatcccgccgtggcagaaggaaaggaccctcgctcaggggccggagccggaggcacgagcagcagtacctgcagcccgccatgacacccggcacgcgacgaaa

SEQ ID NO: 9557 - DNA, 791 bp, Homo sapiens
  SIMILAR (468)..(364): 911254mologous to Homo sapiens Human secreted protein, SEQ ID NO: 5813,accession number G01732,Smith-Waterman Score=184.
  misc_feature (1)...(791): n = a,t,c or g
tttttttttttttttttttgccaggcaggaccacaggtttattggggactccacgcacagacgcttatggcatcaacacgaacaacggcaacagtttactcgggacacacacggtggcctctgccccaacagcccagggcccaagaggcaagtggggtgcagtctcctcccttgtggcccagacccagctgggtcccttcctcctaggcagctgagggaaaggactgctgggcttgccacgggcctgggaaggggaagcgagcaggcgagtcccaggaggggccggggccggggtggggtgctcgcctgccctcactccaggggantgtagcatcagcagctgtttcagcaccttaggaggccctggtctctcggatttcgccagccaggaacatctcgtccacgaccgtgtaaaccttgttagaagttgaacaccaggtccagttcacagacattgtggaaatatttcgtttaagacctccacgaagttgtgaatggcctccaggtaagccaggtttgttgtcattgacatccccacagatgcagaagtagaggccagcatagcggcggtaaatgatcttaaagttccggaactccacaaagttggtgtgtttggcgtctcggacggtgaccacggcatgcacctcctcgatcagcttctgtttctcatcatcatcaaactgcatgtaccacttggccaggcgcgtcttgcctgcccggttctggatgaggataaagcgaatcatggcgacccccgtccagaccccagcggccccggtcccgcggcgact

SEQ ID NO: 9558 - DNA, 788 bp, Homo sapiens
  SIMILAR (6)..(239): 571254mologous to Streptomyces coelicolor A3(2) putative translation initiation factor IF-2(fragment),accession number AL355913,Smith-Waterman Score=195.
atggcggcggccaggggaggcccggtgccggcggccagggaaggtcggatggcggcggccagggcagccccggcggcggcagccaggggagccccggtggcagcggcggcgttggccagggcagccgcggcgggcagggaaagcccggcggcggcggcggccagggaagcccggatggcggaggtcgcccgcttgctgggggagccagtggacgaagagggtcccgagggcaggcccaggtccagacacgggaacggaggcctggctgcgttgccctatctccgtctccgccacccacttagcgttttaggcatcaattaccagcagtttctccgccactatctggaaaattacccgattgctcccggcagaatacaagagcttgaagaacgccgcaggcgattcgtggaagcctgcagagcaagggaagcagcgtttgatgccgaatatcagcgaaatcctcacagggtggacctcgatattttaacctttacgatagctctgactgcctctgaagttatcaaccctctgatagaagaacttggttgcgataagtttatcaatagagaatagttatgtggtgacactacttcaagagaacctctgcattccaggcataccaatcctgcaacttgattttcagaagtcaagagtatatcgcgataagacagtgcacaggtggaggggaaaaaaagggggagggggaagcttatcttgaaaaagcatcacagaagtagaaaaaaatgtcggaagcattataactgtaacgttctttgagtttgtgattg

SEQ ID NO: 9559 - DNA, 363 bp, Homo sapiens
  SIMILAR (97)..(117): 851254mologous to Homo sapiens PRO1430,accession number AF116660,Smith-Waterman Score=42.
ttcagatgaagcacccaggtgtcctgccttattagaatgcacacagtctcccaattgagtgggctttttgtaaaattgaaaacctctgtgggaagtgtgtgtatatgtgtatgtgttcccaaaataaaaataatcagctgaaattctccttcattccagggcgatggtgtgctagtctgaaaatgtacagcaagggccagaggagtcttatgtacccttgcaggtaccatcagcggatgctgctagtgtccaggtatcttgacactgtgctgctggactgggatcccccaggaccactgcctgaaggaaggcaacacagtcccggacgcaggcagagagacctggcatcagcattactgtgtc

SEQ ID NO: 9560 - DNA, 762 bp, Homo sapiens
  SIMILAR (720)..(607): 341254mologous to Arabidopsis thaliana At2g21790,accession number AF325052,Smith-Waterman Score=78.
atgctgatgccaggtctctctgcctgcgtccgggactgtgttgccttccttcaggcagtggtcctgggggatcccagtccagcagcacagtgtcaagatacctggacactagcagcatccgctgatggtacctgcaaggccgtgggcacggaggatggctcggtctacttcatcagcgtatatgataaggaatcccctcaggtcgtgcacaaggcctttctctcggaatcgtccgtgcagcacgtcgtttatgatcagcaaggaatatttctgttagttggaacagcagaaggaaaagtctttattatcaatgccaactcctcaagctcatttcagattattggattcacagaggtggccaaagacattttacagatatccacagcgtctcttttagaaacagacatagtggaagtgatggtgctttcctcgcttccagaagcagggagaagcaggttggagatgttcacactgcctacattactgccacaagtttccacaacctttgctgatgaaagaggaaggctgaaagatgaaatcattcataagtacctgtatgagttggagcacgctctgtcctctgcagtcttgggctttcaaagtaaccaaatatatggcttctgtagtcaagtgccatacatctgtagctaccttcttcctgaagaagaacataccggtatctacattcttaaaccatacaaaaaagtacaaagcagacagtatggacctggactgctctatctgtcttcacatggattgtgg

SEQ ID NO: 9561 - DNA, 825 bp, Homo sapiens
  SIMILAR (192)..(260): 731254mologous to Rattus norvegicus t complex polypeptide 1,accession number D90345,Smith-Waterman Score=77.
atgaagcttggtgtacagtggtcattacagatcatgaaaaactggaccaaattagacaaagagaatcagattatcaccaaggagagaattcagaagatcctggcaactggtgccaacgttattctaaccactggtggaattgatgatatgtgtctgaagtattttgtggaggcaggtgctatggcagttagaagagttttaaaggcattgctaaagcttctggagcaactattctgtcaaccctggccaattcggaaggctcatacatctgcatcgattatcttacgtggggcaaatgatatcatgtgtggtgagatggagcgctctttacatgatgcactttgtgtagtgaagagagttttggagtcaaaatccatggttccaggcgggggtgctgtagaagcagccctttccatataccttgaaaactatgcaaccagcatggggtctcagaaagagcttgctattgcagagtttgcaagatcacttcttgttattcctaatacactggcagttaatgctgcccaggactccacagatctggtcacaaaattcagagcttttcataatgaggctcaggttaacccagaacataaaaatctgaaatggattggtcttgatttgagcaatggtgaacgtggagacaacaaacaagcagggatgtttgaaccaaccatagttaaagttaagagtttgaaatttgcaacagaagctgcaattaccattcttcgaattgatgatcttactaaattacatccagaaagtaaagatgataaacatggaggttatgaagatgctgttcactctggagcccttaatgattga

SEQ ID NO: 9562 - DNA, 2040 bp, Homo sapiens
  SIMILAR (1169)..(402): 511254mologous to Cricetulus griseus T-complex protein 1,accession number M34665,Smith-Waterman Score=445.
gaattcttgtgaccctgttacacacactggagagaatgggcagaagtcgtggtgttgcagccctgtgccattgggggtgggatgggaatagcaatgtgtgttcgagagagaatgaattgcttaaactttgaacaacctcaatttctttttaaacttaataaagtactaggttgcaatatgtgaaatcagaggaccaaagtacagatggaaaccatttcctacatcacaaaaacccaagtttaacagcttgtactttactttaatgtgtaatactcaactcacggtacaagacaattgcatttaacatttgttataaataaaaggaacatcagatcaatcattaagggctccagagtgaacagcatcttcataacttcccatgtttatcatctttactttctcggatgtaatttaataagatcatcaattcgaagaatgggtgattgcagcttctgttgcaaatttcaaactcttaactttaactatgggttgggttcaaacaccccttggttgtttgtggcctcgagggtttaccatttgctcaaatcaagaccaatccatttttaggatttttacggttctggggttaacccgggggcctcattatggaaaaggctctttaatttttgccaaccagatctgctggagcccctgggcagcattaactgcctagtgtattggggaataacaagaagtgatcttgcaaactctgcaaatcgcaagctgttcccgagaccccatgctggttggcatagttttcaagggtatatggaaagggctgcttctacagcacccccaacggggaaccacagatttttgactccagaactgctcttcactacagcaaagtgcatcatggtaaagagcgctccatctcatcacacatggaatcaattggcacacgtgagatgatcgatgcagacgtacgaagccttagtacttttgattaagatcagctcatcatcacaaattctctcctgtaccacttcttctggcctgtcccaacattgcagcttcaaaagtttcttcaccttccaaattgggccaggggttgacagaatagttgctccagaagctttggcaatgcgtttaaggtccctttttaaaactcttctaactgccatagcaccagcctccacaaaatacttcagacacatatcatcaattcccaccagtggttagaataacattggcaccagttgccaggatcttctgaattctctccttggtgatatctgattctctctgtctaatttggtccagtttttcagggtctgtaatgaccacctgtacaccaagcttcatttttgttttttgcaggctgaagtcaaggcaagcaatttttgcatttacgattctcttgggcatgccctgggatcccaccacacagttgagtgcatagccactgatgagcatactctccatttgacttctcccatgggctttcaaaatattaacagagttgactggatagcgtggctggcctcttatgtctgtgtatttaatagcaagtacagcatctactaccatgttagcaaagaaatcaccatttatcccaatgattttggaagacatggatgtcttagcagcattaatcaggcaatctcttcccagttcatctgtgttaacaattaggttttcattgatataacgcactgcttccttgcaagcaagtcgatagccactaataactgatgtgggatgaattttctgtttgactaattcatctgcattttttaggagttctgctgcaataataaccactgaagtagttccatctccaacttctttgtcttgcagatcagccagctcacaaagaactttagctgcaggatgttctacctccagtaacttcaggatggttgcaccatcgttagtaatggttacatcaccaatatcatccaccaacattttatccaagccaactggaccaagagaactttttacaatattggcaatcgaagctgcagccataacgttttgggagcggatcgtttccccagtgctgcggtcaccgaacacggacaaaggcccctccat

SEQ ID NO: 9563 - DNA, 402 bp, Homo sapiens
  SIMILAR (67)..(117): 471254mologous to Homo sapiens alpha-1 type I collagen,accession number J00113,Smith-Waterman Score=41.
cccggcctagctcggtggtgaacagctggcacgtctctgggttgtggacggtaaaggccacgtagacctcaggagcctgctggtgctcccggcaggcagccagcctccgcaggatcctgaccagcgacacgatggcttctgggcaatacagcacgtctttttgatgagttctgagagaaagcaccgggctttcttgactgacggcgggtgcttcacacacacacaggatgcttcacagtcttctgcaaaatatcccgcagcagctcagaatctgatgagtctcttaactttgcttctaagctgtggcaggagcgccgggggtttcagcacggagacccatcccgtctgcccctggactcccgcgagccccgcgggcctctccgctcgcccgccgccacgaaa

SEQ ID NO: 9564 - DNA, 654 bp, Homo sapiens
  SIMILAR (543)..(653): 891254mologous to Homo sapiens Human secreted protein sequence encoded by gene 10 SEQ ID NO:63,accession number B25674,Smith-Waterman Score=171.
ctccagtgtggtggaattcgccgggcttccgcccggtctgccggcaacgctgcggccccgcccacgtcatggcgcccgaggagaacgcggggaccgaactcttgctgcagagtttcgagcgccgcttcctggcggcacgcacactgcgctccttcccctggcagagcttataagcaaagttaagagactcatcagattctgagctgctgcgggatattttgcacaagactgtgaagcatcctgtgtgtgtgaagcacccgccgtccgtcaaatatgcccggtgctttctctcagaactcatcaaaaagcacgaggctgtccacacagagcctttggacgagctgtatgaagcgctggcggataccctgatggccaaggagtccacccagggccaccggagctatttgctgccctcgggaggctcggtcacactctccgagagcacggccatcatctcctacggtaccacaggcctggtcacatgggacgccgccctctaccttgcagaatgggccatcgagaacccggcagtcttcactaacaggactgtcctagagcttggcagtggtgctggcctcacaggcctggccatctgcaagatgtgccgcccccgggcatacatcttcagcgactgtcacagccgggtccttgagc

SEQ ID NO: 9565 - DNA, 1506 bp, Homo sapiens
  SIMILAR (220)..(663): 311254mologous to Homo sapiens dJ8B1.2 (KIAA0879 protein),accession number AL035701,Smith-Waterman Score=187.
atgcacaaattcaccaccaacaacacagaaattaccgtctccctctattctaaggaattatttttcattttgccatctctgaagttggaatacaccttacaatcactgggcaacaaagcagcatcatcccactattccaggggaggtgctaaatacgagggtgaggctgtcaagcagtccctggtggagtcctacactcacccaaacagcaacgagacagagcggagtgcgaacatcgatactgtcatgaactggttcaccaaggaagactttgactttgtgactctgtgttacagagagccagataacgtgggacatcgattcaggccagaggcagagaataggaagttgatgattcagcaaatcgacaggaccatcagaccatgggatgaccaccgtgaagaagagacccaatgtcaacaagatcccttgtccaactacatcaagtttatggacttggtcaagtttgatattgtgggctacggtggctttgggatgcccctgcccaaattggggcaagaggaagccctttaccaggcactgaagaatgcgtaccctcacctccacatctacaagaaggaggggtttccagaacacttccatctcgctaaacatgaccgggttctgccaatcgtgatgtatgccaactttggttacagtatcaatgggatatcgctattgtacttttatactcatttgtgtgataagtacttcaatgtccacttcttccacgagcccctgagcctctggagggcccagaccacacctagtctttctcaccgttacatctcccttgtcaggcacatggacgccaccaacctggacgcttctgaagcccagcttccaggatcgccctatcctgactccgccccaggacccgccaacctggactctacccaggacctgccccaacgacgcttatcctggccctaccccaggcctcgccctcctaacgctcatcctggccccgccctacagcccgcccccaggaccctcctcctgaccctacccccaggccccgccccctctctgccgccgcgcactgccctgggcccaccccctcttcagtccaggcccggcttccgcccggtctcccggcaacgctgcggccccgcccatttcatggcgcccgaggagaacgcggggaccgaactcttgctgcagagtttcgagcgccgcttcctggcggcgcgcacgctgcgctccttcccctggcaggggggcggcgggcgagcggagaggcccgcggggctcgcgggagtccaggggcagacgggatgggtctccgtgctgaaacccccggcgctcctgccacgtgagttcctgggctctccccggtcagggccgcgagacccggtccccgtccctggggcctggccaaagtcgctcgcacccctcctgccccgcgagctggcggcggaagatgagggcgtctccaccgccttgggggggcagacgcgtgctcggtgtggggtacagttcacgatcattttcacgactttttaa

SEQ ID NO: 9566 - DNA, 1182 bp, Homo sapiens
  SIMILAR (592)..(738): 661254mologous to Homo sapiens Human secreted protein sequence encoded by gene 10 SEQ ID NO:63,accession number B25674,Smith-Waterman Score=166.
atggcgcctgaggagaacgcgggtaccaaactcttgctgcagagtttcgagcgccgcttcctagcggcgcgcacactgcgctccttcccctggcaggtgggcggcggggcgagcggagaggcctgcggggcttgcggaagtccaggggcagacgggatgggtctccctgctgaaacccccggcgctcctgccacggagggatcacatagcgctttgccaacacattctattgcgtgttttaatgttcctgtgaatgcgcccttgagatttctctctctcccgtccacacggagcttagaagcaaaattaagagactcatcagattctgagctgctgcgggatattttgcagaagcacgaggctgtccacacagagcctttggacgagctgtacgaggtgctgacggagaccctgatggccaaggagtccacccagggccaccggagctatttgctgcccagatacccttcctgcacagacaaagtgaaaacccctcggaaggctcggtcacactctccgagcacagccatcatctcccacggtaccacaggcctggtcacatgggacgctgcccgctaccttgcagaatgggccatcaagaacctggcagccttcactaacaggactgtcctagagcttggcagtggcgccggccttacaggcctgtccatctgcaagatgtgccacccccggacatacatcttcagcgactgtcacagccgggtcctcgagcagctccgagggaatgtccttctcaatggcctctcattagaggcagacatcactgccaacttagatagccccagggtgacagtggcccagctggactgggacgtagcgacggtccatcagctctctgccttccagccagatgttgtcattacagcagacgtgctgtattgcccagaagccatcgtgtccctggtcggggtcctgcggaggctggctgcctgctgggagcaccagtgggctcctgaggtctacatggcctttaccgtccgcaacccagagacttgccagctgttcaccaccgagctatgctggactgggatcagatgggaagcggaagctcatcatgaccagaaactgtttccctacagagagcacttggagatggcaaagctgaacctcacactgtaggactcacacatgactccaacgggattgtgagaattaagtcac

SEQ ID NO: 9567 - DNA, 361 bp, Homo sapiens
  SIMILAR (312)..(70): 981254mologous to Homo sapiens PRO1477,accession number AF130059,Smith-Waterman Score=415.
cggcacgaggacaagaaagctcagctggtggtgattgcacacgacgtggatcccacctgtccttcgagcaggaagacctgcaccactgtcgccttcacacaggtgaactcggaagacaaaggcgctttggctaagctggtggaagctatcaggaccaattacaatgacagatacgatgagatccgccgtcactggggtggcaatgtcctgggtcctaagtctgtggctcgtatcgccaagctcgaaaaggcaaaggctaaagaacctgccactaaactgggttaaatgtacactgttgagttttctgtacataaaaataattgaaataatacaaattttccttcaaaaaaaaaaaaaaaaa

SEQ ID NO: 9568 - DNA, 711 bp, Homo sapiens
  SIMILAR (223)..(708): 731254mologous to Homo sapiens L7a protein,accession number X52138,Smith-Waterman Score=591.
atgccgaaaggaaaggaggccaaggggaagaagttggctctggcccctgcttttgtgaagaagcaggaggccaagaaagtggtgaatcccctgtttgagaaaaggcctaagaattttggcattggacaggacatccagcccaaaagagacctcacctgctttgtgaaatggccccgctatatcaggttgcaatggcagagatccatactctataagcagctgaaaaccagagacaaagcaagagaagaagtggaggctgttggcccaggcagagttgtgggcaaaggggacctccccatgaagagactacctgtctttcgagcaggagttaacaccgtcaccacctttgtggataacaagaaagctccgctggtggtgactacacacgacatggatcccattgagctgactgttttcctgcctgtcctgtgtcataaaatgggggccacttgctgcattatcaaggggaaggcaagactgggatgtctagttcacaggaagacctacaccactgtcgacttcacacaggttaactcagaagacaaaggagctttggctaagctggtggaagctatcgggaccaattacaatgccagatacgatgagacccactgtcactgggacggcaatgtcctgggtcccaagtctgtggctcacattgccaagctcgaaaaggcaaaggctaaagaacttgccactaaactgggttaa

SEQ ID NO: 9569 - DNA, 1097 bp, Homo sapiens
  SIMILAR (16)..(834): 541254mologous to Homo sapiens L7a protein,accession number X52138,Smith-Waterman Score=588.
  misc_feature (1)...(1097): n = a,t,c or g
ggcacgaggcccaagatgccgaaaggaaagaaggccaagggaaagaaggtggctccggccccagctgtcgtgaagaagcaggaggctaagaaagtggtgaatcccctgtttgagaaaagggcctaagaattttggcattggacaggacatccagcccaaaagagacctcacccgctttgtgaaatggccccgctatatcaggttgcatgcggcagagagccatcctctataagcggctgaaagagcctcctgcgattaaccatgttcacccaggccctgggaccgccaaacagctactcagctgcttaagctggcccacaaagtacagacccagagacaaagcaagagaaggaagcagagactgtttggcccgggccgagaagaaggctgcttggcaaaggggacgtcccaacgaagagaccacctgttcctttcgtgcaggagttaaacaaccgtcaccacccttggtggaggaacaaggaaagctttagcttggtggtgatttcacacggacgtggatcccatcgagctggttgtcttcttgccttgccctgtgtcgtaaaatgggggtcccttactgcattatcaagggaaaggcaagactgggacgtctcagtcaacaagaagacctgcaccactgtcgccttcacacaggtgaactcggaagacaaaggcgctttggctaagctggtggaagctatcaggaccaattacaatgacagatacgatgagatccgccgtcactggggtggcaatgtcctgggtcctaagtctgtggctcgtatcgccaagctcgaaaaggcaaaggctaaagaacttgccactaaactgggttaaatgtacactgttgagttttctgtacataaaaataattgaaataatacaaattttccttcnnnnnnnnnnnnnggggggcccctttaaaaagaaaaaattttaatacccgggggtgggaaaggaaaacttttttttagggggccccaaaataaatttccggggccgggttttaaaaacgggggagggggaaaaacccgggggtacccaaattaaaaccccttggaaaaaaaanngnnnnggcccaccgaggatggagaacc

SEQ ID NO: 9570 - DNA, 426 bp, Homo sapiens
  SIMILAR (3)..(86): 1001254mologous to Mus musculus astrotactin2,accession number AF116573,Smith-Waterman Score=148.
ctgcaggcatggtgtggtatagcatcctcaaggacaccaaaatcacgtgtgaggagaagatggtgtcaatggcccgaaacacatattatttgactctatcaaaagtctctcctttttaaaccttttcttatggatggctgtcaatcccgaggcagaagttttcaggtggagaccaagcggcctttgctcttcttccttcttcctgccacactctgctttcttcctgccatggacccctggaggagacctatggagggacagttttgacctgacccctagaggagacagttttgacctcttcagcaccaggaaggaagctctgaggatggttgcagtgaggaagcatgggtctttaaggacttctctctcttttttgctggacattattgagtttgtgggaccctgcctcttcctgctacctgtggg

SEQ ID NO: 9571 - DNA, 711 bp, Homo sapiens
  SIMILAR (295)..(558): 1001254mologous to Homo sapiens bA67K19.1 (KIAA0634),accession number AL133284,Smith-Waterman Score=457.
atgaaaaacttctgctctatgaaagacaatgtcaagataatgagaatacaagccaaagactgggagaaagtatttgcaaaagacacatccaataaaggactgttatccaaaatatataaagagctcttaaaactcaacaataagaaaatagcccaaataaaaaaatgggctgaagactttaatatacatgtcaccaaggaagatagacatatggcaaataagcatatgaaaagatgctgcaaatcaagtgctgacaatgattcagagccacaggaattcttgttcattgctgagaccacagagctgggcagcaagaaggagctcaagtccatgcccttcatcacctacctctcaggtttgctgacagcccagatgctgtcagatgaccagctcatttcaggtgtggagattcgctgtgaggagaaggggcgctgtccatctacctgtcacctttgccgccggccaggcaaggagcagctgagccccacaccagtgctgctggaaatcaaccgtgtggtgccactttataccctcatccaagacaatggcacaaaggagttattaccagtacctaccatcactacaaccatgaccactaccgccaccactatgctacaccactactatcactaccagcatcaccctcgctatagccccatcactgtgattatcttgcattggttgcctactgtgtgccagatactgtgttag

SEQ ID NO: 9572 - DNA, 942 bp, Homo sapiens
  SIMILAR (796)..(939): 1001254mologous to Mus musculus astrotactin2,accession number AF116573,Smith-Waterman Score=250.
ccagcaggtttgattgttgctttgaactcaggcgaccctgtgcagcctttgtctaatatctcagagccccagccaccaaccggctccctttgccccatgaagataagcctttctggtcgactggacacatcagccttagaaaccttgagttaccagaatgggagcaactggctggctggtgaacttgctgtttgcggggagggtgggaagcgggcttttgaatcaaggacgcatagtggaagagtgatagagctggtacttaatcaactgctggtccagggctccttatgctgcattcaccttgactttgaagacaaaactgttccccctcttgcagaaaaatctctactctcagatacccaagaggatcggggcagatgggtgcttgaatctagtaccagagagcagcaggtaggctataacggaggcattgttcagatgcttggccttccccttgcaagtcaactctttcctgcagcaatgaagctcattcatcccaccaactccctggaagcttccccatactcctcatggagcccaacttggatgatgaggtcctcgcctgcctccatagccccaaatctcctactttccctggccttccacattccagttacactctctgctgcagcgttgtctctcgtcccccagcctgctcacagaaagaaaaacaggaaaagaatgttagagacttggacgaacttgggcgaggcagaagcagcagcctgggttctaggagggttctaccataagcccctaacaaggtaccagggaggacggagcagaggcctcccaggagaattcctgagttttgctgatgacttactctctggcctgggcacatcttgtgtagcagctggtcgaagccatggagaggtccctgaagtcagtatctactcagtcatcttcaagtgtctggagcccgacggtctctacaagtaa

SEQ ID NO: 9573 - DNA, 591 bp, Homo sapiens
  SIMILAR (91)..(354): 1001254mologous to Homo sapiens bA67K19.1 (KIAA0634),accession number AL133284,Smith-Waterman Score=457.
atgaagaatgactccctaaagacagtaacattggaatggagcattgatagaagagatgtggagaggcagaggggaaaagcagcacagaagaccacagagctgggcagcaagaaggagctcaagtccatgcccttcatcacctacctctcaggtttgctgacagcccagatgctgtcagatgaccagctcatttcaggtgtggagattcgctgtgaggagaaggggcgctgtccatctacctgtcacctttgccgccggccaggcaaggagcagctgagccccacaccagtgctgctggaaatcaaccgtgtggtgccactttataccctcatccaagacaatggcacaaaggaggaagccagagaaacagtaggtaggaagggatccctgaagccagacaaagagaaatggcactgttccaggtcttacgagaagtcccaagcattggggaccgctgaaaagcccctgaacaagccccccaagacaaatggccagctttataaagatgccaggaccagagaccgcaaagccagctgggtgaccttggaacaagaccttaacctctctaagcctccatttcctcatctgtaa

SEQ ID NO: 9574 - DNA, 1029 bp, Homo sapiens
  SIMILAR (532)..(717): 981254mologous to Homo sapiens astrotactin2,accession number AF116574,Smith-Waterman Score=319.
atgagagtgcctcgggaagagcagggatggaggagacaacctgagtcttctgatccaaaggagaaaagcagcaaacctgcgtcctcaggtgctctcctcttagctcccccaccccaggatgcagccaaagaaaaccaaagcactctgttttctaagccggagccaggagcgattcccgaagccaggatgtggagccaggagagaaggggcattcaaagggcctgggagacccttggtgaaaacaatcagttggtttcaacatcccagagagattctcaatcagggtttttatcttctttgcgatgggttcgaacttcctcctttagctcggagaagtttggttttctgaagccttcttctctcaactcctcaaagtctttctccgtccagctttgttctgttgctggtgaggagctgcgttcctttggaggtggagagaatagtctgactcaagaccccatgctcgtagactctcagatacccaagaggatcggggcagatgggtgcttgaatctagtaccagagagcagcaggttcactctgtatgctgtggatacacgagggaggcactcagagctaagcacggtgaccctgaggacggcctgtccactggtagatgacaacaaggcagaagaaatagctgacaagatctacaatctgtacaatgggtacacaagtggaaaggagcagcagatggcctacaacacactgatggagaggaactcggcctacactttggtaaacactgtgtttggagccactgaagaatttctgtgtagtggcagcaaagtgtgtgacagcaggagtggccagtgtcccccagagcctggttcttacgaccacaggttactgcaaacagctgctcaaagaagacgcactgacacccagctgtccccagacataaggaaggcccacctgattctacggcgactggagagggtgagtagccactgctccagcatcctgcggagtgcctacatccagagccgcgtggaaacagtgccctatcttttctgccgcagcgaggag

SEQ ID NO: 9575 - DNA, 1164 bp, Homo sapiens
  SIMILAR (262)..(774): 841254mologous to Homo sapiens astrotactin2,accession number AF116574,Smith-Waterman Score=719.
atggctgatcagaaggaagctagacacagtgcatctcagtggaaatgctttgtaggatttctgtcatttagaggtcatatgcaggtagcctgggaggctgatcgatgcaaaggccccgggcgccctctgctggcagaggccttgcaggacttgtggccatcgcccaggcggtcgcaaagggacccagtacccgagagaccatgccgtcgtcctcagcagtctccacttcctcgatttggcagtctctctgctcctctccacagggagaacaacttcatcaaggactttccccagctggccgatgggctgttggtgatcccgctgccggtggaggagcagtgccggggggtcctctccgagccccttccagacctccaactgctcactggagatatcaggtatgatgaggccatgggttaccccatggtgcagcagtggcgggtccggagcaacctctaccgtgtgaagctcagcaccatcaccctcgcagcaggcttcactaatgttctcaagatcctgaccaaggagagcagtcgggaggagctgctgtccttcatccagcactatggctcccactacatcgcagaggccctctatggctcagagctcacctgcatcatccactttcccagcaagaaggtccagcagcagctgtggctccagtatcagaaaggcttcttgggagaacccaagaagatcttgggttcttctctcccaagaagaactcaattcctttggaaaaacaatcacctcataaccaagcagacggtttccattctgtcctgtggtgaggcttttatcctcaggaagggccagcagatttcattttcctctgactctcagctattatcagaattggaattcctcagaccaggtgctggagaccagtctctgcccactcaccttgtgaaagtgattccttttccacctcaattttctcttcctgtgaaatgggtacgttcatcctcttctgcaacattaattgtgcctggggaagggggaggggagagaggtactcacaatcctgttgaaatagacatgggaactggcctactcttgaaggtgctctctgcaagagaagagcgcagagtaggaaggatcactcagcctttcacggaaagaggtgttcaaagaagactcctggaggagttggcggactcctga

SEQ ID NO: 9576 - DNA, 4672 bp, Homo sapiens
  SIMILAR (1293)..(1787): 1001254mologous to Homo sapiens astrotactin2,accession number AF116574,Smith-Waterman Score=911.
  misc_feature (1)...(4672): n = a,t,c or g
ggttcgcttcggcgtccgccgtctccgcagctgcctcctcttcctccttcgccaccgccgccaccgccgccgccgcccgcagcaccgcagcccctcccgccatggccgccgccggcgcccggctcagccccggccccggctcggggctccgggggcggccgaggctctgcttccacccggggccgccgccactgctgccgctgctgctgctgttcctgctcctgctgccgccgccgccgctgctggccggcgccaccgccgctgcctcgcgggagcccgacagcccgtgccggctgaagaccgtcacggtgtccacactgcccgccctgcgggagagcgacatcggctggagcggcgcccgcgccggggccggggctgggaccggggccggagccgccgccgccgccgcgtccccgggctctcctggctctgccggcaccgccgccgagtcgcgcctcctgctctttgtgcgtaacgagctgccggggcgcatcgcggtgcaggacgacctggacaacaccgagctgcccttcttcaccctggagatgtctggcacagcggcggacatctcgctggtgcactggagacagcagtggctggagaatggcaccttgtacttccacgtctccatgagcagctccgggcagctggcccaagccaccgcccccactctccaggagccctcggagattgttgaggagcagatgcacatcctccacatttctgtgatgggtggcctcatcgcgctgctgctgctgctgctggtgttcaccgtggcgctgtacgcccagcgacgttggcagaagcgtcgccgcatcccccagaagagcgcaagcacagaagccactcatgagatccactacatcccatctgtgctgctgggtccccaggcgcgggagagcttccgttcatcccggctgcaaacccacaattccgtcattggcgtgcccatccgggagactcccatcctggatgactatgactgtgaggaggatgaggagccacctaggcgggccaaccatgtctcccgcgaggacgagtttggcagccaggtgacccacactctggacagtctgggacatccaggggaagagaaggtggactttgagaagaaaggaggaatcagctttgggagagccaaggggacgtcgggctcagaggcagacgatgaaactcagctgacattctacacggagcagtaccgcagtcgccgccgcagcaaaggtttgctgaaaagcccagtgaacaagacagccctgacactgattgctgtgagttcctgcatcctggccatggtgtgtggcagccagatgtcttgtccactcactgtgaaggtgactctgcatgtgcccgagcacttcatagcagatggaagcagcttcgtggtgagtgaagggagctacctggacatctccgactggttaaacccggccaagctttccctgtattaccagatcaatgccacctccccatgggtgagggacctctgtggacaaaggacgacagatgcctgtgagcagctctgcgacccagaaaccggagagtgcagctgtcatgaaggctatgcccctgaccctgttcacagacacctgtgtgtgcgcagtgactggggacagagtgaaggaccttggccctacacgacacttgagaggggctatgatctggtgacaggggagcaagcccctgaaaagattctcaggtctactttcagcttgggccaaggcctctggcttcctgtcagcaaaagctttgtggttccgcctgtggagctgtccatcaaccccctgggccagctgcaagaccgatgtgctcgtcacggaagaccctgcagatgtcagggaagaagcgatgctgtccacatactttgaaaccatcaatgacctgctgtcttccttcgggccagttcgtgactgctctcggaacaatgggggctgcactcgcaacttcaagtgtgtgtctgaccggcaggtggattcctcgggatgtgtgtgccctgaggagctgaaacccatgaaggatggctctggctgctacgaccactccaaaggcattgactgctctgatggctttaatggcggctgtgagcagctgtgcctgcagcagacgctgcccctgccctacgatgccacttcgagcaccatcttcatgttctgcggttgcgtggaggagtacaaactggctcctgatggaaaatcctgcttaatgctctcagatgtctgcgagggccccaagtgcctcaaacctgactccaaattcaatgataccctctttggagagatgctacatggttacaacaaccggacccagcttgtgaaccatggccaagtcttccagatgacctttagggagaacaacttcatcaaggactttccccagctggccgatgggctgttggtgatcccgctgccggtggaggagcagtgccggggggtcctctccgagccccttccggacctccaactgctcactggagatatcaggtatgatgaggccatgggttaccccatggtgcagcagtggcgggtccggagcaacctctaccgtgtgaagctcagcaccatcaccctcgcagcaggcttcactaatgttctcaagatcctgaccaaggagagcagtcgggaggagctgctgtccttcatccagcactatggctcccactacatcgcagaggccctctatggctcagagctcacctgcatcatccactttcccagcaagaaagggtccagcaggcagctgtgggctccagtatcagaaagagaccacagagctgggcagcaagaaggagctcaagtccatgcccttcatcaccttacctcttcaggtttggttgacagcccagatgctgttcagatggaccagctcattttcaggtgtggagattcgctgtgaggagaaggggcgctgtccatctacctgtcacctttgccgccggccaggcaaggagcagctgagccccacaccagtgctgctggaaatcaaccgtgtggtgccactttataccctcatccaagacaatggcacaaaggaggccttcaagagtgcactgatgagttcctactggtgctcagggaaaggggatgtgatcgatgactggtgcaggtgtgacctcagcgcctttgatgccaatgggctccccaactgcagcccccttctgcagccggtgctgcggctgttccccaacagtgggagccctccagtactgtggtctccttgggagtgggtgggatgtttcagccagctatttggggaccaaggtcttccgattattatttttgcagcataagaaagtggatgaatacacagacactgacctgtacacaggagaattcctgagttttgctgatgacttactctctggcctgggcacatcttgtgtagcagctggtcgaagccatggagaggtccctgaagtcagtatctactcagtcatcttcaagtgtctggagcccgacggtctctacaagttcactctgtatgctgtggatacacgagggaggcactcagagctaagcacggtgaccctgaggacggccttttccactggtagatgacaacaaggcagaagaaatagctgacaagatctacaatctgtacaatgggtacacaagtggaaaggagcagcagatggcctacaacacactgatggaggtctcagcctcgatgctgttccgagtccagcaccactacaactctcactatgaaaagtttggcgacttcgtctggagaagtgaggatgagctggggcccaggaaggcccacctgattctacggcgactggagagggtgagtagccactgctccagcctcctgcggagtgcctacatccagagccgcgttggaaacagtgccctatcttttctgccgcagcgaggaggtccggcctgcaggcatggtgtggtatagcatcctcaaggacaccaaaatcacgtgtgaggagaagatggtgtcaatggcccgaaacacgtaccgggagttccaagggcccgtgaagggagggtattgccctcccgtgagcacagagactctccatgggagggggagcattattctcctggatccctggggcctgggtgggctgggggacagctgaggatgggcctagcagatgaagcttgccagcaaggccaatagcaaacggtttctcctgtggatagtggacagagacctttgtaaccaatggaattatcaattttcctctatctttaattttctcaaagatattatttgactctatcaaaaagtctcctccctttttaaaaccttttccttaatggaatggctgtcaaatccccgaggccagaaagttttccaggtggaagacccaagcggcctttgcctccttccttcccttccttcctgccacagctctgctttcttcctgcccatggacccctggaggagtacctatggagggacagttttgacctgtatcccctagaggagacagttttgacctcttcagcaccaggaaggaagctctgaggatggttgcagtgaggaagcatgggtctttaaggacttctctctcttttttgctggacattattgagtttgtgggaccctgcctcttcctgctacctgtgggtctgcccgaggagtccctgcaggcctgtccnggtgcagttaaaaattcctattgtctctcaaaaaaaaaaaaaaaaaaagattt

SEQ ID NO: 9577 - DNA, 398 bp, Homo sapiens
  SIMILAR (41)..(394): 481254mologous to Human endogenous retrovirus K env protein,accession number Y17832,Smith-Waterman Score=322.
gagtgatgcgcgcgtcgacgctcttaataagatcaaaatttgggaaaggataaaaaagcatctagaaggacactctacaaacttgtctttggatattgcaaaattgaaagaacagatatttgaagcatcccaggcacacctgaccttaatgccaggaactggagtgcttgaaggagctgcagacagattatcagctagtaacccattaaaatggataaaaacacttggaagctctgtgatttcaatgatgattgtgcttttaatctgtgttgtttgtctttgtgtagtctgcagatgcagatcctgactcctgcgagaagtagctcaccgtgataaagctgcctttgcttttattgctttgcaaatcaaagaaggggaacatgttgggaacagcaccc

SEQ ID NO: 9578 - DNA, 495 bp, Homo sapiens
  SIMILAR (337)..(390): 661254mologous to Homo sapiens Extended human secreted protein sequence, SEQ ID NO. 147,accession number Y35898,Smith- Waterman Score=60.
ctatttctctctgcaaacatttcccacacctaagctaggtggctgaagcaccggcactggcataggaaccagtgctgtgttgccatctccactctccatagatggtttactggtttctgacggattgttcattcttgagtccagtgtggaaaaccgcttaaggtgttcctggggacagatcaagaagctgtcacagatgatggaagaaaaccttaatgccaggaactggagtgcttgaaggagctgcaaatgattagcagctattaacccattaaaatggataaaaactcttggagactctgtgatttcaatgatgatcgtgcttttaatctgtgttgtctgtgtatagtctgcagatgcagatcccgactcctgcgagaagtagctcactgtgataaagccacctttgcttttatcataagtgagaaaatgtggtattttggtttctgtttctgcaataactcgcttagggtaatagcctccagctgtatccat

SEQ ID NO: 9579 - DNA, 759 bp, Homo sapiens
  SIMILAR (3)..(41): 691254mologous to Homo sapiens laminin-binding protein,accession number J03799,Smith-Waterman Score=55.
atggcatctacatcctacatcagaagaagacctgggagaagttcgctgctggcagcttgtgccattgttgccattgaaaaccctgctgatgtcagtgtcatatcctccaggaaaactggccagaaagccacgccgttgtttgctgctgtcactggagccactcttgttgctggctgctttactcctagaacattctctaaccagatctcagcagccttccgggagccacagcttctggtggttactgatcccagggctgaccaccagcccctcacagaggcatcttacattaacctacctaccattgctctgtgtcacagattctcctctgcactatgtgggccttgccatccaatgcaacaacaagggagctcactcagggggtttgacatgcaacctcagctactaagtcatcctgctgatgtactgcgtttagcatttagtatcagagtccctccttctgcaatactgcaagctccccaaaggcaggcagctttatctgttttgtcctctgtcctatcccaggttgaatttggactttcgagtgcccatggacaagcaaaacttctcagttgtctcgtgacggcacaccagtgggactatgctcagtttctgcagtgtcagccctctgtctgttctgtggtgtcaatagccttattgctcaccaaaaaacgagcagaaattttaaaactgaaagtgtggatgctattggcaagacttgtagttcttgttaacttcttacaattgagacgaagatag

SEQ ID NO: 9580 - DNA, 438 bp, Homo sapiens
  SIMILAR (3)..(437): 1001254mologous to Homo sapiens laminin-binding protein,accession number J03799,Smith-Waterman Score=778.
accagatccaggcagccttccgggagccacggcttcttgtggttactgaccccagggctgaccaccagcctctcacggaggcatcttatgttaacctacctaccattgcgctgtgtaacacagattctcctctgcgctatgtggacattgccatcccatgcaacaacaagggagctcactcagtgggtttgatgtggtggatgctggctcgggaagttctgcgcatgcgtggcaccatttcccgtgaacacccatgggaggtcatgcctgatctgtacttctacagagatcctgaagagattgaaaaagaagagcaggctgctgctgagaaggcagtgaccaaggaggaatttcagggtgaatggactgctcccgctcctgagttcactgctactcagcctgaggttgcagactggtctgaaggtgtacaggtgccct

SEQ ID NO: 9581 - DNA, 489 bp, Homo sapiens
  SIMILAR (105)..(1): 1001254mologous to Homo sapiens MDS025,accession number AF182412,Smith-Waterman Score=167.
ctgttgagcttgagtgaccatctctttatagatagtatccaggctgacatttgataaagcagttaacgctgatacaattgtttctgcttgtgttttgtcaaatcctttatgcataggagttgatccattatcagcacgctcattaatattgattactccatcttccactaatttcttaagcatccccaaatcacccttaaaggcagccacatgacctggaaatgctaaaggcgcttgggtcgggggagatggagtcgcatttagccgcacagcagcctggaacctgaagttttcggccgctgagcgttctgggtgattgcgtagtgcgagggccaacgaaaccttctgggaagtgtagtccagcaagccgctcacttttcgtgaggcgtcacatcctgctgcttcaccctcaggggcttcataaccttgatcaaaataaggcaacgcctccaccacaacctctccggccaccaaacttgtgcctgccat

SEQ ID NO: 9582 - DNA, 411 bp, Homo sapiens
  SIMILAR (23)..(403): 1001254mologous to Homo sapiens MDS025,accession number AF182412,Smith-Waterman Score=650.
cggacgcgtgggctctgaggacatgaatagtcgccaggcttggcggctcttgctctcccaaggcagaggagatcgttgggtttcaaggccccgcgggcatttctcgccggccctgcggagagagttcttcactaccacaaccaaggagggatatgataggcggccagtggatataactcctttagaacaaaggaaattaacttttgatacccatgcattggttcaggacttggaaactcatggatttgacaaaacacaagcagaaacaattgtatcagcgttaactgctttatcaaatgtcagcctggatactatctataaagagatggtcactcaagctcaacaggaaataacagtacaacagctaatggctcatttggatgctatcaggaaagacatggtccatcctag

SEQ ID NO: 9583 - DNA, 1092 bp, Homo sapiens
  SIMILAR (723)..(256): 421254mologous to Homo sapiens MDS025,accession number AF182412,Smith-Waterman Score=237.
tcaccatccaccactgctgtttgctgccctcccagaccctccattgacttccactcctccggatccagcagggtgtctgctgcgctcctgatccagcgaggttcccattgccgctctggatcgggctaaaggctcgccattgttcctgtggtttaaggcaaaggcaggtctcctggcaggaaaccgaagaagatgggaaagctggttgacaatctcaatttcacgtttttcagtgcagaaaccatgagttgagggcagatttttcatactgctgatgcctggtgtaatgcagggaagaggcctcatggatgtagaatctggttctcctaccatctgctcagaatgtttccacttctctgtacctacaggaactgtctcatcctcatacaggatctctgggttgctgctggtgaagatcttgctgctgtgtatttctttttggtttgatgacagaattagtgttagacatgtctcctcctctccttctctagctcccacagtaacattgtcagaggcgttggaacgaagtgactctgtcttaactgagggcatgtttttcctgatagagtccaaatgagccattagctgttgtactgttattttctgttgagcttgagtgaccgtctctttataggtagtatccgggctgacatttgataaagtagttaatgctgatactgttgtttctgcttgtgttttgtcaaatccaagagtttccaagtccaaggaagtagctataatccattgcagagggcatccaaaaggagactctagtgtggctaagggaaactcctttgcagatgcaggagctaaggcagctgcattaaagcagccagttggacttgtaggcatgttagtgccctctgccctggtaatgacagaaccaagatatattccttcaccctgtgaccaccacctcaaataggcttgtgtcccacttcctgccataacacgttctataggagactgcgtggtacttgcaacttcttggcaatttggtgtgaaaagcacaattttcacatctacttgatctaagatggagacccagacaatgtccatggagttggcctgaggaccaatgacaaggaccat

SEQ ID NO: 9584 - DNA, 1171 bp, Homo sapiens
  SIMILAR (272)..(406): 411254mologous to Mus musculus beta-1,3-N- acetylglucosaminyltransferase,accession number AF092050,Smith- Waterman Score=100.
catcagagggagctgagggaggcctgacctgaggccggcacccggagctggcgggagccagacccagaggacctccgccgcttcttgctgtcagcagcctgccggagcttcccacagtggctgcctggaggtggtggcggccaagtctccagctgctcagatactgatgtcccctacctgctgttggccgtcaagtcagaaccagggcgctttgcagaacgacaggccgtgagagagacccggcgcaaaccaacatccagggatccggctgctcttcctgctagggtctccggtgggtgaggcggggcctgacctaaactcactagtggcatgggagagccgtcgctacagtgacctgctgctctgggacttcctcgacgtcccattcaaccagacgcttaaagaaccctgttgtggttgcctggctgggccggcccctgccccaccgggagttttgtcttgcgagctcaggacgatgcctttgtacacacccctgccctgctggctcacctgcgggccctgccacctgcctcggcccgaagcctctacctgggtgaggtctttacccaggccatgcctctccggaagccaggaggacccttctatgtgcccgagtccttcttcgaaggtggctacccagcctatgcaagcgggggtggctacgtcattgccgggcgcctggcaccctggctgctgcgggcggcagcccgtgtggcacccttcccctttgaggacgtctacactggcctttgcatccgagccctgggcctggtgccccaggcccacccaggcttcctcacagcctggccagcagaccgcactgcggaccactgtgctttccgcaacctgctgctggtacggcccctgggcccccaggccagcattcggctctggaaacaactgcaagacccaaggctccagtgctgactctcattggggaggggcggaggtgctgacctggccccggccctggcctgggcctctggggccggcccctggctcagcccctccttccaggtcttgatgggagggaggagggcccagaagctggacaacttaagccactccttggcctcccccagccaggggcctgggcaggaaagatggggtggtgcactgtttttgcctactttttgtttttaaaaaacatgcactccccactctgaaacga

SEQ ID NO: 9585 - DNA, 1900 bp, Homo sapiens
  SIMILAR (217)..(1275): 431254mologous to Caenorhabditis elegans similar to entire S. cerevisiae ABC1 protein (Swiss-Prot Acc: P27697),accession number U21324,Smith-Waterman Score=756.
atgatatttgtggttataattctaatggttgttctctccccagagggtggttctgggctggactccagccccttcctgtcggaggccaatgccgagcggattgtgcagaccttatgtacagttcgaggggccgccctcaagccctacccaccaacaggccccaacttcagatactcacacggggtccctcctcacctcttcgcttacttcccccctggttccactgtctcccaagacaacagcttcatcagccctcagctgcagcacatctttgagcgggtccgccagagcgccgacttcatgccccgctggcagatgctgagagttcttgaagaggagctcggcagggactggcaggccaaggtggcctccttggaggaggtgccctttgccgctgcctcaattgggcaggtgcaccagggcctgctgagggacgggacggaggtggccgtgaagatccagtaccccggcatagcccagagcattcagagcgatgtccagaacctgctggcggtactcaagatgagcgcggccctgcccgcgggcctgtttgccgagcagagcctgcaggccttgcagcaggagctggcttgggagtgtgactaccgtcgtgaggcggcttgtgcccagaatttcaggcagctgctggcaaatgaccccttcttccgggtcccagccgtggttaaggagctgtgcacgacacgggtgctgggcatggagctggctggaggggtccccctggaccagtgccagggcctaagccaggacctgcggaaccagatttgcttccagctcctgacgctgtgtctgcgggagctgtttgagttccgattcatgcagactgaccccaactgggccaacttcctgtatgatgcctccagccaccaggtgaccctgctggactttggtgcaagccgggagtttgggacagagttcacagaccattacatcgaggtggtgaaggctgcagctgatggagacagagactgtgtcctgcagaagtccagggacctcaaattcctcacaggctttgaaaccaaggcattctccgacgcccacgtggaggcagtgatgatcctgggggagcctttcgccacccagggcccttatgactttgggtcgggggaaacggcccgccgcattacaggacctcatcccggtgctgctgcggcaccggcttgtgtcccccacccgagggagacctatggccctggcaccgcaagctgggcaggggctttcctggcctgtgcccacctccgagaccacatcgcctgcagggaccataaaccaggacacctaccaccgctactgggccagtcgccagccagacgcagccactgccggcagcctccccaccaaagggggactcctgggtggatccctcatgacagcctccatgggggattcagtccccagagcaggccgtaccctgctgtagtgcctcttatcccttccccgtctgccctgggtcagaggagcccccttgggcttcccagtcttgcctggctctcctccttggcccaggagctcaggatccctggggctggggaactcccaacttcgtgccctagatcctgcacctccccactcgaaagtgaggtatccgaaaactaagccaggggaagcggttaacttatctttgccaaaattttgagggagccttgggccgctgcatgtcgttatgcagatcagactcatcagggggaagccctcacctctgcctcaagcctcccgtggaaggcgaagatggtcctggaggcagtcctcacctcttgcctccctcgctcctccaacaagctggcttctcccgggttccagcctctcagtgtgttggaaaggtatgggtgcggggtgggggggagctgaatcttcaatcggaataaaagcagccctccccttc

SEQ ID NO: 9586 - DNA, 1139 bp, Homo sapiens
  SIMILAR (649)..(1137): 1001254mologous to Escherichia coli tRNA (m1G) methyltransferae (trmD gene) (aa 1-255),accession number X01818,Smith-Waterman Score=847.
atggtcgtggttatcgacgtgccgatagaccccgccagcgttcgcgtaaagttagagaggctcgatgccgccgccagtcgttccggtggcaaaccagacagcgtaatggtggttagcggcataaagaagcaggccaccgcgaactcttgggacgttagagatgccccttgtaccacggacgaactggcgcacgaatgtattctcgatattcgcccgctgaaagaagaaaccggcatcagcgagctggatattgccaagcgcctgatcgactacggtttccacgcgccgacgatgtcgttcccggtggcgggtacgctgatggttgaaccgactgaatctgaaagcaaagtggaactggatcgctttatcgacgcgatgctggctatccgcgcagaaattgaccaggtgaaagccggtgtctggccgctggaagataacccgctggtgaacgcgccgcacattcagagcgaactggtcgccgagtgggcgcatccgtacagccgtgaagttgcggtattcccggcaggtgtggcagacaaatactggccgacagtgaaacgtctggatgatgtttacggcgaccgtaacctgttctgctcctgcatacgtcaacgaattaatttttctcggaaaaacaaatgggactctagaaagcttgatcaagcgggcgtcagcgaactggcaacgaatcaaaaattgattctggtgtgcggtcgctacgaaggtatagatgagcgcgtgatccaaaccgaaattgacgaagaatggtcaatcggcgattacgttctcagtggtggtgagttaccagcaatgacgctgattgactccgtttcccggtttattccgggagtactgggacatgaagcctcggcaacggaagattcctttgctgaaggattgctggattgcccgcactatacgcggcctgaggtgttagaagggatggaagttccgccagtgttactgtcgggcaaccatgccgagatacgtcgctggcgtttgaaacagtcgctgggccgtacctggcttagaagacctgaacttctggaaaacctggctctgactgaagagcaagcaaggttgctggcggagttcaaaacggaacacgcacaacagcaacataaacatgatgggatggc

SEQ ID NO: 9587 - DNA, 1346 bp, Homo sapiens
  SIMILAR (779)..(925): 971254mologous to Escherichia coli gcvHP,accession number L20872,Smith-Waterman Score=257.
atgcaagtggtggttgtggcgtgtgataaaaacggcaacatcgatctgactgatctgcgcgcgaaagcggaacaggcgggcgataacctctcctgtatcatggtgacttatccttctacccacggcgtgtatgaagaaacgatccgtgaagtgtgtgaagtcgtgcatcagttcggcggtcaggtttaccttgatggcgcgaacatgaacgcccaggttggcatcacctcgccgggctttattggtgcggacgtttcacaccttaacctacataaaactttctgcattccgcacggcggtggtggtccgggtatgggaccgatcggcgtgaaaacgcatttggcaccgtttgtaccgggtcatagcgtggtgcaaatcgaaagcatgttaacccgtcaaggcgcggtttctgcggcaccgttcggtagcgcctctatcctgccaatcaactggatgtacattcgcatgatgggcgcagaagggcttgaaaaagcaagccaggtggcaatcctcaacgccaactatattgccagccgcctgcaggatgccttcccggtgctgtataccggtcgcgacggtcgcgtggcgcacgaatgtattctcgatattcgcccgctgaaagaagaaaccggcatcagcgagctggatattgccaagcgcctgatcgactacggtttccacgcgccgacgatgtcgttcccggtggcgggtacgctgatggttgaaccgactgaatctgaaagcaaagtggaactggatcgctttatcgacgcgatggctggctatccgggcagaaattgaccaggtgaaagccggtgtctggccgctggaagataacccgctggtgaacgcgccgcacattcagagcgaactggtcgccgagtgggcgcatccgtacagccgtgaaattgcggtattcccggcagcgggcctgacgttgttcaccggttggtcatgggtgaccattgctgaaaaactcggcggctggattttaaacattctcaccttcgccagtaatcgtacccgtcgcgatgatacctgggtcgatgaagatgagtatgaagacgacgaagagtatgaagatgaaaatcacggcaaacagcatgaatcacgccgtgcccgtattcttcgcggcgcgctagcgcgtcgtaaacggttggcggaaaaattcattaatccgatggggcggcaaacagacgctgcgttgttctccggtaagcggatggatgatgacgaagagattacctacactgcacgcggtgtggctgccgacccggacgacgtcctattttcgggcaatcgtgcaacgcagccagaatatgacgaatacgatccattattaaacg

SEQ ID NO: 9588 - DNA, 1860 bp, Homo sapiens; identical to SEQ ID NO: 657
  SIMILAR (1)..(516): 901254mologous to Escherichia coli Arginine binding protein artI,accession number D90724,Smith-Waterman Score=778.

SEQ ID NO: 9589 - DNA, 730 bp, Homo sapiens
  SIMILAR (729)..(31): 781254mologous to Homo sapiens MSTP063,accession number AF119814,Smith-Waterman Score=863.
ttttttttacagaatcaaccaaaacatttattttttctcttttttcaagaaaaactgtcgagcttctttccccaggccctgcctgaggaaaatctgttagccagctcaagatagtcttgggaaaccaaggcatttccctttgggttggtaaggctggttttccgcttgacctggagtctgtgccaaatcctgaatgaaaggggccagtaaaacacagctcatctcttgctccagaatgatcttgttctgatggttgttgtaacaagctgcgataaagtgaggggaacagtactttgatcagccgtgggtcactgaaatactggaagggcaactggcagagctttttgcagcactgtggggtggcggccggactgcacgatcaccctggttatctgggtggttgacagtgaagtagcccacacagacgatgacctcatgaaggaggctttcacaggagacttggctgcagtggcccagcagggagctggccatgtgccggaatgcaagggacaagccctctgcccctacaatagactgaaaagcaggcagatgaagagctgcaaagctgttgaagaaacgtaaactctgaatggccacttggatggtattttgagtgtaattctccttgggactggcagtgctggggtccaagatggtgccatggaagaggacacagtagagcatatgaagaactccagccaggtcggttgcctgaagagcagctgtcagc

SEQ ID NO: 9590 - DNA, 439 bp, Homo sapiens; identical to SEQ ID NO: 7930
  SIMILAR (439)..(371): 1001254mologous to Homo sapiens nucleoside-diphosphate kinase,accession number Y07604,Smith-Waterman Score=116.

SEQ ID NO: 9591 - DNA, 269 bp, Homo sapiens; identical to SEQ ID NO: 7931
  SIMILAR (2)..(130): 971254mologous to Homo sapiens nucleoside-diphosphate kinase,accession number Y07604,Smith-Waterman Score=212.
  misc_feature (1)...(269): n = a,t,c or g

SEQ ID NO: 9592 - DNA, 1126 bp, Homo sapiens
  SIMILAR (178)..(660): 441254mologous to Homo sapiens nucleoside-diphosphate kinase,accession number Y07604,Smith-Waterman Score=242.
atgggcggcctcttctggcgctccgcgctgcgggggctgcgctgcggcccgcgggccccgggcccgagcctgctagtgcgccacggctcggggactatcatgggggtgtttgtggctgtgggcaccatccctgtcccttccagagtgccctgcatagaggcagacaccctgaagcctggagggccctcctggacccgggagcggaccctggtggcggtgaagcccgatggcgtgcaacggcggctcgttggggacgtgatccagcgctttgagaggcggggcttcacgctgggtggggatgaagatgctgcaggcaccagagagcgtccttgccgagcactaccagtgacctgcggaggaagccctttccaccctgcccttcatcccgctacatgagctctgggcctgtggtggccatggtctgggaagggtacaatgtcgtccgcgcctcgagggccatgattggacacaccgactcgggctgaggctgccccagggaaccattaagggggttgacttcagcgtccacatcagcaggaatgtcatccacgccagcgactccgtgggagggggcccagcgggagattccagctgtggtttccagagcagtgagctggtgagctgggcaagaccgggggccagcacagcagcattcacccaggcttgaggctcagagctgcccttaccaccccatcccccacgcaggacccaacctaccctccgttagcaagaaccccaagccccacatccaaacctgccctgtccccaaacccacttacttcccctgtttcacctctggccccaccccaggcccagagggagttttgagcccacccaacttcagtgccctttctgtacccccaagcccaggcacaagatttggaccaatccttttttgcaccaaagtgccgggacaaccttttgtggtgggggggggtcttcacaattatcataacctctcctcttaaggggaggcattaaaattccactgtgccccagcacatgggtggtacactaattatgacttcccccgagctctgaggtagaaatgacgcctttatgcaagttgtaaggagttgaacagtaaagaggaagttttgcacacccaaaaaaaaaaaaaaaaaaa

SEQ ID NO: 9593 - DNA, 1653 bp, Homo sapiens
  SIMILAR (274)..(849): 221254mologous to Mus musculus myelin expression factor-3- like protein,accession number AF302691,Smith-Waterman Score=159.
atgtccacaccacagacagcctttggagtgatgtccactccggaaatcaaagccacagactctggagaggcatccacctctcacattaacatcacagcctctggatcaaagcccacatcgcacatgactgccacaactcctgaaactgcgaaaccaccaccaaaggaagtgccatccttcggaatgttgaccccagcactctgctacctcttagaagagcaggaagcagcccggggctcatgctctgtggaggaagagatggagattgatgaggagaagcaaatgaaggggtttttggacgattcagagagaatggcatttctggtatctcttcatctgggagcagcagagaggtggttcatcttgcaaatggaggtaggagaacctctctcacatgaaaataaatctttcctgagaagatcccagggcatatatgactccctatctgagatagacatcctcagtgctgttctttgccatcccaaacagggccaaaagtcagtcaggcagtatgccactgacttcctgctgctggcccgacatttgtcttggtctgatgccattctacggaccaggtttctggaaggactctcagaagctgttaccaccaaaatgggtcggatcttcctgaaggtggctggcagcctaaaggagctgatagacaggtctctgtacaccgagtgccagctggctgaagagaaggattccccaggcaactcaagccaggttctgccaacagcctgtaagcggaataatgaggaggccatggggaatgaactgagctctcagcagcagactgaggagcaccagcatgtttccaaacgctgttactacctgaaagagcatggagacccccaagaaggtcttcatgatcaccttggacagagcacaggccatcatcagaaggcccataccaacaacgtcgccgctacgaagaaagtggttcaacagctccagctggaggccgggctcaacagcgtaaaagtttcccaggcagctacagaacctcaaacgattatatctccaccgaatgctctacaggaaccctctggcattgaatgggagcaatttccaaaggcacaaatcccttcagaaccccaggaaaatctgtgtccttttgttagtacaatgaattctatcaaaggattacatgaggattaccaaggaaatgcaggcaaagtacttagcacagtgccaggtaggcggtatgccctccaaaatctgggcactgctattgttcagggagaggagaggaaacagtctagcctctgccctggtgaagagggaaaaagacatgagttgaggtctgggagtcacagcctggtgatgaagcatgcaatggtcctctttaatgtgggctttgagacaaaagatcagattcatctccccactaggttagggatggcagaagtggagaccctctgtatctatgccaagcagctgccccacaaactcattgcaaagctgagacttcttaaaggtaccagacctttgtctctgaacaatgaacacattttaacacacccaggtttggaaggatggttacatactgagttcttcagaatcctatcaatcaataacaaataccacctgagtgcctatttagtacaaagcattgtgctccacgtcatgggctttcatagaaaaacttga

SEQ ID NO: 9594 - DNA, 457 bp, Homo sapiens
  SIMILAR (348)..(283): 311254mologous to Strongylocentrotus purpuratus metallothionein,accession number M59822,Smith-Waterman Score=41.
  misc_feature (1)...(457): n = a,t,c or g
nnnnnttgtgtttgaaaggtcaactcccccaacactggagacagttcgttccaaacaggagtgggagacgagactgaatggagttcggataatgaaaaagaatgttcgtgaccaatttaatagtcatatccagttagtgaggaacggagccaagctgagcagccttcctcaaatccctactcccactttacctccacccccatcagagacttcatgcttcaggtgtttcaacccagtccctctctggctcctcggatgcccttctccattgggcagacaaactggagaagatcctggagaagctgctgacccggttcccacagtgcaataaggcccagatgaccaacattcttcagcagatcaagacagcacgtaccaccatggcaggcctgaccatggaggaacttatccagttggttgctgcacgactggcagaacatgagcgggtggcagcaac

SEQ ID NO: 9595 - DNA, 389 bp, Homo sapiens
  SIMILAR (137)..(325): 341254mologous to Onchocerca volvulus pyrrolidone-rich antigen,accession number AF055985,Smith-Waterman Score=72.
  misc_feature (1)...(389): n = a,t,c or g
tctgcgtttatttaccaacgtaattaatattatcaaaactgttcttggaacacagcttaatccctcagcttttgtttttgatgctaggatgattagctctagaagaaaaaaattatacgccaagctgagcagccttcctcaaatccctactcccactttacctccacccccatcagagacagacttcatgcttcaggtgtttcaacccagtccctctctggctcctcggatgcccttctccattgggcaggcttgggcggtgttaaggcttctgctgaaaactccccggccccaaccagtaggacaaactgggaggaaggatccggggagnaaggctggctgnacccggttcccacagtgncaatnaagggcccaggatggaccaacat

SEQ ID NO: 9596 - DNA, 376 bp, Homo sapiens
  SIMILAR (41)..(313): 341254mologous to Mus musculus chromatin assembly factor-I p150 subunit,accession number AJ132771,Smith-Waterman Score=124.
gcaagtggagaatcagctccaagtgcaattaaagcagcttcagcaaaggagagaagaggaaatgaagaatcaccaggagatattaaaggctattcaggatgtgacaataaagcgggaagaaacaaagaagaagatagagaaagagaagaaggagtttttgcagaaggagcaggatctgaaagctgaaattgagaagctttgtgagaagggcagaagagaggtgtgggaaatggaactggatagactcaagaatcaggatggcgaaataaataggaacattatggaagagactgaacgggcctggaaggcagagatcttatcactagagagccggaaagagttactggtactgaaactagaagaagcagaaaaagag

SEQ ID NO: 9597 - DNA, 942 bp, Homo sapiens
  SIMILAR (241)..(465): 971254mologous to Homo sapiens Extended human secreted protein sequence, SEQ ID NO. 167,accession number Y35918,Smith- Waterman Score=383.
atggctcactacagccttgacctcctgtgctcaagtgacccttccacatcagcctctgtagatgagactacagttggtttttcagcagacctgcagagggcacaggggaagtgttcctttggcccctgcagcaccacaggaccccaggtcctgtctgtggtcgtggtggtaacgggtgccagcctggaccagtcctgcatcgtggagcttcactctggacattctaaggggcagactgtggctggggcgtccagcacataccgggacctccggaagggtgtgtatgtgccctacacccagggcaagtgggaaggggagctgggcaccgacctggtaagcatcccccatggccccaacgtcactgtgcgtgccaacattgctgccatcactgaatcagacaagttcttcatcaacggctccaactgggaaggcatcctggggctggcctatgctgagattgccagggagccggcgagatttcaaacggaggaactgtcgcctggcagtccgattttcacttcttccctcagtccccgcccacactcgagcgcatcacgctcgttggctcgagagcgtgcctcgggtcccccgccacgctcgctcccttccccgccgcccaacccctccctcgatgaggtcctcaactatcccccaccccggaaggctccgggcgaggctccgggcgaggctctgggcgaggcgcagctcccccagcgccacccaacacccacccgctcccccagcttccagggacgccggggtgttgccctgcagcgcgcaacaaacacttccggaaaaggaccccagttcccaccaactctccccatggcagctcccatgctgcagcctgatgaagcaggtcgcctgggaaactgctgccacacacagacctgctcagagcacctccccaacctgcagagcagttggccacaccaaatgtga

SEQ ID NO: 9598 - DNA, 614 bp, Homo sapiens
  SIMILAR (162)..(209): 681254mologous to Homo sapiens Human secreted protein encoded by gene No. 31,accession number Y27730,Smith-Waterman Score=64.
ggaattcagtgcaataaggcccagatgaccaacattcttcagcagatcaagacagcacgtaccaccatggcaggcctgaccattgtagtttcttatccagttggttgctgcacgactggcagaacatgagcgggtggcagcaagtactcaaccacttggtcgcatccgggccttgttccctgctccactggccccaaatccggtcccccaatgttcttgccttctgccccaagtttcatatcctggaaggtcttcacatgctccagccacctgtaagctatgtctaaattgtgccagaaactcgtccagcccagtgagctgcatccaatggcgtgtacccatgtattgcacaaagagtgtattcaaattctggcccaaaaccaacacaaatgacaactttgtcctttttgttccacactctaaaatgacggacctgactggggaggaagaagaagagaaactgatgtgaacaggaagcgcgggttcaagatttctaaaactctatatttatacagtgacatatactcatgccatgtacatttttattatataggtaatgtgtgtatagaaagtctgtattccaatgttcgtaaatgaaactatgtatattatgc

SEQ ID NO: 9599 - DNA, 720 bp, Homo sapiens
  SIMILAR (280)..(693): 1001254mologous to Homo sapiens Human aspartyl protease 2 (b) (Asp2) amino acid sequence,accession number Y88426,Smith-Waterman Score=733.
atggagagtggtgaggaggagcacttcatgaagaaaagcgtgaactgtgaaattcttgaatttgcccgggagattggtattgatcccatcaaggaaccagaactgatgtggctggcgcgagagggcatcgtggccccactgcctggagagtggaaaccatgcaccacaggaccccaggtcctgtctgtggtcgtggtggtaacgggtgccagcctggaccagtcctgcatcgtggagcttcactctggacattctaaggggcagactgtggctggggcgtccagcacataccgggacctccggaagggtgtgtatgtgccctacacccagggcaagtgggaaggggagctgggcaccgacctggtaagcatcccccatggccccaacgtcactgtgcgtgccaacattgctgccatcactgaatcagacaagttcttcatcaacggctccaactgggaaggcatcctggggctggcctatgctgagattgccaggctttgtggtgctggcttccccctcaaccagtctgaagtgctggcctctgtcggagggagcatgatcattggaggtatcgaccactcgctgtacacaggcagtctctggtatacacccatccggcgggagtggtattatgaggtgatcattgtgcgggtggagatcaatggacaggatctgaaaatggactgcaaggagattcttatgtatgttaaattagaatag

SEQ ID NO: 9600 - DNA, 1172 bp, Homo sapiens
  SIMILAR (124)..(273): 901254mologous to Homo sapiens Extended human secreted protein sequence, SEQ ID NO. 167,accession number Y35918,Smith- Waterman Score=238.
tcagtgccttaagatggtctttcccaaggagcatcccccaagccttcaaatttgccttccagtttagacaggaagctggcctctgcctttagggccgtatgaggactcactccttgtctctttctgccaaagcctgacgactccctggagcctttctttgactctctggtaaagcagacccacgttcccaacctcttctccctgcagctttgtggtgctggcttccccctcaaccagtctgaagtgctggcctctgtcggagggagcatggtgagtaggtcctcagagaggggaggtcctggcattgagggagagatgggtgccatcctcttcccctttcctgaaagctacaccacagtttttggctcccgataattaagaatcagggaggaacctctttatattccctacccttactttatttttccattcttttcttttttgcgttattccagaaaggaatcaaggcacctatggtaaacttggaaaggaaggcaattaggaaaatttcaaaggaaatgaaaataagacctgttgaattaaaattattcagtttgatggtcagaaggcagagatataagaagtttgtctatttattaattaattagaacaatggtgaatggttctccaataagcagagaaaataaaacttataatataaacaaataaccattcattcaacatttattgtggcagtttagatttaaataactttatatcaagggctgtatgattctgaaacaaataattaaaaatcccggaaagtcttttctcctgaacacatttaagaaactagaaatcactttgggtatgatttgtttagaagcaggaagatgaaaagggtagcctgtagaagaccttgccaccccaagaaatcactgatcttattgcttggtccttgggggactcactctccttctgtgccaggacacgggtacctgcctctttttttccctagatcattggaggtatcgaccactcgctgtacacaggcagtctctggtatacacccatccggcgggagtggtattatgaggtcatcattgtgcgggtggagatcaatggacaggatctgaaaatggactgcaaggaggtaataaaaccaagggagagcctgggaacataagggggtaggcagtacaatgtgaaggaagaactctggttatcatgtt

SEQ ID NO: 9601 - DNA, 2454 bp, Homo sapiens
  SIMILAR (493)..(1173): 921254mologous to Homo sapiens lymphoma proprotein convertase,accession number U33849,Smith-Waterman Score=1100.
atgggcctggcagggacaggtgggcctgatggccagggcacaggggggccgagctgggctgtgcacctggaaagcctggaaggtgacggggaggaagagactctggagcagcaggcggatgccttggcccaggcagcagggctggtgaatgctggacgcatcggagagcttcaggggcactacctctttgtccagcctgctgggcacaggccggccctggaggtggaggccatccggcagcaggtggaggctgtgttggctgggcatgaagctgtgcgctggcactcagagcagaggctgctaaggcgggccaagcgcagcgtccacttcaacgaccccaagtacccgcagcaatggcacctgagccctgagggtagctatgacctcaactctaatgaccctgaccccatgccccacccggatgtggagaatggcaaccaccatggcacgcgatgtgcaggagagatcgcggctgtgcccaacaacagcttctgtgccgtgggcgtggcctacgggagccgcatcgcagaaggggtggagagggtgactgatgtggctgccttacaacatggggtgattgctggtcgccagggctttgggagcatctttgtggtagccagtggcaacggaggccaacacaacgacaactgcaactacgatggctacgccaactccatctacaccgtcaccataggagctgtggatgaggagggacgcatgcctttctatgcagaagaatgtgcctccatgctggcagtcaccttcagtggtggggacaagatgcttcggagcattgtgaccactgactgggaccttcagaagggcactggctgcactgagggccacacagggacctcagctgcagcgcctctggcagctggcatgatagccttaatgctgcaggtgcggccctgcctcacgtggcgtgacgtccagcacatcattgtcttcacagccacccggtatgaggatcgccgtgcagagtgggtcaccaacgaggcaggcttcagccatagccaccagcacggtttcggcctcctcaacgcctggaggctcgtgaatgcagccaagatctggacatctgtcccttacttagcatcctacgtcagtcccgtgttaaaagaaaacaaggcgattccgcagtccccccgttccctggaggtcctgtggaatggcattgaggcatctggcaactgcttgcttgtcactaaaaaagaggtgtgggaaatggaactggatagactcaagaatcaggatggcgaaataaataggaacattatggaagagactgaacgggcctggaaggcagaggtgagaagaggagctgatatcttgaaagtcttagtttcaggcttccagatggtatctacttttggcattgtaataggagagccaatcttatcactagagagccggaaagagttactggtactgaaactagaagaagcagaaaaagaggcagaattgcaccttacttacctcaagtcaactcccccaacactggagacagttcgttccaaacaggagtgggagacgagactgaatggagttcggataatgaaaaagaatgttcgtgaccaatttaatagtcatatccagttagtgaggaacggagccaagctgagcagccttcctcaaatccctactcccactttacctccacccccatcagagacagacttcatgcttcaggtgtttcaacccagtccctctctggctcctcggatgcccttctccattgggcaggtcacaatgcccatggttatgcccagtgcagatccccgctccttgtctttcccaatcctgaaccctgccctttcccagcccagccagccttcctcaccccttcctggctcccatggcagaaatagccctggcttgggttcccttgtcagcccccacggtccacacatgccccctgccgcctccatcccacctcccccaggcttgggcggtgttaaggcttctgctgaaactccccggccccaaccagtagacaaactggagaagatcctggagaagctgctgacccggttcccacagtgcaataaggcccagatgaccaacattcttcagcagatcaagacagcacgtaccaccatggcaggcctgaccatggaggaacttatccagttggttgctgcacgactggcagaacatgagcgggtggcagcaagtactcagccacttggtcgcatccgggccttgttccctgctccactggcccaaatcagtaccccaatgttcttgccttctgcccaagtttcatatcctggaaggtcttcacatgtaagactctttttctttgaacactgtgatatggagaagctggagcccaagaaccagcctgggtacccacgtaccattaggagcggggaggggaagaacaggataggggaaaaagatgaccttcatcaaggagctcttgtggtggaggacataaggaagccctga

SEQ ID NO: 9602 - DNA, 2914 bp, Homo sapiens
  SIMILAR (752)..(1072): 971254mologous to Homo sapiens beta-site APP cleaving enzyme,accession number AF190725,Smith-Waterman Score=548.
atggcccaagccctgccctggctcctgctgtggatgggcgcgggagtgctgcctgcccacggcacccagcacggcatccggctgcccctgcgcagcggcctggggggcgcccccctggggctgcggctgccccgggagaccgacgaagagcccgaggagcccggccggaggggcagctttgtggagatggtggacaacctgaggggcaagtcggggcagggctactacgtggagatgaccgtgggcagccccccgcagacgctcaacatcctggtggatacaggcagcagtaactttgcagtgggtgctgccccccaccccttcctgcatcgctactaccagaggcagctgtccagcacataccgggacctccggaagggtgtgtatgtgccctacacccagggcaagtgggaaggggagctgggcaccgacctggtaagcatcccccatggccccaacgtcactgtgcgtgccaacattgctgccatcactgaatcagacaagttcttcatcaacggctccaactgggaaggcatcctggggctggcctatgctgagattgccaggcctgacgactccctggagcctttctttgactctctggtaaagcagacccacgttcccaacctcttctccctgcagctttgtggtgctggcttccccctcaaccagtctgaagtgctggcctctgtcggagggagcatgatcattggaggtatcgaccactcgctgtacacaggcagtctctgggtatacacccatccgtcgggagtcgtattatgaggtcatcattgtgcgggtggagatcaatggacaggatctgaaaatggactgcaaggagtacaactatgacaagagcattgtggacagtggcaccaccaaccttcgtttgcccaagaaagtgtttgaagctgcagtcaaatccatcaaggcagcctcctccacggagaagttccctgatggtttctggctaggagagcagctggtgtgctggcaagcaggcaccaccccttggaacattttcccagtcatctcactctacctaatgggtgagggtaccaaccaatgctttccgcatcaccatccttccgcagcaatacctgcggccagtggaagatgtggccacgtcccaagacgactgttacaagtttgccatctcacagtcatccacgggcactgttatgggagctgttatcatggagggcttctaccgttgtctttgatcgggcccgaaaacgaattggcttgcttgtcagcgcttgccatgtgcacgatgagttcaggacggcagcggtggaaggcccttttgtcaccttggacatggaagactgtggctacaacattccacagacagatgagtcaaccctcatgaccatagcctatgtcatggctgccatctgcgccctcttcatgctgccactctgcctcatggtgtgtcagatggcgctgcctccgctgcctgcgccagcagcatggaatgactttgcctgatgacatctccctgctgaaagaggtgtgggaaatggaactggatagactcaagaatcaggatggcgaaataaataggaacattatggaagagactgaacgggcctggaaggcagaggtgagaagaggagctgatatcttgaaagtcttagtttcaggcttccagatggtatctacttttggcattgtaataggagagccaatcttatcactagagagccggaaagagttactggtactgaaactagaagaagcagaaaaagaggcagaattgcaccttacttacctcaagtcaactcccccaacactggagacagttcgttcccaacaggagtgggagacgagactgaatggagttcggataatgaaaaagaatgttcgtgaccaatttaatagtcatatccagttagtgaggaacggagccaagctgagcagccttcctcaaatccctactcccactttacctccacccccatcagagacagacttcatgcttcaggtgtttcaacccagtccctctctggctcctcggatgcccttctccattgggcaggtcacaatgcccatggttatgcccagcttgggcggtgttaaggcttctgctgaaactccccggccccaaccagtagacaaactggagaagatcctggagaagctgctgacccggttcccacagtgcaataaggcccagatgaccaacattcttcagcagatcaagacagcacgtaccaccatggcaggcctgaccatggaggaacttatccagttggttgctgcacgactggcagaacatgagcgggtggcagcaagtactcagccacttggtcgcatccgggccttgttccctgctccactggcccaaatcagtaccccaatgttcttgccttctgcccaagtttcatatcctggaaggtcttcacatgtaagactctttttctttgaacactgtgatatggagaagctggagctcaacatcctggtggatacaggcagcagtaactttgcagtgggtgctgccccccaccccttcctgcatcgctactaccagaggcagctgtccagcacataccgggacctccggaagggtgtgtatgtgccctacacccagggcaagtgggaaggggagctgggcaccgacctggtaagcatcccccatggccccaacgtcactgtgcgtgccaacattgctgccatcactgaatcagacaagttcttcatcaacggctccaactgggaaggcatcctggggctggcctatgctgagattgccaggtgcagccagtgcccttctgaaggtcccagtcagtggtcacctggaagtgaaacaggaaaaggaagtaggttagagactgagttcaagctggggacagtggtgtgcacctatagtcccggctacctgggaggcccaggcaggaggattgcttga

SEQ ID NO: 9603 - DNA, 947 bp, Homo sapiens
  SIMILAR (1)..(468): 741254mologous to Mus musculus high mobility group protein,accession number X80457,Smith-Waterman Score=605.
atgtctgctaaagagaaaggaaaatttgaaaatatggcaaaggcggacaaggtccattatgttagagaaatgaaaacctatattcctcctaaacaggagacaaaaaagaagttcaaggatcccaatgcacccaagaggcctcccttcagcctgagtactgcccaaaaatcaaagggagaacatcctggccagtctactggtgatgttgcaaagaaactgggagagatgcggactaacagtgctgcagatgacaaatggccttatgaaaagaaggctgcaaagctgaaggaaaaatacagaaaggatactgctgtatatcgagctaaaggaaagcctgatgcagcgaaaaagggagatgtcaaggctgaaaaaagcaagaaaaggaagaatgagaaagatgaagaggatgaggaagaggatgaggaggaagatgaagaggatgacgataatgaatatgctgataatgaatgcactggttttagtggttttgtctataaaacatttaactcccctgtacacaactcactctttttaaatgtagaaatccatgctttaggattcgacgaactcttggaaagcattttctgcatcctgctagttgtggaagtgttttccctgcaaaaaggtgtcgcaatgcttgaagaagtcgtagtcaatggagagaggtcagggagaagtttaccatggctgcctgcggccccttcacttccggtgccggtgccgctagggctgcgccatccccccagtcaatcggacaaccatagcctccaactgacctttctgacagctctgagactcctccggccacgactaggtgctgtcctggaggaaacggtggaggacggccgcacaaaaaccaatctacctgatgaaaactccgttcccttctcgccagaaacataaaatgccgatggagctacggccaccgctgccgagacaaaatggcg

SEQ ID NO: 9604 - DNA, 733 bp, Homo sapiens
  SIMILAR (152)..(730): 821254mologous to Mus musculus HMG-1,accession number U00431,Smith-Waterman Score=785.
tttcgtgcggagagagtgaggaggctgcgtctggctcccgctctcacagccattgcagtacattgagctccatagagacagcgccggggcaagtgagagccggacgggcacctgggcgactctgtgcctcgctgaggaaaaataactaaacatgggcaaaggagatcctaagaagccgagaggcaaaatgtcatcatatgcattttttgtgcaaacttgtcgggaggagcataagaagaagcacccagatgcttcagtcaacttctcagagttttctaagaagtgctcagagaggtggaagaccatgtctgctaaagagaaaggaaaatttgaagatatggcaaaagcggacaaggcccgttatgaaagagaaatgaaaacctatatccctcccaaaggggaggacaaaaaaagaagttcaaggatcccaattgcacccaagaggcctccttcggccttcttcctcttctggctctgagtatccgccccaaaaatcaaaggagaacatcctgggcctgtccattgggtgatgttgcggaggaaactggggaggagatgtgggaataacactgctgcagatgacaagcagccttatgaaaagaaggctgcgaagctgaaggaaaaatacgaaaaggatattgctgcatatcgagctaaaggaaagcctgatgcagcaaaaaagggagttgtcaaggctgaaaaaaggtcgacgcggccgcgaattccagatcta

SEQ ID NO: 9605 - DNA, 507 bp, Homo sapiens; identical to SEQ ID NO: 3565
  SIMILAR (422)..(490): 391254mologous to Felis silvestris polyprotein,accession number X51929,Smith-Waterman Score=40.
  misc_feature (1)...(507): n = a,t,c or g

SEQ ID NO: 9606 - DNA, 594 bp, Homo sapiens
  SIMILAR (594)..(1): 541254mologous to Friend murine leukemia virus pol protein,accession number M93134,Smith-Waterman Score=511.
ctgctgtcggcagatctgagctttcttcttggacaccttacacccacagtcctccaggtgccaatgtagggcatctgttcccttggcacacccgactgccgtggggtgtcccagcagaaggtcatcaacctactggagcaacacgcagcctaggtctctgctgggaaacttctggaggtctcgagcccacgcctccccgaagatggtgggggagttcttgaacccttgtggaagcccggtccaagtgtactgagtagtgacacctgactccggatcttcccactgaaaggcaaacagcttctgcctctctggggctaatctgataggaaagaaagcgtctttcgggtccaagcaggtgaacccgctgtccttagctggcagcaaacccaacaatgtggtcgggttaggtactgttggatggaaagtcagtgtagcttgatgaagcaagcgcaaatcctgtacctgactgtagtccttggtccgtggcttgggaaaaggcaggaggagagtgttgcatggagactgacaaggaacaataattccaaaagttcttaggtgcttgagacggacctggataccttgaagggcttctct

SEQ ID NO: 9607 - DNA, 1821 bp, Homo sapiens; identical to SEQ ID NO: 3567
  SIMILAR (1608)..(1670): 471254mologous to Baboon endogenous virus strain M7 gag-pol precursor polyprotein,accession number D10032,Smith-Waterman Score= 43.

SEQ ID NO: 9608 - DNA, 1711 bp, Homo sapiens
  SIMILAR (1105)..(1527): 581254mologous to Homo sapiens BC62940_2,accession number AC004659,Smith-Waterman Score=423.
atggtgttggagaaacttgatttccacatgcagaagaatgaaggtggactctatgtcacaccagcccctggagattatattcggatcaatatcaccggctgggtttacaactactgcgatattggacgtaatatcatgctctctccctccctggacattaggagcaatatcacagctcctttacggcccaaaacggggatacaaatgtccccgagagaacagcggtatactgggatagatgaggatggtcacgtggtggagaggcgtgtttttggctaccagcccttcacctccgtcgaccttctcaactggaaaagcaatacaccgccctataccgaaaagccacaagccctaattgatttgctccaaactgttatccagacccacaaccacacctgggctgattggcaccagttgctcatgttcctctttaacagcgaagaaaggcggagagtcctccaagcagcaactaagtggctggaggaacatgcaccagctgattaccaaaacccccaagagtatgttgatgaccttctgctgggacaccccacggcagtcgggtgcaccaagggaacagatgccctacaccggcacctggaggactgtgggtataaggtgtccaagaagaaagctcagatctgccgacagcagccttgggcatcagtagactgggaactatacgtggatgggaacagcttcttcaacccccaaggagagagaggtgcagggtgtgcagtggtaaccctggacactgttgttgaagccagatcgttgccccaggccactgcagcccagaaagctgaactcattgctttcattggggccttagaactcagtgaagatctgattcctagatttcgactgcccttacggatcggctcacataacgggcctgcgtttttggctgccatggtacagaagacggcaaaggaaatgactaacaaggtcacgggggagtgtactccccctgcaatactggcagtaatctcgtcctccccaaacctggatgtgagcgacaagatcacagagggggtgtacacaccctgcgacattggaagtaatatgatcctctccccacctggatattgggaaagatatcacagcgcggaggatccagaactgcagcccatcctcgctgggctgtccctgtccatgtatctggtcacggtgctgaggaacctcctcatcagcctggctgtcagctctgactcccacctccacaccccaatgtgcttcttcctctccaacctgtgctgggctgacatcggtttcacctcggccacggttcccaagatgattgtggacatgcggtcgcatagcggagtcatctcttatgcggactgcctgacacggatgtctttcttggtcctttttgcatgtgtagaagacatgctcctgactgtgatggcctatgactgttttgtagccatctgtcgccctctgcactacccagtcatcgtgaatcctcacctctgtgtcttcttagtttcggtgtccttttccttagcctgcattggcgtgtacctgacttcagctgtggcaccacccctcaggaatggtgtggtggcgtcagtgacgtatgctgtggtcacccccatgctgaaccctttcatctacagcctgagaaacagggacattcaaagcgccctgtggaggctgcgcagcagaacagtcaaatctcatgatctgttccatcctttttcttgtgtgg

SEQ ID NO: 9609 - DNA, 575 bp, Homo sapiens
  SIMILAR (318)..(572): 301254mologous to Homo sapiens carinoembryonic antigen,accession number X62151,Smith-Waterman Score=105.
tagcttatatattacatatgcctataagtattggttgaataaatgaatgaatgaatgaattcagagagtccatgtgtttagaagcaggccacacagcatctaaaggtagaaaaacctctggatcaacaggatggcaaatctgtggtaaccatgcctgtgttcccactcctgcacccagggcagacatcactaatcaatcccagcattgtttccaatgagcagcactcagagtccttgctccccgctgaagatctgtatctagagaggagcatgccatggtccctggcaacacccctgatctcagcccttccctgtaacttcccacagcctcaatcctggtcctctggatgctccaaggctcccaggcagctctctacatccagaagattccagagcagcctcaaaagaaccaggaccttctcctgtcagtccagggtgtcccagacaccttccaggacttcaactggtacctgggggaggagacgtacggaggcacgaggctatttacctacatccctgggatacaacggcctcagagggatggcagtgccatgggacagcgagacatcgtgggg

SEQ ID NO: 9610 - DNA, 1218 bp, Homo sapiens
  SIMILAR (823)..(1131): 581254mologous to Homo sapiens Human secreted protein encoded by cDNA clone 4030250,accession number B14320,Smith-Waterman Score =234.
atgaataattgtcttgccaaaaatgtcaatgccagttgtgtctgctcagctgacgatcacatccatccctccctgggccgtcgagggggcaacgtcaccctgtctgtccaggggatccctcagaatctcatctcctacaattggctccgaggagcaaccaccaatcaggttacccggatcctcaattttaacttcttcagccatggctacaccctaggaccagcccacactggcagggaaacaggcagagctgatggctccctgatcattattgatgtgcgtgcatctgacaatggcatctacaccctgcatctcatctcttctggtgaaaacagttgccatcatgctatgctacttgtctctgctcgtggccccttggcatttccacaagacgccaagatggagattcccatggggacccagggctgcttctcaaagagcctcctgctctcagcctcaatcctggtcctctggatgctccaaggctcccaggcagctctctacatccagaagattccagagcagcctcaaaagaaccaggaccttctcctgtcagtccagggtgtcccagacaccttccaggacttcaactggtacctgggggaggagacgtacggaggcacgaggctatttacctacatccctgggatacaacggcctcagagggatggcagtgccatgggacagcgagacatcgtgggcttccccaatggttccatgctgctgcgccgcgcccagcctacagacagtggcacctaccaagtagccattaccatcaactctgaatggactatgaaggccaagactgaggtccaggtagctgaaaagaataaggagctgcccagtacacacctgcccaccaacgctgggatcctggcggccaccatcattggatctcttgctgccggggcccttctcatcagctgcattgcctatctcctggtgacaaggaactggaggggccagagccacaggatggcgaccacagagaagccagaattgggccctgctcatgatgctggtgacaacaacatctatgaagtgatgccctctccagtcctcctggtgtcccccatcagtgacacaaggtccataaacccagcccggcccctgcccacacccccacacctgcaggcggagccagagaaccaccagtaccagcaggacctgctaaaccccgaccctgccccctactgccagctggtgccaacttcctga

SEQ ID NO: 9611 - DNA, 698 bp, Homo sapiens
  SIMILAR (1)..(273): 861254mologous to Sus scrofa tubulin-tyrosine ligase,accession number X68453,Smith-Waterman Score=413.
gagggtggcctgcggactccttcaaacccatatcatgttgatatttcccagacaaaaccctgccattgaaccaatcactgcattcaaaaagagtattcaaagaactacgggaagtatgaagaaggaaatgaaatgttcttcaaggagttcaatcagtacctaacaagtgctttgaacattaccctagaaagtagtatcttactacaaatcaaacatataataaggaactgcctcctgagcgtggagcctgccattagcaccaagcacctcccttagccagagcttccagctcttcggctttgacttcatggtcgatgaggagctgaaggtgtggctcattgaggtcaacggtgcccctgcatgtgctcagtaagcctgcacgtcattgtgtttttacaagtgggaagttggttctgcagttgggatagtctgtgggtacaagtgtagtcactttgactgctgtgagggaggatgccacagtgataggagacccttgggaggactctatctggcagggggctttgctgagtcacttcctttcctatttccccgtgtataggccagataggcccagtgtggtagctcatgcttgtaatcccagcactttgggaggccaagacaggtagactgtcaggtagactgtctgagcccaggagttcaagaccagcctgggcagcctggcaaaaccccatctctac

SEQ ID NO: 9612 - DNA, 534 bp, Homo sapiens
  SIMILAR (133)..(279): 931254mologous to Sus scrofa tubulin-tyrosine ligase,accession number X68453,Smith-Waterman Score=250.
atggtgggagtggacgtcactttcaaggtgatcagccgtgaagagcggcaaacacagcgtcttggctcgagttcccccaaacggtgccccctggaacaagaatttgagcacgagtacagtagtttttttgggaggaactgcctcctgagcgtggagcctgccattagcaccaagcacctcccttaccagagcttccagctcttcggctttgacttcatggtcgatgaggagctgaaggtgtggctcattgaggtcaacggtgcccctgcatgtgctcagtccccagccaagtccttattgccacctccagcagcctctttctgtccccacccccttggacctgtcagcagcattcgaggcaaccgacagcacttgctgagctgctctcctgtcatggctggacacgtggtgctgggcaggcttgcctgtgggcctttgtgctttctgttacctgtgtgtggaatccccaccaccattaccaccaccaccaccagccttaccgtggctggcttcttctttaccaaaacatcttga

SEQ ID NO: 9613 - DNA, 906 bp, Homo sapiens
  SIMILAR (638)..(802): 711254mologous to Homo sapiens sialic acid-binding lectin Siglec-9,accession number AF227924,Smith-Waterman Score=176.
atggaccctcgtcctgagtcgagcgcctccaccagggccctcagagctgccctgatcctgacagctgtcactggtgacagtctcccgatcaacaccagtggcctctttattgacaaaaaaggtctaacctgggctctacctacttctgagtctctttgccctgacccaaaatctaccctccctggtcctctttctggccaaaccatgtcaatcaattgccaggagccttgtactccacagcgctgtcatttctctgcaaactcccagatgatgtgggaaactgcaaaatcctctcatcaaattctctttaccagcatacacaaagattccatcacttgtgatcgacgtcttagtcactattcttccatacggagggactcttgtgaccagactgtcctggggcagtgcctggtgccatggctcaaggcacagttctgctggggctggtgctgctgccatccaggggtgagaaatgtgacccagccacctgagatccatgtccagaagagctgcaatcaggtgacctggaaatctgacttgcaccgtatcatgggccggaagccctctggctacagatgtgtgagtgaaaagcaggagggcttctggccccggttctcacctgatcagggggccatcctgggcactggcttccccccaaccccatggcctcacctggagctactactccagtgggggaaggagactccagtatgcatccctcagcttccagatggtgaagccttgggactcgcggggacaggaggccactgacaccgagtgctcggagatcaagatccacagatgagaaactgcagagactcaccctgattgagggatcacagcccctccaggcaagggagaagtcagaggctgattcttgtagaattaacagccctcaacgtatga

SEQ ID NO: 9614 - DNA, 1141 bp, Homo sapiens
  SIMILAR (617)..(922): 461254mologous to Homo sapiens dJ207F6.1 (novel nucleolar protein NOP56 like protein),accession number AL133258,Smith- Waterman Score=141.
  misc_feature (1)...(1141): n = a,t,c or g
atggaaaatagacgcaaagtaaaaggtgagtggatcgcagtaccccagccagtaaaggagctgcgaggcgttctcaacgccgcgactaccttgagtaaaacgagggagatcttgcggggaaagtgttttcagctcacttctcctacagggaatgagccctctcacctatcgtggacaccgaggaaacgcagcagagatgggcacccaggctgcccagatcctctggcagcctcgggtgctcgtccacttcgctcctcctccgcctttgctgccgcagccgcagattcagggagtacagtgcaggtttgggacaagggtgtattgcgtgttgctgatgtctggagtacgattgaacccgtcacccatgtgaatcttggttgggcggcaaaagtgggtccaatcattagtcatgggagcgctgtgatctcagctttctctaaagaaggaatgtttagaattttttccgaacgaaagacgcttctggcgaaactccgagactttcaaaatacacagttgagaaaattattttcagagatggaaaaagccgctggtcgctctcaaagcggtgtcagttttggacaaaaaggactgggcgacagagcgtgtgaggagatgagtgaaaacccccaaaaaggaaggaaaaagccaaaagccccccaggaggtttccttcagggagaatgggaattggaagaccccattctatcttcttttctcccaaaaccccaaggaaaaagaaatctttttcccaaggaggagttgatgagttagcgatccttgaagagacccgctggcaagcaccaagtattcccaagaggaagaagtctacacccaaggaggaaacagttaatgaccccttggaaggcaggccacaaaaagtggctccaagaaaaagaggaaattctccaaaggaggagccggtcaagcagtgggcctgaagaggcggctggcaagagcagctccaagaagaagaaaaagttccataaagcatcccaggaagattagaatgcaaatggacattctctgggaggtggggcataccatagcccaaggtgctcatttcccaccctgtgccgtggtccccaataaaaacaaatttcccagaaaaaaaagaaaaaaccccgnggggggccggtaccatt

SEQ ID NO: 9615 - DNA, 2745 bp, Homo sapiens
  SIMILAR (928)..(2067): 981254mologous to Cloning vector pBACe3.6 levansucrase,accession number U80929,Smith-Waterman Score=1960.
atgcttctggaaacacaagatcaagttgtctcctcgccaaagagaaaaacataccaagaaatgcctggtgttatcctctacactaagctggattcatgccgtaagtcgggcaaacgcccacctgaagactatgcaggcaatcaggacatgacacagagccgggagaggcctgctcttcggctctgccttgaacttcattcggcagctgaaatattcggattgacctctgcggaagccagtaaggatatacggcaggcattgaagagtttcgcggggaaggaagtggttttttatcgccctgaagaggatgccggcgatgaaaaaggctatgaatcttttccttggtttatcaaacgtgcgcacagtccatccagagggctttacagtgtacatatcaacccatatctcattcccttctttatcgggttacagaaccggtttacgcagtttcggcttagtgaaacaaaagaaatcaccaatccgtatgccatgcgtttatacgaatccctgtgtcagtatcgtaagccggatggctcaggcatcgtctctctgaaaatcgactggatcatagagcgttaccagctgcctcaaagttaccagcgtatgcctgacttccgccgccgcttcctgcagcacgccatagtgactggcgatgctgtcggaatggacgatatcccgcaagaggcccggcagtaccggcataaccaagcctatgcctacagcatccagggtgacggtgccgaggatgacgatgagcgcattgttagatttcatacacgggtcaccgtcgacagcgacacacttgcatcggatgcagcccggttaacgtgccggcacggcctgggtaaccaggtattttgtccacataaccgtgcgcaaaaggtggggatcctctacatccttaaggggggggcagccggccgctgccaaaacgcccaaggaacagtagctgaaaacaacggctatcacgttgtgtttgctccggcgggaagcccgaaagacgctgatgccacatcaatctacatgttttatcaaaaggtcggcgacaactcaatcgacagctggaaaaacgcgggccgtgtctttaaagacagcgataagttcgacgccaacgatccgatcctgaaagatcagacgcaagaatggtccggttctgcaacctttacatctgacggaaaaatccgtttattctacactgactattccggtaaacattacggcaaacaaagcctgacaacagcgcaggtaaatgtgtcaaaatctgatgacacactcaaaatcaacggagtggaagatcacaaaacgatttttgacggagacggaaaaacatatcagaacgttcagcagtttatcgatgaaggcaattatacatccggcgacaaccatacgctgagagaccctcactacgttgaagacaaaggccataaataccttgtattcgaagccaacacgggaacagaaaacggataccaaggcgaagaatctttatttaacaaagcgtactacggcggcggcacgaacttcttccgtaaagaaagccagaagcttcagcagagcgctaaaaaacgcgatgctgagttagcgaacggcgccctcggtatcatagagttaaataatgattacacattgaaaaaagtaatgaagccgctgatcacttcaaacacggtaactgatgaaatcgagcgcgcgaatgttttcaaaatgaacggcaaatggtacttgttcactgattcacgcggttcaaaaatgacgatcgatggtattaactcaaacgatatttacatgcttggttatgtatcaaactctttaaccggcccttacaagccgctgaacaaaacagggcttgtgctgcaaatgggtcttgatacaaacgatgtgacattcacttactctcacttcgcagtgccgcaagccaaaggcaacaatgtggttatcacaagctacatgacaaacagaggcttcttcgaggataaaaaggcaacatttgcgccaagcttcttaatgaacatcaaaggcaataaaacatccgttgtcaaaaacagcatcctggagcaagggctgctgacacccgcagttggtgaacgtctgtcagagtcgcggcctatcgaacgtggggcgcagctcacggccttcgcactgctgcaggcccagctgcggggccaggacgcggccggccgcctgcaggacctcgcggctgggcccgtgggctccctgtgccgccgcgctgagcgatttagagacgccttcacccaggagctacgccgcggcctccgaggccgctcggggccaccaccagaaaatctagaagaaacggataaattcctggacacatacaccttcccaagactaaatcaggaagaagtggaatgtctgaatagaccaataacaaattctgaaattgaggcagtaattaatagcctaccaaccacaaaaagcccaggaccagatggattcacagccaaattctaccagaggtacaaagaggagctggatctgtcatggcggaaacagcggttatcaatacacaagaaacgtaaaaatagcccgcgaatcgtccagtcaaacgacctcactgaggcggcatatagtctctcccgggatcaaaaacgtatgctgtatctgttcgttgaccagatcagaaaatctgatggcaccctacaggaacatgacggtatctgcgagatccatgttgctaaatatgctgaaatattcggagtgacctctgcgaaagccagtaatgagtaa

SEQ ID NO: 9616 - DNA, 2242 bp, Homo sapiens
  SIMILAR (273)..(398): 721254mologous to Leishmania major probable levansucrase precursor,accession number AL160371,Smith-Waterman Score=152.
atggcagatatcccgcaagaggcccggcagtaccggcataagcaagcgtatgcttacagcatccagggtgaaggtgttgaggatgacgatgagcgcattgttagatttcatacacgctggccgctgcaaaacgctgacggaacagtagctgaatacaacggctatcacgttgtgtttgctcttgcgggaagcccgaaagacgctgatgacacatcaatctacatgttttatcaaaaggtcggcgacaactcaatcgacagctggaaaaacgcgggccgtggcttaaagacagcgataagttcgacgccaacgatccgatcctcaaagatcagacgcaagaatggtcaggttctgcaacctttacaggttctgtttttcttgccttcggatgttactcaaaatagtgaacaacctgccccagaagaaaatgatcaattacaatttgtgcttcaagaagagttttccagtgatgattcaacaacaaatgcacaatctgttatctttggaggctatgctttcttcaagttaacactctctaggagtcctttagtctcccaaccaggtaataaaggtagagaatttgtgccagatgaacaaaagcaaagtatccttccatctcccaaattttcagaggaagaaattgaacctttgcctcccacactagagaaaaagccctcagaaaatatgtccattcaagctagactctacatttaaacaaatgaaagatgaagatctacaatctgctattgtacaaccttctcaaatgcaaaccaagcttctgcaggaccaagctgcgtcactccaagtttttccatcccattctgcactaaacactcgaagatatatcacctgaagacttgccatcccaagctctaccagtagaaggcctgtcagaacaaaccatgccatctaagtctacatcatcccatgtcaaacagtcttctaatctgacagctaatgacctgccccctcaaggcatactatcccaagacacatcatctcaagatatgctgtttcatgacatgatttcttttagatatgcaatccctagatatgctatctgaagacacaccatcccacgccatgccacctcaagacataccttcccaagatatgctatcccaagctctatcagcgcatgccatattacctgaagcctcaacatcccatattgtgcagttccctgaaatacaacacctacttcagcagcccccagatcttcaaccagaaaacactgaacctcaaaaccagcaaattttacaaatgtcatatcaagatattagatcagaagttatgggaagagaccaaaggaatgggaaatctgaggagggaactccattaggaaggaaaatcctcaagacggcattccttaaaccagcaaaccaaaggccttgcaatacttaaggagacattctttagacgtgcaagccaaaggctagaaatcctcaaagaggcattccttagatcagcaaagcaaaggctggcaatctccaaagcagaaatccttagaccagcaaatcaaagactggctatccccaaagaggcactccggctggagaaacaaagattataaagcacgagaatggcaatttgaaatgaagcactggcaaacacaggatctattagagaaagaagccctaaagcagaaagctctataccaagaagtccaaacccagcacgcaacagcccaacataacctagaatgtcaagacactcaagataaagaccaacaagaccttcaatccagagttacacaaaaaggagatatgtacactagagacatcaaaccaggggacatgaaatgtatagggcaaacctcaggggacctgcaatcagaagacgtgaaggcagattttcattcttcttctggcccaaagcctcagtacaagacacatgtttagccctatttgtcccaatcctagattcaggaacaagatgtgcaacccagacacttcagcttcctcaaattcatataaagaagatgtgaatttaacctcctacttcatgtgatccaaaagatcaacagcaatctgaagactctgactaacatgcagaatctacccaataccacactgcccccattaatggaattaaattgggaaaaacaatattgcctcctccaatctgtgttctcaactgtggttgccacctcattaacttacaaaaaaatgaagggcatgctgagcactcaaacaatttgttcttacttaaaataaaatgacaacaaaccaaaaaaaaaaaa

SEQ ID NO: 9617 - DNA, 642 bp, Homo sapiens
  SIMILAR (3)..(473): 271254mologous to Rattus norvegicus Nopp140,accession number M94288,Smith-Waterman Score=104.
gcggcaaggggctatttgatgatgaggacgaggagagtgacctcttcatggaagccccccaggatcggcaagctggagcctctgttaaggaggagtcttcatcatccaaacctggaaagaaaatcccagcaggagctgtttctgtatttttaggagacacggatgtgtttggtgctgcctccgttccatcactgaaggagccacagaagcctgagcagcccactccaaggaaaagcccctatggtccccctcccactggcctcttctttttctcggcaccccacagcaaaccttctaaaacacgcaaagtccaatccactgccgatatctttggtgacgaagaaggagatctgttcaaagaaaaagccgtagcatcgccagaagccactgtgagtcagacagatgaaaataaagcaagagcagaaaaaaaggttaccttatcttacagcaaaaatctcaagccctcatcagaaacaaaagactcaaaaaggcttattttcagatgaggaggactctgaggatttgttttcttctcaaagtgcgagtaacttaaaaggtgcatctctgctgcctggcaagctccccacgtcggtttcctggtttgatgatgaagatgaagaggataatcttttgggggtacag

SEQ ID NO: 9618 - DNA, 1422 bp, Homo sapiens
  SIMILAR (421)..(975): 861254mologous to Homo sapiens KIAA0592 protein,accession number AB011164,Smith-Waterman Score=801.
catgtagtcagggaagccggtcctcttacatactggctcagggctgtaggggagagtcctcagagagagcccgatggaggccatgtcgccttctgtgttccagccttggaagtcaacggtggtccttttccttcatttgttggtcaagatggtcacaatggcccatccaggtttatggggagaggccataggctccccttcttgatgggtgtctggggctcaccccctttgttcccaactcccttcggcggcattcaggctccaagtactgataccgctcggtataataagtataacagaacgagatcaccttacgcacgcacaaccctgactgtcagtaggattgaccagtgtttttcatcaacgccaacagcggtgcgtctccacctgagcagcaatctatctgcgatagagcgctcgaaaaaagagactgtctctgaggcaccacctttgctgttcagcgatgaagaagagaaggaggcacaacttggagtgaagtctgtggataagaaggttgagagtgccaaggagtcattaaaatttgggagaactgatgtggctgagtcagaaaaggaaggacttttgactagatctgctcaggaaacagtcaagcattctgatttattttcttcatcatccccatgggacaaaggaaccaagcctagaaccaaaactgttcttagcttgtttgatgaggaagaggataaaatggaagatcaaaacattatccaggctccacagaaagaagtaggaaagggctgcgatcctgatgcccaccccaagagcacaggtgtcttccaggatgaagagctgcttttcagccacaagctccaaaaggacaatgacccagatgttgacctttttgctggcaccaaaaaaaccaaggtacaagagaaaaagagagtagtgaaaaaagaccactctgttaactctttcaaaaaccagaaacatcctgaatccattcaaggtagtaaagaaaaaggcatatggaagccggaaacacctcaggcaaatttagcgatcaacccagcggccttgctgcccacagcggcttcccagatctctgaagtaaagcctgttttgccagaattggcttttccttcatctgaacacagaaggagccacggtctggaaagtgtgcctgtccttcccgggagtggggaggccggtgtgagttttgatcttccagctcaggcagacaccttacacagtgcaaacaaggcacaccaggtgccactccctgaacacacatggtctgttctgctgctgcccaaggctcctgctgcctcctcaccaggaatgcccctctctgtccacagctgtgcttccacatccccacttctgtcactgtgccctgcactccctgcaccaagttcccacagcagcgacactgtttcatgggatctcctcaatggactgtga

SEQ ID NO: 9619 - DNA, 3099 bp, Homo sapiens
  SIMILAR (2269)..(3090): 881254mologous to Homo sapiens KIAA1099 protein,accession number AB029022,Smith-Waterman Score=1288.
atggttacccatcagcagcctgcagctagaaagccaaacatgacatctaagaaacctaaacccatgggacctaaagcccatgggatcttttcaggaactagaaaaaacaatcttgaaatttatatggaccaaacaagaaccggcatagccaaaacaaaactaagcaaaaacaacaaatctggaggcatgacattacctgatttcaaactatactataaggccatagtcgccaaaatagcatgtggtggttctatgtataattcagatacagatgaggatgaagaaactgagccttcttcttctgggcaacagataattgaaaattcaataactatgaataagatgaagctgctgaaggctaagatgaagaacatgaatctcagcaaaaagcacatcacacaagtgagtgatgaggaagaggatgatgatggctgtgacctttttgctgactctgagaaggaggagaaagatattgaggacattgaagaaaatactagacctaaaagaagcagacctacatcgtttgcagatgagctggctgcccgcatcaagggggatgccgtgggccgagtggacgaggagccgacaactgtgagttatgaggatgacagacgtggaaagaaccaggatgcgtatactgagggaggacttagtactattaaaactgtgaactgttcttcaagccttaccctcaggagaagcaaaacttcggaagacactcaagagaagaaggaaaggagaactccttcggacgatgaagaggataacttattcgcaccccccaagctgaccgacgaggacttctcgccatttggctctggaggtggcctgttcagtgggggcaaggggctctttgatgatgaggacgaggaggacatagaagaatcctctaaccctctctggagtggttacagcctgcgatgggcacgggagcccccgcagcagccagaaactcacactgttgtctccacgaatgagaaaccagaacaatggctgaaaggagagaactgggggtctgtctccactcctttacagaaaagaagcagacctacatcgtttgcagatgagctggctgcccgcatcaagggggatgccatgggtcgagtggacgaggagccgacaaatgaagaggataacttattcgcaccccccaagctgaccgacgaggacttctcgccatttggctctggaggtggcctgttcagtggcggcaaggggctatttgatgatgaggacgaggagagtgacctcttcacggaagccccccaggatcggcaagctggagcctctgttaaggagggtaagctggggctgggcagctgcgtctccgtgtgcagagttccaaaactgtctttctcactaggagatggaaccctgaggagacacggatgtgctgcctccgttccatcactgaaggagccacagaagcctgagcagcccactccaaggaaaagcccctatggtccccctcccactggcctgtttgatgatgatgatggtgatgatgataacgactttttctcgacaccccacagcaaaccttccaaaacaggcactgagaagccttttaggaaaatcgggatggattgtgaccttggagatacctcatcatatcacacaaaggtttccaccgtgcacattacgaagaacagaaatggaggtgggagtttaaataactattcctcctccattccatcgactcccagcaccagccaggaggaccctcagttcagtgttcctcccactgccaacacacccacccccgtttgcaagcggtccatgcgctggtccaacctgtttacatctgagaaagggagtgacccagacaaagagaggaaagccccggagaatcatgctgacaccatcgggagcggcagagccatccccattaaacagggcatgctcttaaagcgaagtgggaaatggctgaagacatggaaaaagaaatacgtcaccctgtgttccaatggcgtgctcacctattattcaagcttaggtgattatatgaagaatattcataaaaaagagattgaccttcagacatctaccatcaaagtcccaggaaagtggccatccctagccacatcggcctgcgcacccatctccagctctaaaagcaatgacctatccaaggacatggacaccgggctgggtgactccatatgcttcagccccagtatctccagcaccaccggccccaagctcaacccgcccccctctcctcatgccaataaaaagaaacacctaaagaagaaaagcaccaacaactttatgattgtgtctgccactggccaaacgtggcactttgaagccacgacatatgaggagcgggatgcctgggtccaagccatccagagccagatcctggccagcctgcagtcatgcgagagcagtaaaagcaagtcccagctgaccagccagagcgaggccatggccctgcagtcgatccaaaacatgcgtgggaacgcccactgtgtggactgtgagacccagaatcctaagtgggccagtttgaacttgggagtcctcatgtgtattgaatgctcaggtatccaccgcagtcttggcacccgcctttcccgtgtgcgatctctggagctggatgactggccagttgagctcaggaaggttatgtcatctattggcaatgacctagccaacagcatctgggaagggagcagccagggacagacaaaaccctcagaaaagtccacgagggaagaaaaggaacggtggatcctttccaaatatgaggagaagctctttctggccccactaccctgcactgatctgtccctgggccagcagctgctgcgggccaccgctgatgaggacctgcagacagccatcctgctgctggcacatggctcccgtgaggaggtgaacgagacctgtggggagggagacggctgcacggcgctccatctggcctgccgcaaggggaatgtggtcctggcgcagctcctgatctggtacggggtggacgtcatggcccgagatgcccacgggaacacagcgctgacctacgcccggcaggcctccagccaggagtgcatcaacgtgcttctgcagtacggctgccccgacgagtgcgtgtag

SEQ ID NO: 9620 - DNA, 2928 bp, Homo sapiens
  SIMILAR (579)..(632): 881254mologous to Homo sapiens putative p150,accession number U93572,Smith-Waterman Score=83.
atgaaggcagaaataaagatgttctttgaaaccaatgagaacaaagacacaacgcaccagaatctctgggacacatttaaagcagtgtgtacagggaaatttatagcactaaatgcccacaagagaaagcaggaaagatctaaaattgacaccctaaaatcacaattaaaagaactagagaagcaagagcaaacaaattcaaaagctagcaggaggcaagaaataactaagatcagagcagaactgaaggaaatagagacacaaaaatcccttcaaaaaatcaatgaatctgagagctggttttttgaaaagatcaacaaaattgatagattgttagtaagactaaagaatcaaatagatgcaataaaaaaagataaaggggatatcaccagcgatcccacagaaatacaaactaccatcagagaataccataaacacctctacacaaataaactggaaaatctagaagaaattgataaattcctggacacatataccttcccaggactaaaccaggaagaagtggaatctctgaagaaaccaataacaggctctgaaattgaggcaataattaatagcctaccaacaaaaaaagtccaggtccagatggattcacagccaaattctaccagggaaaaagagggaatcctccctaactcattttatgaggccagcatcatcctgataccaaagcctggcagacacacaacaaaaaaagagaattttagaccagtatccctgatgaacatctatgcgaaaatcctcaataaaatactggcacaccgaatccagcagcacatcaaaaagcttatccactatgatcaagtcggcctcatccctgggatgcaaggctggttcaatacaggcaaatcaataaatataatccatcacataaacagagccaatgacaaaaaccacatgattatcttaatagatgcagaaaaggcctttgacaaaatccaacagctcttcatgctaaaaactcttaataaactaggtattgatggaacgtatctcaaaataataagagctatttatgacaaactcacagccaatatcatagtgaatgggcaaaaactggaagcattccctttgaaaaccggcacaagacagggatgccctctctcaccactcctatttaacacagtgttggaagttctggccagagcaatcagacaggagacagaaataaaggatattcaattaggaaaagaggaagtcaaattgtccctgtttgcagatgacatgattatacatttagaaaaccccatcgtcccaacccaaaatctccttaagctgataaacaacttaagcaaagtctcaggacccaccggcctgaatctggaggacagcagtccgcgtgacaacagcgactcggagatcagcacccgtcgggaaagccgcgtacccgttgaagctggcgtcacgcccaaaggaacaaacgccagagcgtgtgtcctgggcaaaggcggcccgccgctccggtccccgggcagcagcggccggcgtcaggccgcaaggcgaggggcggggacaggactctacccggcagcccagcgccgagcgcccgcgccactccggccttgcgccattccggccccacgacggccggcggcggcagcgcggctgggctcagcggctcgcagcccgggcgccccccctgccggccgctcgctagctcagcctcacccgcagtcttgtccgctggctcgctcgcccgcctacaggtcgacagggcccaacgacccggcgagcaacttcacggaaggcactggccgacaacgctccgctgccgccgcgccccgcccctttgtgacaccacctaccaatcgctggacggcgctttcgctgccctccaatcagcgcgggcgggggcaggcctggcccccggacgtgggcggttgccggggcgccagggccctggggccttcttggcattcgctggaggttcgtgtatatgatgaagaagtggaggagccagtactcaaggctgaggcagaaaaaacagagcaggagaagacacgagagcagaaagaagtagatctcattcctaaagtccaggaggctgtgaactatggcttacaagtattggacagtgcctttgagcaacttgatatcaaagcaggaaactcagactccgaggaagatgatgctaatgggcgggtggaactgatccttgaaccaaaggatctatacattgatcgtcctttaccatatctcattgggtcaaagctgttcatggaacaagaagatgtaggtcttggagagctgtccagtgaagaaggctctgtaggcagtgatcgtggcagtattgtggacactgaggaagagaaagaagaggagagtgacctcttcacggaagcctcccaggatcggcaagctggagcctctgttaaggagggagacacggatgtgtttggtgctgcctccgttccatcactgaaggagccacagaagcctgagcagcccactccaaggaaaagcccctatggtccccctcccactggcctctttgatgatgatgatggtgatgatgatgacgactttttctcggcaccccacagcaaaccttctaaaacacgcaaagtccaatccactgccgatatctttggtgacgaagaaggagatctgttcaaagaaaaagccgtagcatcgccagaagccactgtgagtcagacagatgaaaataaagcaagagcagaaaaaaagcatgtagtcagggaagccggtcctcttacatactggctcagggctgtaggggagagtcctcagagagagcccgatggaggccatgtcgccttctgtgttccagccttggaagtcaacggtggtccttttccttcatttgttggtcaagatggtcacaatggcccatccaggtttatggggagaggccataggctccccttcttgatggtgggagtgtaa

SEQ ID NO: 9621 - DNA, 688 bp, Homo sapiens
  SIMILAR (35)..(604): 311254mologous to Arabidopsis thaliana putative protein,accession number AL138641,Smith-Waterman Score=148.
acccaccggcctgaatctggaggacagcagtccgcgtgacaacagcgactcggagatcagcacccgtcgggaaagccgcgtacccgttgaagctggcgtcacgcccaaaggaacaaacgccagagcgtgtgtcctgggcaaaggcggcccgccgctccggtccccgggcagcagcggccggcgtcaggccgcaaggcgaggggcggggacaggactctacccggcagcccagcgccgagcgcccgcgccactccggccttgcgccattccggccccacgacggccggcggcggcagcgcggctgggctcagcggctcgcagcccgggcgccccccctgccggccgctcgctagctcagcctcacccgcagtcttgtccgctggctcgctcgcccgcctacaggtcgacagggcccaacgacccggcgagcaacttcacggaaggcactggccgacaacgctccgctgccgccgcgccccgcccctttgtgacaccacctaccaatcgctggacggcgctttcgctgccctccaatcagcgcgggcgggggcaggcctggcccccggacgtgggcggttgccggggcgccagggccctggggccttcttggcattcgctggaggttcgtgtatatgatgaagaagtggaggagccagtactcaaggctgaggcagaaaaaacagagcag

SEQ ID NO: 9622 - DNA, 1008 bp, Homo sapiens
  SIMILAR (829)..(984): 641254mologous to Homo sapiens poly(ADP-ribose) glycohydrolase,accession number AF005043,Smith-Waterman Score=163.
atggccagaccagcgctcggcagctcctccaaccgcatgggcggcctcgtagtcgccgtctgcgaggcgccgtccgagtgccgaatcgatggtcccccgcgaaccgctgtgataccgcccctctgccgcgaccagcgccgcgacgcctgcgatctcacctgcacgcgccttgggcgccggggcaccttgccctctgttccggcgacgcagtgggcctttcgggcgcaccagcgcgatacggcctccttcctccgcgggcaaggcggttctttttcccccccacgggcggcccgtttggccacaactttaatttcaatccaacaggatttgttttcttctcaaagtgcgagtaacttaaaaggtgcatctctgctgcctggcaagctccccacgtcggtttccctgtttgatgatgaagatgaagaggataatctttttgggggtacagctgctaagaagcagacattgtctctacaagctcagagagaagagaaagcaaaagcctccgagctctccaaaaagaaagcatctgccctgttgttcagcagtgatgaggaggaccagtggaatattcctgcttcacagacccacttagcatctgacagcaggtctaaaggagaacccagggattctgggaccctccagagccaggaggccaaggctgtgaaaaagaccagtctctttgaggaagacaaagaagatgatctttttgccattgccaaggacagccaaaagaagacccagagagtgtcactcctctttgaagacgatgttgatagcggaggctctctgtttggctctcctcccacatctgttcctcctgcaacaaaggtacttgaagaaacagaagctcaacatttatatcagtccatcttgcctgatatggtgaaaattgcactctgtctgccaaatatttgcacccaggtcctaaacattcatataaaggcttccaatgtgattagcatcgatgcttctgagtttgcatggaaactagatggtcagagataa

SEQ ID NO: 9623 - DNA, 607 bp, Homo sapiens
  SIMILAR (520)..(359): 321254mologous to Helicobacter pylori 26695 histidine and glutamine-rich protein,accession number AE000643,Smith-Waterman Score=93.
atggggtatcgccatgttggcgcggctggtcttgaactcctgacctcaggcaaagtccaatccactgctgatatctttggtgatgaagaaggagatctgttcaaagaaaaagccgtagcatcgccagaagccacgctggtccctcctctttctacagtttgtctcatcatgtcatgtcctggctgtgaaaccctgactttctcctgccgaccccctaaggcccagcattcagaacctgataatgctgatggctgtgctgtcatcaaggaatattgtcgaacacaagctgtattgttgactgaaacgcacagtagatacctgaaggggaagggaagtagctcagtggccttggacttttttgtgtttgagcgacctggagacacggatgtgtttggtgctgcctccgttccatcactgaaggagccacagaagcctgagcagcccactccaaggaaaagcccctatggtccccctcccactggcctctttgatgatgatgatggtgatgatgatgacgactttttctcggcaccccacagcaaaccttctaaaacacgcaaagtccaatccactgtcatattttgttaataaaattttattggaacac

SEQ ID NO: 9624 - DNA, 2766 bp, Homo sapiens
  SIMILAR (304)..(1071): 871254mologous to Homo sapiens ubiquitin-like fusion protein,accession number AF311324,Smith-Waterman Score=1109.
atggccacagctccatcaccccccaagctgactctggctcctgcctggctctgcccggccaccacaacccctcgggaccattcagaggcatcactggaggcgcttcctggggatccacccgctcatcctgcagccgccgcaactgcagccgccgtcatcccggccctggagcccccacacacccctgtgtatgcaatatttgttaaccattcccttttggatctatacattgatcgtcctttaccatatctcattgggtcaaagctgttcatggaacaagaagatgtaggtcttggagagctgtccagtgaagaaggaaatgctgatgaacagagcagcggcttagaaggtgcgtgcaaagtgaatctggagttgctactcactaatgctgacaaagggttgaaagctccagagcagcatctcaagcatgttgcaggagtgctgaatggggaatcagtagagacttcagttcttaactaccgggaattaagtcctcacaagaatagactcttgtcacctcttcgctgttctgcaccaatgtcgctacataattctctggtgaaaccagagagacagtccaaatgttttgagtttgggaagctacagccttcttcttctcagtcactggatgttcaaaacataactgattcttctttctctaggactacttgctttcaaggtgttaaagttgattcacttgggaaaagatctgatgttatttccaaagttgaggctcgggatatcacagaaatgactaacaaggcttccaaagagcctgttggttgtgtaaataatatcagttttcttgcctcactggccgggagcacaagcagaaatagattacagagcacacgtggggcaggcaggcttcagaactctggaactgggctgtctacaaacctccagcattttcaggaagaaaactttaggaaaagttctccccagttagaacatacaggagtttttttggcctcctgcaagagacggcagaccgtccaggacttgaaagctagtgttttagaaagagtcgccatttgtcttcaccacggggctgaaagggtccgcgaaccccgacgcgtacttccaccccgtggactgttgatagctatggtccaacagatgattgaattaaaggtaactcttataagggctcagaaagaaaagaggagagccagagagaaagcctccatattcttacagaatacatatatcatcatcaacagaatgttcgtgggcatgatggactttaaaggcccgtctggtgaagtcttaggtagaaatgcagaacaggtttccaccgtgcacattacgaagaacagaaatggaggtgggagtttaaataactattcctcctccattccatcgactcccagcaccagccaggaggaccctcagttcagtgttcctcccactgccaacacacccacccccgtttgcaagcggtccatgcgctggtccaacctgtttacatctgagaaagggagtgacccagacaaagagaggaaagccccggagaatcatgctgacaccatcgggagcggcagagccatccccattaaacagggcatgctcttaaagcgaagtgggaaatggctgaagacatggaaaaagaaatacgtcaccctgtgttccaatggcgtgctcacctattattcaagcttaggtgattatatgaagaatattcataaaaaagagattgaccttcagacatctaccatcaaagtcccaggaaagtggccatccctagccacatcggcctgcgcacccatctccagctctaaaagcaatgacctatccaaggacatggacaccgggctgggtgactccatatgcttcagccccagtatctccagcaccaccggccccaagctcaacccgcccccctctcctcatgccaataaaaagaaacacctaaagaagaaaagcaccaacaactttatgattgtgtctgccactggccaaacgtggcactttgaagccacgacatatgaggagcgggatgcctgggtccaagccatccagagccagatcctggccagcctgcagtcatgcgagagcagtaaaagcaagtcccagctgaccagccagagcgaggccatggccctgcagtcgatccaaaacatgcgtgggaacgcccactgtgtggactgtgagacccagaatcctaagtgggccagtttgaacttgggagtcctcatgtgtattgaatgctcaggtatccaccgcagtcttggcacccgcctttcccgtgtgcgatctctggagctggatgactggccagttgagctcaggaaggttatgtcatctattggcaatgacctagccaacagcatctgggaagggagcagccagggacagacaaaaccctcagaaaagtccacgagggaagaaaaggaacggtggatcctttccaaatatgaggagaagctctttctggccccactaccctgcactgatctgtccctgggccagcagctgctgcgggccaccgctgatgaggacctgcagacagccatcctgctgctggcacatggctcccgtgaggaggtgaacgagacctgtggggagggagacggctgcacggcgctccatctggcctgccgcaaggggaatgtggtcctggcgcagctcctgatctggtacggggtggacgtcatggcccgagatgcccacgggaacacagcgctgacctacgcccggcaggcctccagccaggagtgcatcaacgtgcttctgcagtacggctgccccgacgagtgcgtgtag

SEQ ID NO: 9625 - DNA, 2256 bp, Homo sapiens
  SIMILAR (8)..(970): 671254mologous to Homo sapiens unnamed protein product,accession number AK001686,Smith-Waterman Score=1003.
  misc_feature (1)...(2256): n = a,t,c or g
gaattcggatgaagagctgcttttcagccacaagctccaaaaggacaatgacccagatgttgacctttttgctggcaccaaaaaaaccaagctgttagagccaagtgttgggagcctgtttggggatgatgaagatgatgatcttttcagctctgccaagtcccagcctttggtacaagagaaaaagagagtagtgaaaaaagaccactctgttgactctttcaaaaaccagaaacatcctgaatccattcaaggtagtaaagaaaaaggcatatggaagccggaaacacctcaggactcatcaggtctcgctccatttaaaaccaaacgaaccatccactcggatcgggaagatacaagcaaatttagcgatcaacccagcggccttgctgcccacaagcggcttcccagatctcttgaagtaaagcctgttttgccaagaattggctttttccttcatctgaacacagaaggagccacggtctgggaaagtgtgcctgtccttcccgggagtggggaggccggtgtgagttttgatcttccagctcaggcagacaccttacacagtgcaaacaagagccgtgtcaagatgagagggaagcgtagaccgcagacccgtgcagctaggcggctggctgctcaggagtccagcgaggctgaggacatgagcgtccccagaggacccattgcacagtgggctgatggcgccatttccccaaatggccatcgnaccacagctcagagcagccagtggagaagacagcactgaggaggccctggcagctgccgctgcaccttgggaaggtgggcctgtgcctggagtggacacaagcccctttgcaaagtctctgggtcattccagaggggaggctgacctttatgactctggggacattttttcacgggcacctggatctcagccgtggagagaccaaacccacggcagagaagcagagatctgccaccaccagggtggaagcaaagaccaagatcaggcaagcagccacggaaaagaccctcgccctaacaaccgaaacaccctctcccgaaagggcgtacttccagcccgtggtgaagagtccaagagtggttacagcctgcgatgggcacgggagcccccgcagcagccagaaactcacactgttgtctccacaaatgagaaaccagaacaatggctgaaaggagagaactgggggtctgtctccactcctttacaggcatctcccggtcacgaacgtggtgcatgtggaggtcctcaccaacttcaacagtcacctcagcaggctgcacagcagcagccatgggcgctcctgccatcctgtccccagctactgcctcatagatctcagattcagagggacacaccgacccctgttgctggtcaaactcgaggctgacgcttctccatctcaactccttcagtaaaatctgtaaaatgacattgtttctgagggttaaatgagcatagcacagtgtcaggcacacactacttgccagatgtcgagtattcatctttattgaaataggactgtggtaagccactttatggctctcgattttgtatgagaaaatcatgcttagtgccttgttagtaaaagaaagaaaacctgaaagtccaggtctagtattttcttcaatgtcctcaatatcttcctcctccttctcagagtcagcaaaaaggtcacagccatcatcatcctcttcctcatcactcatttgtgtggtgtgcgtggcttctggcgatgctacggctttttctttgaacagatctccttcttcatcaccaaagatatcagcagtggattggactttgccttcattcactgtcatcttcaccgagacctgcatgcattctgcatccgtttgcactctttctagattaactaggctatcgttttccctcgtgctttggcttccatccttactttctacacctaacattcccaaaaacttatctactgataccttactgttaaccagaagcctcatgggtaacacaaacagttgattaacctgtaaaggagtggagacagacccccagttctctcctttcagccattgttctggtttctcatttgtggagacaacagtgtgagtttctggctgctgcgggggctcccgtgcccatcgcaggctgtaaccactcagctctagttcagtcttcagtgctggttcacgtctcactgctcttctgaaactgctattgccgtggtcactgacaatctccataatttcaaatccattggatgcctccat

SEQ ID NO: 9626 - DNA, 4689 bp, Homo sapiens
  SIMILAR (2886)..(3557): 941254mologous to Homo sapiens KIAA0592 protein,accession number AB011164,Smith-Waterman Score=1096.
gtcacgccccgggcagcttggctggggctaggcttccggggctctgcggtcctcggcctgtgctggcagcctcggagcccaccgagccgggcggctgggatgatgaaccggacgacccccgaccaggagctggtgccggcgtcggagcccgtgtgggagcggccgtggtcggtggaggagatccgcaggagcagccagagctggtcgctggcggccgacgcgggcctactacagtttctacaggaattctcacagcaaactatctctaggacccatgaaatcaagaaacaagtggacggactaatccgggaaaccaaagccacagattgtcgcctgcataatgtcttcaatgacttccttatgctctctaatacccagttcatagagaatcgtgtatatgatgaagaagtggaggagccagtactcaaggctgaggcagaaaaaacagagcaggagaagacacgagagcagaaagaagtagatctcattcctaaagtccaggaggctgtgaactatggcttacaagtattggacagtgcctttgagcaacttgatatcaaagcaggaaactcagactccgaggaagatgatgctaatgggcgggtggaactgatccttgaaccaaaggatctatacattgatcgtcctttaccatatctcattgggtcaaagctgttcatggaacaagaagatgtaggtcttggagagctgtccagtgaagaaggctctgtaggcagtgatcgtggcagtattgtggacactgaggaagagaaagaagaggaggagtcagatgaagattttgcccatcacagtgacaatgaacaaaaccagcacaccacacaaatgagtgatgaggaagaggatgatgatggctgtgacctttttgctgactctgagaaggaggaggaagatattgaggacattgaagaaaatactagacctaaaagaagcagacctacatcgtttgcagatgagctggctgcccgcatcaagggggatgccatgggtcgagtggacgaggagccgacaaccttaccctcaggagaagcaaaacctcggaagacactcaaagagaagaaggaaaggagaactccttcagacgatgaagaggataacttattcgcaccccccaagctgaccgacgaggacttctcgccatttggctctggaggtggcctgttcagtggcggcaaggggctatttgatgatgaggacgaggagagtgacctcttcacggaagcctcccaggatcggcaagctggagcctctgttaaggaggagtcttcatcatccaaacctggaaagaaaatcccagcaggagctgtttctgtatttttaggagacacggatgtgtttggtgctgcctccgttccatcactgaaggagccacagaagcctgagcagcccactccaaggaaaagcccctatggtccccctcccactggcctctttgatgatgatgatggtgatgatgatgacgactttttctcggcaccccacagcaaaccttctaaaacacgcaaagtccaatccactgccgatatctttggtgacgaagaaggagatctgttcaaagaaaaagccgtagcatcgccagaagccactgtgagtcagacagatgaaaataaagcaagagcagaaaaaaaggttaccttatcttccagcaagaatctcaagccctcatcagaaacaaagactcaaaaaggcttattttcagatgaggaggactctgaggatttgttttcttctcaaagtgcgagtaacttaaaaggtgcatctctgctgcctggcaagctccccacgtcggtttccctgtttgatgatgaagacgatggaggatcctctttttgtgggctcggctgctaagaagcagacattgtgtctacaagctcagagagaagagaaagcaaaagcctccgagctctccaaaaagaaagcatctgccctgttgttcagcagtgatgaggaggaccagtggaatattcctgcttcacagacccacttagcatctgacagcaggtctaaaggagaacccagggattctgggaccctccagagccaggaggccaaggctgtgaaaaagaccagtctctttgaggaagacgaagaagatgatctttttgccattgccaaggacagccaaaagaagacccagagagtgtcactcctctttgaagacgatgttgatagccgaggctctctgtttggctctcctcccacatctgttcctcctgcaacaaagaaaaaagagactgtctctgaggcaccacctttgctgttcagcgatgaagaagagaaggaggcacaacttggagtgaagtctgtggataagaaggttgagagtgccaaggagtcattaaaatttgggagaactgatgtggctgagtcagaaaaggaaggacttttgactagatctgctcaggaaacagtcaagcattctgatttattttcttcatcatccccatgggacaaaggaaccaagcctaagaaccaaaactgttcttagcttgtttgatgaggaagaggataaaattggaagattcaaaaccattatcccaggctccacagaaaagaagtaggaaagggctgcgattcctgatgcccaccccaagagcacaggtgtcttccaggatgaagagctgcttttcagccacaagctccaaaaggacaatgacccagatgttgacctttttgcgtggcaccaaaaaaaccaagctgttagagccaatagtcgggagcctgtttggggatgatgaagatgatgatcttttcagctctgccaagtcccagcctttggtacaagagaaaaagagagtagtgaaaaaagaccactctgttgactctttcaaaaaccagaaacatcctgaatccattcaaggtagtaaagaaaaagggcatatgggaagccagaaacacctcaggcaaatttagcgatcaacccagcggccttgctgcccacagcggcttcccagatctctgaagtaaagcctgttttgccagaattggcttttccttcatctgaacacagaaggagccacggtctggaaagtgtgcctgtccttcccgggagtggggaggccggtgtgagttttgatcttccagctcaggcagacaccttacacagtgcaaacaagagccgtgtcaagatgagagggaagcgtagaccgcagacccgtgcagctaggcggctggctgctcaggagtccagcgagactgaggacatgagcgtccccagaggacccattgcacagtgggctgatggcgccatttccccaaatggccatcggccacagctcagagcagccagtggagaagacagcactgaggaggccctggcagctgccgctgcaccttgggaaggtggtcctgtgcctggagtggacagaagcccctttgcaaagtctctgggtcattccagaggggaggctgacctttttgattctggggacatcttttccacgggcactggatctcagtctgtggagagaacaaaacccaaggcaaagatagcagagaatcctgccaacccaccagtgggtggtcaaagcaaagagccccatgtttcctgctctaggcgaggccagcagtgatgatgatctctttcagtctgctaaaccaaaaccagcaaagaaaacaaatccctttcctctcctggaagatgaggatgacctctttacagatcagaaagtcaagaagaatgagacaaaatccagtagtcagcacggatgtcatattaacaacacaacgatatttttgagggatgatatatttgctacggaagcaattaaaccctctcagaaaaccagagagaaggagaaaacattgggaatctaatttatttgatgataccttggataccttggctgaacttacctgtaaaaccaaaagaaaagtcccgaaaaagaaagtggaagccaagtctatatttgatgatgatatggatgacatccttcctccctctgggtatccaggctaagacaacccaaaccaaaaagccgatctgcacaggccgcacctggaaccaagatttggaacacaaggtgtcccaacatctttgatgatcccctgaatgcctttggaggccagtagagcacacagggtatcccacaggttaccctgcagcctacattgttgagttagtgatgatgttgtatatgctccatggtcttaactggattacaaaaagcaaatacttagaaccagctagctcatctttttaccccaatgtacttgggtatttttcctgcactggtttaatcatgctttaatactaccaaaaccaaaaattaatattttccccagtggttggtttggttttgtttttaaacccacagtttgatttaggttagccttgctggggccataatatgcttcaggggtgtggtaaaagaagaaatctctttgtggctttccatgggcaggggaatctcagagatagccaattgccacctgaccagaagtcttttgttatatggatgggaaccctaaccttttagggcttgggcaggggaaagagaaagaagatgagagattatacttcatgagtcttagcaatatgggagcaggttttcactgaattctgagggtgcctctgcatgtcctccaaggcaaagtttggcaaactgtggccccccccactgtcatattttgttaataaaattttattggaacacaatcacaaaaaaaaaa

SEQ ID NO: 9627 - DNA, 5976 bp, Homo sapiens; identical to SEQ ID NO: 5415
  SIMILAR (1957)..(5781): 971254mologous to Homo sapiens putative p150,accession number U93563,Smith-Waterman Score=6519.
  misc_feature (1)...(5976): n = a,t,c or g

SEQ ID NO: 9628 - DNA, 3657 bp, Homo sapiens; identical to SEQ ID NO: 6045
  SIMILAR (163)..(1932): 951254mologous to Homo sapiens putative p150,accession number U93563,Smith-Waterman Score=2945.

SEQ ID NO: 9629 - DNA, 5130 bp, Homo sapiens; identical to SEQ ID NO: 2332
  SIMILAR (2614)..(4473): 941254mologous to Homo sapiens putative p150,accession number U93572,Smith-Waterman Score=3044.

SEQ ID NO: 9630 - DNA, 3666 bp, Homo sapiens; identical to SEQ ID NO: 2174
  SIMILAR (736)..(3006): 961254mologous to Homo sapiens putative p150,accession number U93563,Smith-Waterman Score=3773.

SEQ ID NO: 9631 - DNA, 3213 bp, Homo sapiens; identical to SEQ ID NO: 2322
  SIMILAR (1)..(1821): 851254mologous to Homo sapiens putative p150,accession number U93563,Smith-Waterman Score=2589.

SEQ ID NO: 9632 - DNA, 3492 bp, Homo sapiens; identical to SEQ ID NO: 6050
  SIMILAR (1039)..(2673): 941254mologous to Homo sapiens putative p150,accession number U93570,Smith-Waterman Score=2688.

SEQ ID NO: 9633 - DNA, 3235 bp, Homo sapiens; identical to SEQ ID NO: 2323
  SIMILAR (442)..(2988): 931254mologous to Homo sapiens putative p150,accession number U93563,Smith-Waterman Score=4078.

SEQ ID NO: 9634 - DNA, 3300 bp, Homo sapiens; identical to SEQ ID NO: 3975
  SIMILAR (277)..(2088): 971254mologous to Homo sapiens putative p150,accession number U93563,Smith-Waterman Score=3088.

SEQ ID NO: 9635 - DNA, 4989 bp, Homo sapiens; identical to SEQ ID NO: 6054
  SIMILAR (85)..(2142): 971254mologous to Homo sapiens putative p150,accession number U93563,Smith-Waterman Score=3485.

SEQ ID NO: 9636 - DNA, 3420 bp, Homo sapiens; identical to SEQ ID NO: 6055
  SIMILAR (712)..(2940): 971254mologous to Homo sapiens putative p150,accession number U93568,Smith-Waterman Score=3707.
  misc_feature (1)...(3420): n = a,t,c or g

SEQ ID NO: 9637 - DNA, 3579 bp, Homo sapiens; identical to SEQ ID NO: 6056
  SIMILAR (3488)..(3577): 961254mologous to Homo sapiens putative p150,accession number U93563,Smith-Waterman Score=152.

SEQ ID NO: 9638 - DNA, 4374 bp, Homo sapiens; identical to SEQ ID NO: 2325
  SIMILAR (1)..(3291): 991254mologous to Homo sapiens unknown,accession number AF148856,Smith-Waterman Score=5719.

SEQ ID NO: 9639 - DNA, 4830 bp, Homo sapiens; identical to SEQ ID NO: 6058
  SIMILAR (2647)..(4827): 1001254mologous to Homo sapiens ha0946 protein is Kruppel- related,accession number D31763,Smith-Waterman Score=4096.

SEQ ID NO: 9640 - DNA, 4452 bp, Homo sapiens; identical to SEQ ID NO: 6059
  SIMILAR (2224)..(4446): 931254mologous to Homo sapiens putative p150,accession number U93567,Smith-Waterman Score=3560.

SEQ ID NO: 9641 - DNA, 3693 bp, Homo sapiens; identical to SEQ ID NO: 3978
  SIMILAR (937)..(1800): 941254mologous to Homo sapiens unknown,accession number AF149422,Smith-Waterman Score=1402.

SEQ ID NO: 9642 - DNA, 3300 bp, Homo sapiens; identical to SEQ ID NO: 3981
  SIMILAR (1627)..(3297): 971254mologous to Homo sapiens putative p150,accession number U93563,Smith-Waterman Score=2950.

SEQ ID NO: 9643 - DNA, 3357 bp, Homo sapiens; identical to SEQ ID NO: 6062
  SIMILAR (1)..(1755): 911254mologous to Homo sapiens putative p150,accession number U93563,Smith-Waterman Score=2724.

SEQ ID NO: 9644 - DNA, 3316 bp, Homo sapiens; identical to SEQ ID NO: 6063
  SIMILAR (1458)..(3314): 941254mologous to Homo sapiens putative p150,accession number U93572,Smith-Waterman Score=3039.

SEQ ID NO: 9645 - DNA, 3457 bp, Homo sapiens; identical to SEQ ID NO: 6064
  SIMILAR (3290)..(3457): 941254mologous to Homo sapiens ORF2 contains a reverse transcriptase domain.; ORF2,accession number M80341,Smith-Waterman Score=279.

SEQ ID NO: 9646 - DNA, 4797 bp, Homo sapiens; identical to SEQ ID NO: 6066
  SIMILAR (1)..(3093): 991254mologous to Homo sapiens unknown,accession number AF148856,Smith-Waterman Score=5349.

SEQ ID NO: 9647 - DNA, 3384 bp, Homo sapiens; identical to SEQ ID NO: 6067
  SIMILAR (1)..(3129): 981254mologous to Homo sapiens unknown,accession number AF148856,Smith-Waterman Score=5357.

SEQ ID NO: 9648 - DNA, 3348 bp, Homo sapiens; identical to SEQ ID NO: 6068
  SIMILAR (1)..(3093): 981254mologous to Homo sapiens unknown,accession number AF149422,Smith-Waterman Score=5291.

SEQ ID NO: 9649 - DNA, 3783 bp, Homo sapiens; identical to SEQ ID NO: 6069
  SIMILAR (1)..(3156): 951254mologous to Homo sapiens putative p150,accession number U93565,Smith-Waterman Score=5296.

SEQ ID NO: 9650 - DNA, 3723 bp, Homo sapiens; identical to SEQ ID NO: 6070
  SIMILAR (1)..(3003): 971254mologous to Homo sapiens unknown,accession number AF149422,Smith-Waterman Score=5062.

SEQ ID NO: 9651 - DNA, 3897 bp, Homo sapiens; identical to SEQ ID NO: 6071
  SIMILAR (1)..(2748): 971254mologous to Homo sapiens unknown,accession number AF149422,Smith-Waterman Score=4641.

SEQ ID NO: 9652 - DNA, 3726 bp, Homo sapiens; identical to SEQ ID NO: 6072
  SIMILAR (1)..(3249): 981254mologous to Homo sapiens unknown,accession number AF148856,Smith-Waterman Score=5590.

SEQ ID NO: 9653 - DNA, 3783 bp, Homo sapiens; identical to SEQ ID NO: 6073
  SIMILAR (1)..(3045): 981254mologous to Homo sapiens unknown,accession number AF148856,Smith-Waterman Score=5206.

SEQ ID NO: 9654 - DNA, 3855 bp, Homo sapiens; identical to SEQ ID NO: 6074
  SIMILAR (1105)..(3684): 951254mologous to Homo sapiens putative p150,accession number U93563,Smith-Waterman Score=4225.

SEQ ID NO: 9655 - DNA, 3348 bp, Homo sapiens; identical to SEQ ID NO: 6075
  SIMILAR (1)..(2973): 951254mologous to Homo sapiens putative p150,accession number U93563,Smith-Waterman Score=4940.

SEQ ID NO: 9656 - DNA, 6136 bp, Homo sapiens; identical to SEQ ID NO: 6076
  SIMILAR (1016)..(3940): 971254mologous to Homo sapiens putative p150,accession number U93563,Smith-Waterman Score=4937.

SEQ ID NO: 9657 - DNA, 3924 bp, Homo sapiens; identical to SEQ ID NO: 6077
  SIMILAR (712)..(3510): 981254mologous to Homo sapiens putative p150,accession number U93563,Smith-Waterman Score=4809.

SEQ ID NO: 9658 - DNA, 7383 bp, Homo sapiens
  SIMILAR (1)..(3411): 611254mologous to Mus musculus reverse transcriptase,accession number D84391,Smith-Waterman Score=3766.
atgacaggatcaaattcacacataacaatattaactttaaatataaatggactaaattctgcaattaaaagacacagactggcaagttggataaagagtcaagacccatcagtgtgctgtattcaggaaacccatctcatgtgcagagacacacataggctcaaaataaaaggatggaggaagatctaccaagcaaatggaaaacaaaaaaaggcaggggttgcaatcctagtctctgataaaacagactttaaaccaacaaagatcaaaagagacaaagaaggccattacataatggtaaagggatcaattcaacaagaggagctaactatcctaaatatttatgcacccaatacaggagcacccagattcataaagcaagtcctgagtgacctacaaagagacttagactcccacacattaataatgggagactttaacaccccactgtcaatattagacagatcaacgagacagaaagtcaacaaggatacccaggaattgaactcagctctgcaccaagcagacctaatagacatctacagaactctccaccccaaatcaacagaatatacatttttttcagcaccacaccacacctattccaaaatcgaccacatagttggaagtaaagctctcctcagcaaatgtaaaagaacagaaattataacaaactatctctcagaccacagtgcaatcaaactagaactcaggattaagaatctcactcaaagccgctcaactacatggaaactgaacaacctgctcctgaatgactactgggtacataacgaaatgaaggcagaaataaagatgttctttgaaaccaacgagaacaaagacaccacataccagaatctctgggacgcattcaaagcagtgtgtagagggaaatttatagcactaaatgcctacaagagaaagcaggaaagatccaaaattgacaccctaacatcacaattaaaagaactagaaaagcaagagcaaacacattcaaaagctagcagaaggcaagaaataactaaaatcagagcagaactgaaggaaatagagacacaaaaaacccttcaaaaaatcaatgaatccaggagctggttttttgaaaggatcaacaaaattgatagaccgctagcaagactaataaagaaaaaaagagagaagaatcaaatagacacaataaaaaatgataaaggggatatcaccaccgatcccacagaaatacaaactaccatcagagaatactacaaacacctctacgcaaataaactagaaaatctagaagaaatggatacattcctcgacacatacactctcccaagactaaaacaggaagaagttgaatctctgaatggaccaataacaggctctgaaattgtggcaataatcaatagtttaccaaccaaaaagagtccaggaccagatggattcacagccgaattctaccagaggtacaaggaggaactggtaccattccttctgaaactattccaatcaatagaaaaagagggaatcctccctaactcattttatgaggccagcatcattctgataccaaagccgggcagagacacaaccaaaaaagagaattttagaccaatatccttgatgaacattgatgcaaaaatcctcaataaaatactggcaaaccgaatccagcagcacatcaaaaagcttatccaccatgatcaagtgggcttcatccctgggatgcaaggctggttcaatatacgcaaatcaataaatgtaatccagcatataaacagagccaaagacaaaaaccacatgattatctcaatagatgcagaaaaagcctttgacaaaattcaacaacccttcatgctaaaaactctcaataaattaggtattgatgggacgtatttcaaaataataagagctatctatgacaaacccacagccaatatcatactgaatgggcaaaaactggaagcattccctttgaaaactggcacaagacagggatgccctctctcaccgctcctattcaacatagtgttggaagttctggccagggcaatcaggcaggagaaggaaataaagggtattcaattaggaaaagaggaagtcaaattgtccctgtttgcagacgacatgattgtttatctagaaaaccccattgtctcagcccaaaatctccttaagctgataagcaacttcagcaaagtctcaggatacaaaatcaatgtacaaaaatcacaagcattcttatacaccaacaacagacaaacagagagccaaatcatgggtgaactcccattcacaattgcttcaaagaggataaaatacctaggaatccaacttacaagggatgtgaaggacctcttcaaggagaactacaaaccactgctcaaggaaataaaagaggacacaaacaaatggaagaacattccatgctcatgggtaggaagaatcaatatcgtgaaaatggccatactgcccaaggtaatttacagattcaatgccatccccatcaagctaccaatgactttcttcacagaattggaaaaaactactttaaagttcatatggaaccaaaaaagagcccgcattgccaagtcaatcctaagccaaaagaacaaagcaagaataaagctggaggcatcactattcaaactatactacaaggctacagtaaccgaaacagcatggtactggtaccaaaacagagatatagatcaatggaacagaacagagccctcagaaataatgccgcatatctacaactatctgatctttgacaaacctgagaaaaacaagcaatggggaaaggattccctatttaataaatggtgctgggaaaactggctagccatatgtagaaagctgaaactggatcccttccttacaccttatacaaaaatcaattcaagatggattaaagacttaaatgttagacctaaagccataaaagtcctagaagaaaacctaggcaataccattcaggacataggcatgggcaaggacttcatgactaaaacaccaaaagcaatggcaacaaaagccaaaattgacaaatgggatataattaacctaaagagcttctgcacagcagaagaaactaccatcagagtgaacaggcaacctacagaatgggagaaaaattttgcaatctacccatctgacaaaggactaatatccagattctacaaagaactcaaacaaatttacaagaaaaaaacaaacaaccccatcaaaaagtgggcgaaagacatgaacagacacttctcaaaagaagacatttatgcagccaaaaaacacatgaaaaaatgctcatcatcactggccatcagagaaatgcaaatcaaaaccacaatgagataccatctcacaccagttagaatggcaatcatgaaaaaagtcaggaaacaacaggtgctggagaggatatggagaaataggaacacttttacactgttggtgggactgtaaactagttcaaccattgtggaagtcagtgtggcgatccctcagggatctggaactagaaataccatttgacccagccatcccattactgggtatacacccaaaggactataaatcatgctgctataaagacacatgtacacagctacgcggcggcggcggagcgcaggcctcgtgccgttacggccatcacggcggccgcagtggcgtcctggagccctcctcaggtagctcttcaacaagcaggcataaacacttctctgatgagggacgcgatggggaaaggctttgttctctgaaaactccctgtaggaactgcctttcttctgagtgtccacttgtgtccggaattggtgggttcttgatctcactgacttcaagaatgaagccgcagaccctcgcggtgagtgttacagttcttaaagatggtgtgtccggagtttgttccttcagatgttcagatgtgtctggagcttcttccttccagtgggttcgtggtcttgctgacttcaggagtaaagctgtgctcacaccacaaatgtaatcaaagggctgatcaactggtttctgagttagttcaactaatttgcatagtatctgcagagcaaccacataacttgttcctccatcttcaattatgaaaattgggattcctctccctttcaacccaggttctgttatcaatataattgcaataataatttctccctgaagagataaacggttgttcttctctgcatttttgtctttgctgatagcctgctcagttttagtaggcttttcctctttttctaagtgtctctttaaatcataatttaacttggggacaagtccaccaatattccacctgttgtttcctgactttttaatgattgccattctaactggtgtgagatgatatctcatagtggttttgatttgcatttctctgatggccagtgatgatgagcatttcttcatgtgttttttggctgcataaatgtcttcttttgagaagtgtctgttcatgtccttcgcccacgttttgatggggttatttgtttttttcttgtaaatttgtttgagttcattgtagattctggatattagccctttgtcagatgagtaggttgcgaaaattttctcccatgttgtaggttgcctgttcactctgatggtagtttcttttgctgtgcagaagctctttagtttaattagatcccatttgtcaattttggcttttgttgccattgcttttggtgttttggacatgaagtccttgcccacgcctatgtcctgaatggtaatgcctaggttttcttctagggtttttatggttttaggtctaacgtttaaatctttaatccatcttgaattgattttggtataaggtgtaaggaagggatccagtttcagctttctacatatggctagccagttttcccagcaccatttgttaaatagggaatcctttccccattgcttgtttttctcaggtttgtcaaagatcagacagttgtagatatgcggcattatttctgagggctctgttctgttccattgatctatatctctgttttggtaccagtaccatgctgttttggttactgtagccttgtagtatagtttgaagtcaggtagtgtgatgcctccagctttgttcttttggcttaggattgacttggcgatgcgggctctattttggttccatatgaactttaaagtagttttttccaattctgtgaagaaagtcattggtagcttgatggggatggcattgaatctgtaaattaccttgggcagtatggccattttcacgatattgattcttcctacccgtgagcatggaatgttcttccatttgtttgtgtcctcttttatttccttgagcagtggtttgtagttctccttgaagaggtccttcacatcccttgtaaattggattcctaggtattttattctctttgaagcaattgtgaatgggagttcactcatgatttggctctctgtttgtctgttgttggtgtataagaatgcttgtgatttttgtacattgattttgtatcctgagactttgctgaagttgcttatcagcttaaggagattttgggctgagacgatggggttttctagataaacaatcatgtcgtctgcaaacagggacaatttgacttcctcttttcctaattgaataccctttatttccttctcctgcctgattgccctggccagaacttccaacactatgttgaataggagtggtgagagagggcatccctgtcttgtgccagttttgaaagggaatgcttccagtttttgcccattcagtatgatattggctgtgggtttgtcatagatagctcttattattttgaaatacgtcccatcaatacctaatttattgagagtttttagcatgaagcgttgttgaattttgtcaaaggctttttctgcatctattgagataatcatgtggtttttgtctttggctctgtttatatgctggattacatttattgatttgcgtatattgaaccagccttgcatcccagggatgaagcccacttgatcatggtggataagcttttggatgtgctgctggattcggtttgccagtattttattgaggatttttgcatcaatgtttatcaaggatattggtctaaaattctcttttttggttgtgtctctgcccggctttggtatcagaatgatgctggcttcataaaatgagttagggaggattccctctttttctattgattggaatagtttcagaaggaatggtaccaattcctccttgtacctctggtagaattcggctgtgaatccttctggtcctggactctttttggttggtaagctattggttattgccacaatttcagagcctgttattggtctattcagagattcaacttcttcctggtttagtcttgggagagtgtatgtgtcgaggaatgtatccatttcttctagattttctagtttatttgtgtagaggtgtttgtagtattctctgatggtagtttgtatttctgtgggatcggtggtgatatcccctttatcattttttattgtgtctatttgattcttctctctttttttctttattagtctggctagcggtctatcaattttgttgatcctttcaaaaaaccagctactggattcattgattttttgaagggttttttgtgtctctatttccttcagttctgctctcattttagttatttcttgccttctgctaggttttgaatgtctttgctcttgcttttctagttcttttaattgtgatgttagggtgtcaattttggatctttcctcctttctcttgtaggcatttagtgctataaatttccctctacacactgctttgaatgcgtcccagagattctggtatgtggtgtctttgttctcgttggtttcaaagaacatctttatttctgtcttcatttcgttatgtacccagtagtcattcaggagcaggttgttcagtttccatgtagttgagcggctttgagtgagattcttaatcctgagttctagtttgattgcactgtggtctgagagatagtttgttataatttctattcttttacatttgctgaggagagctttacttccaagtatgtggtcaattttggaataggtgtggtgtggtgctgaaaaaaatgtatattctgttgatttggggtggagagttctgtagatgtctattaggtctgcttggtgcagagctgagttcaattcctgggtatccttgttgactttctgtctcgttgatctgtctaatgttgacagtggggtgttaaagtctcccattattaatgtgtgggagtctaagtctctttgtaggtcactcaggacttgctttatgaatctgggtgctcctgtattgggtgcataaatatttaggatagttagctcctcttgttgaattgatccctttaccat

SEQ ID NO: 9659 - DNA, 817 bp, Homo sapiens
  SIMILAR (64)..(582): 791254mologous to Homo sapiens ribosomal protein S6,accession number J03537,Smith-Waterman Score=665.
atggtgctggcatctactcagcttctggtgagggcctcatggagcttttactcatggcagaagagttttggccgtgatccttatgaaggaccaagaagaactggaaaaagaaagcaaaaatctgcacgtggttgcattgtggatgccaatctgagcattctcaacttggttattgtaaaaaaaggagagaaggatattcctggactgactgatactatggtgccttgtcatctcgggcccaaaagagctagcagaatctgcaaacttttcagtctctctgaagatgatgatgtccaccagtgtgttgtaagaaaggctttaaacaaagaaggtaagaaacctaggaccaaagcacccacgactaagtatcttgttactccacatgttctgcagcacgaatggtggcatattgctctgaagaaacagagaattaaggaaaataaggaagtagctgcagaatatgctaaacttttggccaagagaatgaaggaggctaaagagaagcatcaagaacagattgccaagagacgcagactttcctctctgcgagcttctacttctaagtctgaatccagtcagaaataagattttttgagtaacaaataaataagatcagactctgagaaaaaacataaaacaaaaaaaaaatggggggggcggcttttagaggatccagtttttccccggggggggggggaagttttttttttttatggggggccccaaaaaaaaatagggggggggggtttttaacggcgggggggggggaaacccggggggtcccccaattaaagcgggggggagcaaaggaggctcc

SEQ ID NO: 9660 - DNA, 687 bp, Homo sapiens; identical to SEQ ID NO: 8694
  SIMILAR (345)..(509): 551254mologous to Bovine leukemia virus gag,accession number K02120,Smith-Waterman Score=195.

SEQ ID NO: 9661 - DNA, 1335 bp, Homo sapiens
  SIMILAR (619)..(1332): 711254mologous to Homo sapiens p40,accession number U93569,Smith-Waterman Score=818.
atgggcctgaaaggccagggagtggaaggggggcttctgaggcaatcaggcagtgtcagtcttcagccgctaagccgagaagatctgggaaggagtcagtcagagagccttgggccagagttccaggggctctgggagtggctgccagtggaaagagtggaacgagaaaacctttcagactattgtgttctgggccagcgtccaatgcatttaccaaatatgaaccagctggcatccctggggaaaaccaacgaacagtctcctcacagccaaattcaccacagtactccaatccgaaaccaagtgcccgcattacagcccatcatgagccctggtcttctttctccccagcttagtccacaacttgtaaggcaacaaatagccatggcccatctgataaaccaacagattgccgttagccggctcctggctcaccagcatcctcaagccatcaaccagcagttcctgaaccatccacccatccccagagcagttaagccagagccaaccaactcttccgtggaagtctctccagatatctaccagcaagtcagagatgagctgaagagggccagtgtgtcccaagctgtctttgcaagagtggcattcaaccgcacacaggaatctaaaaacctggaaaaaagattagacgaacagctaactagaataaacagtgtagagaggaccttaaatgacctgatggagctgaaaaccatggcacgagaactacgtgatgcacgcacaagcttcagtagccaattcaatcaagtggaagaaagggtatcagtgattgaagatcaaattaacgaaataaatgacagggagaatggaaccaagctggaaaacactcttcagaatattaaccaggagaacttccccaacctagcaaagcaggccaacattcaaattcaggaaatacagagaacaccacaaagatactcctcaagaagagccaccccaagacacataattgtcagattcaccaaggttgaaatgaaggaaaaaatgctaagggcagccagagagaaaggtcgggttaccaacaaagggaagcccatcagactaacagctgatctcttggcagaaactctacaagccagaagaaagtgggggccaatattcaacattcttaaagaaaagaattttcaatccagaatttcatatccagccaaattaagcttcataagtgaaggagaaataaaatcctttacagacaagcaaatgctgagagattttgtcaccaccaagcctgccttacaagagctcctgaaggaagcactaaacttggaaaggaacaactggtaccagccactgaaaaaacatgccaaattgtaa

SEQ ID NO: 9662 - DNA, 354 bp, Homo sapiens
  SIMILAR (36)..(194): 531254mologous to Human T-cell lymphotropic virus type 1 Gag,accession number S74562,Smith-Waterman Score=185.
  misc_feature (1)...(354): n = a,t,c or g
acttcanaacacntaagccacagtggccaggcattccttcaggacctcctcccccaggatcttgcttcaagtgctagaaatctggccactgggccaaggaatgcctgcagcccaggattcctcctaagccgtgtcccatctgtgcaggaccccactggaaatcggactgttcaactcacctggcagccactcccagagcccctggaactctggcccaaggctctctgactgactccttcccagatcttctcggcttagcggctgaaggctgatgctgcccgatcgcctcggaagccccgtagaccatcacggatgccgagctttaggtaactcttacagtggagggtaagtccg

SEQ ID NO: 9663 - DNA, 534 bp, Homo sapiens
  SIMILAR (289)..(489): 471254mologous to Human T-cell lymphotropic virus type 1 Gag,accession number S74562,Smith-Waterman Score=188.
aaaagccacagttcatggacttggtggtatcggaggtgccaagggctggaagccaaagttcagtttcctcttaagcagcaagttcttttgcgtaagtccaacctgctgacttgctccgtcctcttcacacggacacgtgtaacatttggtgccaaagacctgggacagaaggactccttcgggagaccggtcccctgtcttcgccctcactccgtgaggagatccacctatgacctcaggtcctcagaccagcccaaggaacatctcactgatttcaaatcgggatcttgcttcaagtgccggaaatctggccactggaccaaggaatgccagcagcccaggattcctcctaagccatgtcccatctgtgcaggtccccactggaaatcggactgtccatcttgcccagcagccactcccagagcccctggaactctggcccaagactctctgactgactccttccccaccgatcccaaaggctctctgattgactacttcccagatcttctctgcttagtggctgaagactga

SEQ ID NO: 9664 - DNA, 570 bp, Homo sapiens
  SIMILAR (72)..(92): 1001254mologous to Homo sapiens phosphoglycerate mutase 2,accession number J04173,Smith-Waterman Score=41.
atggccgcctacaaactggtgctgatccagcatggagagtgcatggaacctggagatccacttcagcagctgatgccattgatcagatgtggcccacctgtaatgaggacttggcgcctcaatgagcggcactatgggggtctgaccgatctcggtaaagcagaaactgctgcaaagcatggtgaggcccaggtgaagatctggagcaacatcagtaaggatcgtaggtatgcagacctcacagatgatcagctatcctcctgtgagagtctgaaggacactattgccagcgctctgcccttttggaataaagaaatagttccccagatcaaggaagggaaatgggtactgattgcagcccatggcaacagcctccggggcattgtcaagcatctggaaggtctctctgaagaggctatcatggagctgaacctgctgactggtattcccattgtctgtaaattggacaagagctcgaagcccatcaggtgcatggagttcctgggggatgaagggaccctgtgtaaagccatggaagctgtggctgcccagggcaaggccaagaagtga

SEQ ID NO: 9665 - DNA, 1715 bp, Homo sapiens
  SIMILAR (32)..(262): 831254mologous to Homo sapiens phosphoglycerate mutase 2,accession number J04173,Smith-Waterman Score=320.
gggcggggtgccgcatccccagcccgccgccatggccgcctacaaactggtgctgatccggcacggcgagagcgcatggaacctggagaaccgcttcagcggctggtacgacgccgacctgagcccggcgggccacgaggaggcgaagcgcggcgggcaggcgctacgagatgctggctatgagtttgacatctgcttcacctcagtgcatttatatagcgatccggaccctctggacagtgctagaaatgccattgatcagaaatgtggctgccagtggtgaggacttggcgcctcaatgagcggcactatgggggtctaaccggtctcaataaagcagaaactgctgcaaagaatggtgaggcccaggtgaagatctggaggcgctcctatgatgtcccaccacctccgatggagcccgaccatcctttctacagcaacatcagtaaggatcgcaggtatgcagacctcacagaagatcagctaccctcctgtgatagactgaaggatactattgccacagctctgcccttctggaatgaagaaatagttccccagatcaaggaggggaaacgtgtactgattgcagcccatggcaacagcctccggggcattgtcaagcatctggagggtctctctgaagaggctatcatggagcttgaacctgccgactggtattcccattgtctatgaattggacaagaacttgaagcctatcaagcccatgcagtttctgggggatgaagagacggtgcgcaaagccatggaagctgtggctgcccagggcaaggccaagaagtgaaggccggcggggaggatactgtccccaggagcaccctccctgcccgtcttgtccctctgcccctcccacctgcacatgtcacactgaccacatctgtagacatcttgagttgtagctgcagacggggaccagtggctcccattttcattttagccattttgtcgcctgcacccactcccttcatacaatctagtcagaatagcagttctagagcacaggttctcagtctaagctatggaaaagctccccttatccaacagagtttaaaagtagtgacttgggtttttgcgagtgctttgtttactaaggactttggggaggaaccatgctaagccatgaccagtgaggagaagcaacagagcctgtctgtccccatgagcggagtctgtcctctgctcttctgcagtcaggtcactgcctactgcctgggggctctagtcattccagtggaagacgaatgtaacctgcgtggtgatgtgacaactgtttcctccctgaccccagaggatctggctctaggttgggatcaatcctgaatttcgttatgtgttaatttacttttattaaaaaagtatagtatatataatacaaaacaataacccttctggggtttcttgtggcggttgaaatagtcccacatgtggtcatcagaaatagcattcctcataccaatataggatcagctccttgacctctgaggggtcaggagtgcttcctggtgtgtgtattagaatcccttcctgccttgtttcatggcagtgaaatgcctcttggtcctgtccagtgtatctttcactgatttctgaatcatgttctagttgcttgaccctgccacatgggtccagtgttcatctgagcataactgtactaaatcctttttccatatcagtataataaaggagtgatgtgcaat

SEQ ID NO: 9666 - DNA, 576 bp, Homo sapiens
  SIMILAR (9)..(68): 951254mologous to Campylobacter jejuni 3'-aminoglycoside phosphotransferase,accession number M18643,Smith-Waterman Score= 103.
atgttgcgcctgttgtacaagtatggaaagaaatgcataagcttttgccattctcaccggattcagtcagtcactcatggtgatatctcaattgatagcggtatttttgatcaggataaattaataggtcgtatagatgttggacgtgtcggaatcgcatgtggatgtcaggatgttgccatcgtatggaactatctcgctgcgtgctccgttgatcgcaatacctgcaggataatgcgccctaattgccgacctgaggtggaggagacccctggtctgaaggaagagaaggaactctcccaacccaaagagggggaggccacagacctgaagaaagaggtggagaaaatctcctcatccgaggaagaggagactgtgaacctgaaggaagaggtggagaaaatccccccacctgaggaggagactatggacctgaaggaagagaaggaggagatccccccacctgagctgagggaccagaagttaatgcacgtgctcaaagacttagagcctgtgagtgctgtaccccataaggacagtctgtttcatggacagctgacaacagtacccgtgtaa

SEQ ID NO: 9667 - DNA, 1234 bp, Homo sapiens
  SIMILAR (2)..(286): 1001254mologous to Homo sapiens similar to mouse Ehm2,accession number AB032179,Smith-Waterman Score=508.
gaccctctactgccgcgtcttcctgctcgacgggaccgaagtgagcgtggacctgccgaaacatgccaaaggccaggatttgtttgatcagattgtgtaccacttggaccttgtggaaacagattactttggcctccagttcctcgactctgcccaggttgcgcactggctggatcatgccaaacccataaaaaagcagatgaaaattggacctgcttatgctttacactttcgagttaaatactattcttcagaaccaaacaaccttcgtgaggagtttacaaggcctaaaattaccaaaatggattttaaaaagagcaaattgacactcgtggtggtcgaggatgatgatcagggacgtgagcaagagcacacgtttgtgttccggttagacagtgccaggacctgcaaacacctttggaagtgtgcagttgagcaccacgcgttcttccgactgcggacgccaggaaacagcaaatccaatagatccgactttatcaggctgggctctcgcttcagattcagctgctttagtggagggaaaatgcccacagcacaggaaatagtcctgcccttcgagagaggccaggggatgggagcgtgtccagagaagggcgatgggttgatgaagggtggccacagcgcccgggaggaaggggccagaacgctctctgttctgttccatgaggaggattatgctgcaagcaacccagtgatagcagcccagctctggaatgggactagtgcctttatgaaagacattgaagccagcagccttgcctctgctgctgcgagaggatgcagcaacagggtgccatccacaagtacctcaccagtcactgaatctactggctctgtgatcttggatatccaggccccagaacctcccatgttacagatgccagttcctgcacctaaagtgcagcaaaacaactatgccagagctctggccaccaagagtcaactttcaacatccccagagaagcaagaagagatggcagagtctcagaggggcaaagaggctcgctggatgtcgctcataagcgctggggggctacgtgcaggaagctacacttgttacacccttgttactgctcatttgccacgcacacagcttggcacattggagacgcccaataactgtggtctggactggactgaggtgccacagcacggtcacactgagggtgttattgtgttccagacaatttcagaacacaagcatcctaactag

SEQ ID NO: 9668 - DNA, 561 bp, Homo sapiens
  SIMILAR (1)..(312): 881254mologous to Homo sapiens CGI-113 protein,accession number AF151871,Smith-Waterman Score=465.
atgtcaaagttcggccgggccacccggggcctcaggaagcccgaggtcggcgatgtgatccggaccatcgtgcgggcaggcctggccatgcccgggcccccactaggcccagtgctgggtcagagaagggcttccatcaaccaattttgcaaggagttcaatgagaggacaaaggacatcaaggaaggcattcctctgcttaccaagatttttctgaagcctgacgggacatttgaaatcaagattggacaacccactgtttcctacttcgtgaaggcagcagctgggattgaaaagggggcccggccaacagcctcagttcagaagagtttgcagctttccagaaggaacaagccatcttcctggctgctcagaagaaggcagatttggccacccaggaggaagctgccaagaagtgaccctttcccccaactcctagatttcaaaggaggcagctgggaaggggccagttgcaaaggctgtgcccaaggggaggaaggaggtcacaccaatatgatgatggttttcgtgactttgaatgatatatttttgtacatctag

SEQ ID NO: 9669 - DNA, 890 bp, Homo sapiens
  SIMILAR (115)..(222): 1001254mologous to Homo sapiens CGI-113 protein,accession number AF151871,Smith-Waterman Score=180.
aaagtattcgatgtcactagtacagcgcggaggaattcctggcccagatggtggcgcccagagcttcgctcttgctgctcccctgaggtgaactgaagccagctgccccgcatcatgtcaaagctcggccgggccgcccggggcctcaggaagcccgaggtcggcggtgtgatccgggcgatcgtgcgggcaggcctggccatgcccgggcccccactaggcatacgtgctgggtcagagaggcgtttccatcaaccagttttgcaaggagttcaatgagaggacaaaggacatcaaggaatggcattcctctgcctaccaagattttaagtgaagcctgacaaggacatttgaaattaagattggacagcccactgtttcctacttcctgaaggcagcagctgggattgaaaaggggggcccggcaaacagggaaagaggtggcaggcctggtgaccttgaagcatgtgtatgagattgcccgcatcaaagcttcaggattgagggcatttgccctgcaggatgtacccctgtcgtctgtttgtccgctccatcatcgggtctgcccgttctctgggcacttcgcgtggtgaaaggacctcaagttcagaagagcttgcagctttccagaaggaacgagccatcttccttggctgctcagaaaggaggcagattttggcttgcccaagaaagaagctgccaaagaaattgaccctttgccccaccaactcccagattttcaaaaggaagtaagtttgcaaaagctgtgcccaaggggaggaaggaggtcacaccaatatgatgatggttttcatgactttgaatgatatatttttgtacatctagctgtatcgaggcatcaggcctgaataaacatcctttcttaccca

SEQ ID NO: 9670 - DNA, 447 bp, Homo sapiens
  SIMILAR (363)..(407): 731254mologous to Arabidopsis thaliana F24O1.6,accession number AC003113,Smith-Waterman Score=68.
ggtcacagtgagtgaaggaacatggctctgaatcatgcctgtctgtgtccccaggtctgtgcttaaaaccacgaagttcaagatggaaactgaagggaagagtgtcaaggggatgggagagaggacttgtccatgactttggcagcataaggaaaaaataccccagggacaagtggcgactttggaaactccattcctctgcaaaatgacatcacgaggagagtggtggggcctgcggatgaaaagatctggcttctcctcccaactctgctatgaggaagcgctggatggccctgtcggccgcggtcatcgccgcctcggcccgggagctcagcattgcagccgcacccggagccttgaaaccgtctcctccgctaccgccgccgccgccgccgccgccggaccgagggatacgacggttcccgagacagcggaacctgcggccgc

SEQ ID NO: 9671 - DNA, 2033 bp, Homo sapiens
  SIMILAR (1417)..(1527): 451254mologous to Homo sapiens MSTP039,accession number AF113219,Smith-Waterman Score=91.
agcggccgcaggttccgctgtctcgggaaccgtcgtatccctcggtccggcggcggcggcggcggtagcggaggagacggtttcaggcctccggtgcggctgcaatgctgagctcccgggccgaggcggcgatgaccgcggccgacagggccatccagcgcttcctgcggaccggggcggccgtcagatataaagtcatgaagaactggggagttataggtggaattgctgctgctcttgcagcaggaatatatgttatttggggtcccattacagaaagaaagaagcgtagaaaagggcttgtgcctggccttgttaatttagggaacacctgcttcatgaactccctgctacaaggcctgtctgcctgtcctgctttcatcaggtggctggaagagttcacctcccagtactccagggatcagaaggagcccccctcacaccagtatttatccttaacactcttgcaccttctgaaagccttgtcctgccaagaagttactgatgatgaggtcttagatgcaagctgcttgttggatgtcttaagaatgtacagatggcagatctcatcatttgaagaacagccacacttccaagatggccttgtccagcttcgtgtaggcgttgtctgccgccactatccagagaaatgggaggcggcatcttggacctcccaaaactgtggggccgacgatgctcacgaattattccatgtcattacctcgtcattggaagatgagcgagaccgccagcctcgggtcacacatttgtttgatgtgcattccctggagggtcacccattgaccctggaccactgccttcaccacttcatctcagtcagaatcagtgcgggatgttgtgtgtgacaactgtacaaagattgaagccaagggaacgttgaacggggaaaaggtggaacaccagaggaccacttttgttaaacagttaaaactagggaagctccctcagtgtctctgcatccacctacagcggctgagcatggtccagccacggcacgcctctgaagcggcatgagcacgtgcagttcaatgagttcctgatgatggacatttacaagtaccacctccttggacataaacctagtcaacacaaccctaaactgaacaagaacccagggcctacactggagctgcaggatgggccgggagcccccacaccagttctgaatcagccaggggcccccaaaacacagatttttatgaatggcgcctgctccccatctttattgccaacgctgtcagcgccgatgcccttccctctcccagttgttcccgactacagctcctccacatacctcttccggctgatgggcagttgtcgtccaccatgggagacatggcactctgggacactttgttcatttaccgacggtccccaccttctgccaggaaccctctctcaactagcaatcagtggctgtgggtctccgatgacactgtccgcaaggccagcctgcaggaggtcctgtcctccagcgcctacctgctgttctacgagcgcgtcctttccaggatgcagcaccagagccaggagtgcaaagtctgaaagaatgactgtgcccctccctgcaaaggctaagagctgatggcactgtctgcactgcccccaggaaaaaagtaaaactgtactgttgcgtgtgcaagcggccccactagagccttccagtcttctgtgtgtgttctaagagcaggctccaccctgggagccagccccagttcacaccaaaccaggctccctgaacagtcctgttcatgtgtgtaggtggttctgttgtgttaagaaagcattcattatgtccggagtgtctttttactcatctgatacaggtaattaaaagaactcagattcttgaagccaccgttttcatattgtaatgttaggtgttctcagaggggaggtacctttgtctaatcaacgtttccacttagatcttttatttttaataagcaggcccataaaaattgttgacaagaattaatgaaattattaaaggcaacaatttagaagaaaaa

SEQ ID NO: 9672 - DNA, 1394 bp, Homo sapiens
  SIMILAR (184)..(303): 621254mologous to Homo sapiens truncated mevalonate kinase,accession number AF217536,Smith-Waterman Score=110.
ccactccaactccagccacgtcatataggggcccagatacagcttgggccactgctccagagagtgcaagccataagacttggcagcttccacatggtgttaagcctgtgggaatgcagagtgcaagagttgagattttggagcctccacctagacttcagaggatgtatggaaaagcctggaggatctcactctgtccacaaggcttaagtacagtgatgcgatcagagctcactgcatcctcaacccctcaggttcaagaaatcctcccacctcagtctcctgagtacctgggaccaaaggggattactgagaggatccacaagataatgcacgtgaaagggcttgcgaaattgcccgcaaaccggaaccagccctcgccgggggtttctgggaaaaggcttgtgaactgcgtttctgcgtctgccgtggacagcgaacctgctgcggttcctgaaccggatgtttgcgccggaattgtgataaagaagcagtgctttccggtgatagctaggtgcaataaaaccaaacaagtagattccatacctcatcgtgcatatgcaaagcctagcccattctttcctgcagtagttgtagtaactagtgaatcaaaggatccccgagttaagcaaaatccaactcatccactcctagctgaaggttctaatgctgctcatttccataaaacaaagatttcccagagcctgaagtggcttcctgttggctacttaaacagcacaacatatgaatatcgtgacttgaccaaaggcttgagtcttctttgctccctcctgctaggtgtggaagcagatatcccctccatggctggactccacgtacggcatctcatgcaggtgccacagcagccctgcatagcatttgctgtatcatccccattgcaccagggagggaaggaaacagaggatgcctggtcttttcatataccatccacgatacaccgatggcccacctctccttctgtccagctttcaagcctaagggccagcacacagctcctgtgtttgcacatcaaccttgcaaagtgcttcatctggggaattcttgcacaggttctgtcttgtcatcatcaccgcattacgcagtttgtgggcatgttgacttttgtgtgcgctggtgattccagcaagctttcccctgatatacgaacactggtcagacgtctgacttcatatctggtgtctgcatcagtgcttctaaaaagcaagcagatggctctttgctctgcttccaggatcctggatgtctcagtctccccaggtgatcatgtggcctcagaagccagagctagatgtgctcctgatcttgtagcccctcgtcctatgcctcatcaaaaccaggggtcattggaatggactgaagaaggagaaaactag

SEQ ID NO: 9673 - DNA, 1734 bp, Homo sapiens
  SIMILAR (214)..(261): 681254mologous to Homo sapiens Human secreted protein, SEQ ID NO: 4790,accession number G00709,Smith-Waterman Score=56.
ttaatcttttaaaaggccctgataggtctggcctcttccatagttctcttgcctcatcttgcatgatgctttcccttgtctcatcttgcatgatgctttcccttgttctctgtgttctgtaactggatctctggtcctcagtcgagttcctctacgaggaacacaccagaaatctgccatcgccacctccacaaaaattgctctcagcaatatgaaatcctcaaacatcatactgatgcttactttaagaagcagcagctgtttttcgatgtttcgaagaagtaaagtagggctgcttggtgacatttcaaaatcttgttccggtacaggatcttgacactcctggggaacctgaggattccctagaatgtttagtgaagctgcttggtctgcaaattgcatttgttttttcaaaatatcttttggaagctgacattcttctaggaccactatccccctggtccagaggggagcccactgtcctgaagggagagactcaggactggcagcattcaccaaaagctgactgaagaagccttgggcctttagtaaacattggccgtagacaggcagtacttgctgtggccctggggcagtggtggccatgggaagggactgctctacaactgtctgatcttcaacaaacactgccacattttttctaagggtatattcatccaaatcgtcatcagagctgctatcagttgcatcggaatccaaaccctcttcaacatgagacaacagccctgtagcagaaaatgcaaatctttggatttccgcagctgtacaccgtgcaaagccattttttgcatcatcccacaatttattctctgcagtcaatgtgttaacttctggcttaatttcagtgcatttaggtaaactattacccaaaattgtggtaggttcatgaaatgtcttcattttggggagttgatgtttcatagacaatttcatctgctgaccatagtgcttaacaacatgctttgccaggagcatctgcaaatgtttctgagttcttctagcctggctaagtaaaattttctgtttgcttacacaatgaagtaaacgagcatgtacttcctcctctttttcagcagctgaagaactaacaggcacatttgagtggccaggtacaattttcttttgagtacagtgcaataaaccctttttaatctcagcatcagtaactttatccaaaagtgcattctcttgataccatttacagttttgtagttgtactttatctacattagtgtctttggttatatttgaatccagaataatttgtacatctttcatgcactggctcgtggtatctgatagaggctcctttttgatgaactcttcagaatgagaaagacagattttactgagctgaatgttgctgccattatacagtatgtttttcagcttattgcaactgggctcccctaatttcttttgtttataattctcattgtgtttatttaatgtagaattagatctcattaaaaaaacagtctggtaatgttttgaagactgaggggagccaaaatgttttaaattcacaaaattagtattaagagtaggttcaggagttggaaatccaagcatctgagaaaaggtgtctccctttagcttttcatctacagttctgggactttccatgtagagcatcttgtcagactccatggtacttggcaaagatgaaaagctgataccctttgctgttgcctccctcagagctggggtcat

SEQ ID NO: 9674 - DNA, 601 bp, Homo sapiens
  SIMILAR (306)..(374): 561254mologous to Mus musculus thioether S- methyltransferase,accession number M88694,Smith-Waterman Score=65.
atgagcagcaagggcaaaggcccagtggtggcggggagccgcccgtgtgtcgaggacagtgaaaagggtgctgtgcgaggggtggagtgtcccctgaagagtgcctgtcctgatgtggacatgtactgggcagccctgcagaggctggccagcctgctgaaagcagatgggaacctggtcaccatggctgccctgcactcccactatatggtaggctccaagaagttctttgggctccacccagagaaggagacggtggagaaggccatgcaggaggctggctgccaggtgcagaggtgtgccccatcagctgctctgagacatgctccatcaacgacggcatctgctttgtggctgcctgcaagggccccagtgtctgaggccagcctggcagaagagggcctgaccgagaggggaagtcatgaccagagcatctacagtcttgccccacagctccccctaaaagcagtgcagcccaagagagaagcctcgagtgaagactcacaggtgctggctgtgggaagttcagccagcatgctgagggaatgggaagaggcagcaagagcatctgcaacagacatgaaatgtcctgttggctggg

SEQ ID NO: 9675 - DNA, 864 bp, Homo sapiens
  SIMILAR (60)..(188): 561254mologous to Plasmodium lophurae histidine-rich protein,accession number M15317,Smith-Waterman Score=183.
atgcaggcacagcactcagcactgtgtgagtcacatggtcatagtcagtacaaggaagccaccagcattatagtcactatcatcaccacaaccacccccatcaccatcatcaaagtccatatctgcaccatcatcactatgactgtcatctccatcaccaccatcacaatgatcattaccaccgtcatatctcggtatatgacatctaatagaagattttgcagaattcttggatggtatcatctcaaccttttgacaacaatctgctcacccatgaaaaaagatgccagtattcttcaagtactacgagatattccaattgtcacaacttatagggggctgctacctgctactggcatctgttggctagaggtccgggatgctgctaaacatcctataatgcaaagaacacaggggcagggagagacaactctccaaccaaaatgtgacagacgtattccagggaagaaccccgatcgacttcataaaattgatggcaaatcattaggaaggctctcaggaggaaggcaggatttgagcagacaggagaagagtgcagtaggaggtcaaggtaacatacctgaagacatggatattgaagacaattgcaggcccaaacagaatgttcaaaggagaatcgatcacagaacaaggaatattaatgaatttaagggtgtagttccagaccttactggttgccttctgaaatatacatggcacatgggctccaacagggccagtactagtccatggcctgttaggatctgggccgcacagcaggagtccacggaaaaactgtcttccacaaaaccagtccctggtgtcgaaaaggttggggaccgctgggctataataactttctaa

SEQ ID NO: 9676 - DNA, 3434 bp, Homo sapiens
  SIMILAR (46)..(1317): 461254mologous to Homo sapiens zinc finger protein,accession number L11672,Smith-Waterman Score=987.
atgaaggagttctcatcaacagcacaaggcaatacagaagtgatccacacagggacattgcaaagacatgaacgtcatcacattggagatttttgcttccaggaaatggagaaagatattcatgattttgagtttcagtggaaagaagatgaaagaaatagccatgaagcacccatgacagaaatcaaacagttgacgggtagtacaaaccgacatgatcaaaggcatgctggaaacaagcctattaaagatcagcttggatcaagctttcattcgcatctgcctgaactccacatgtttcagaccgaagggaaaattggtaatcaagttgagaagtctatcaacagtgcttcgttggtttcaacatcccaaagaatttcttgtaggcctaaaacccacatttctaagaactatgggaataatttcctgaattcttcattactcacacaaaagcaggaagtacacatgagagaaaaatctttccaatgtaatgagagtggcaaagcctttaattatagctcagtcttaaggaaacatcagataatccatttaggagcgaaacaatataaatgtgatgtgtgtggcaaggtctttaatcaaaagcgatatcttgcatgtcatcgtagatgtcacactggcaagaaaccttacaagtgtaatgattgtggcaagaccttcagtcaggagttaacccttacatgccatcatagacttcatactggagagaaacattacaagtgcagtgagtgtggcaagaccttcagtcgaaattcagcccttgtaattcataaggcaattcatactggagagaaatcttacaagtgtaatgaatgtggcaagaccttcagtcaaacgtcataccttgtgtaccatcgtagacttcatactggagagaaaccttacaaatgtgaagaatgtgacaaagctttcagtttcaaatcaaaccttgaaagacataggaaaattcatactggagagaaaccttacaagtgtaatgaatgcagcaggacctttagtcggaagtcatcccttacacgccatcgtagacttcatactggagagaaaccttataagtgtaatgattgtggcaagaccttcagtcagatgtcatcccttgtataccatcgtagacttcatactggagagaaaccttacaaatgtgaagaatgtgatgaagctttcagtttcaaatcgaaccttgaaagacataggagaattcatactggagagaaaccttacaagtgtaatgattgtgagcaaagcctttacttcacattcacacctcattagacatcagagaatccatactggacagaaatcttacaaatgtgaagaatgtgatgaagctttcagtttcaaatcaaaccttgaaagacataggataattcatactggagagaaactttacaagtgtaatgaatgtggcaagacctttagtcggaagtcatcccttacacgccattgtagacttcatactggagagaaaccttaccagtgtaatgagtgtggcaaagcctttcgtgggcagtcagcacttatttaccatcaagcaatccatggtatagggaaactttacaaatgtaatgattgtcaccaagtctttagtaatgctacaaccattgcaaatcattggagaatccataatgaagagagatcgtacaagtgtaatagatgtggcaaatttttcagacatcgttcataccttgcagttcattggcgaactcatagtggagagaaaccttacaaatgtgaagaatgtgatgaagctttcagtttcaaatcaaaccttcaaagacataggagaattcatactggagagaaaccttacaggtgtaatgaatgtggcaagacctttagtcggaagtcataccttacatgccatcgtagacttcatactggagagaaaccttacaagtgtaatgagtgtggcaagaccttcggtcgaaattcagcccttataattcacaaggcaattcatactggagagaaaccttacaagtgtaatgagtgtggcaaggccttcagtcagaagtcatcccttacatgccatcttagacttcatactggagagaaaccttacaaatgtgaagaatgtgacaaagttttcagtcgcaaatcaagccttgaaaaacacaggagaattcatacttggaagagaaaccatacaaatgtaaggtttgtgacaaagcttttgggcgtgattcacacctgggcacaacatactagaattcacactggagagaaaccttacaagtgtaatgaatgtggcaagaacttccgtcacaattcagcccttgtaattcataaggcaattcatagtggagagaaaccttacaagtgtaatgagtgtggcaagaccttccgtcacaattcagcccttgaaattcataaggcaattcatactggagaaaaaccttacaagtgtagtgaatgtggcaaggtttttaatagaaaagcaaacctttcacgtcatcatagacttcatactggagagaaaccttacaagtgtaataaatgtggtaaggtttttaatcaacaagcacaccttgcatgtcatcatagaattcatactggagagaaaccttacaagtgtaatgagtgtggcaaaaccttccgtcacaattcagtccttgtaattcataagacaattcatactggagagaaaccttacaagtgtaatgaatgtggcaaggtttttaatcgaaaagcaaaacttgcacgtcatcatagaattcatactggaaagaaacattacaagtgtaatgagtgtggcaagacctactctcacaattcagtccttgtaattcataagacaattcacactggggagaaaccttacaagtgtaatgagtgtggcaaaaccttccatcacaattcagtccttgtaattcataaaacaattcatactggagagaaacaagctaatgctacaaccattgtaaatcactggagaagccataatgaagagagatcttacaaatgtaataattgtggcaaatttttcagacatcgttcatacattgccgttcattggcgaactcatgctggagagaaatcttacaatgtcatgattgtggcaaggtcttcagtcaagcttcatcttttgcaaaacaggagaattcatacaggagagaaacctcacaagtgtgatgatcgtggcaaagcctttacttcacattctcacctcattagacatcagagaatccatactggacagaaatcttacaaatgtcatcagtgtggcaaggtcttcagtccgacttcactccttgcagaatatcagaaaattcatttttcaggtaattgttcccaatgcaatgaatatagcaaaccatcaagcattgattgacattagagtcagttcagcattgacttgagtttgagttgacttaacattgagttcaagccttaaatgacattaaagtgcctatgtt

SEQ ID NO: 9677 - DNA, 1668 bp, Homo sapiens
  SIMILAR (172)..(681): 541254mologous to Homo sapiens Human immunogenic prostate tumour protein sequence SEQ ID NO:378,accession number Y82017,Smith -Waterman Score=445.
atggcaggggcctgctggctgatggcattccagtactgggttctgaagttgctggtggtgaaatcagcatatggcctcgtcaaagctctctcaaatggaattggaatttcaaaggttgccaagacctggaaacctgggggaaaaaagagactagaaaattttatggctatcgaagaaatgaagaagcacagaagtactcatgtcggattcccagaaaacctgactaatggtgccactgctggcaatggtgatgatggattaattcctccaaggaagagcagaacacctgaaagccagcaatttcctgacactgagaatgaagagtatcacagggatttctccaagctctgtctgggttctgctgccaatggtgttgtccatgtagaagtcaaaatgtgtgtgtataatgggaaaggagagaggcaggaggagaagatgaagggattaatatccatgaaccttgtagttgaagaagaaatgaagaagcatgaaagtaataatgtgggattactagaaaacctgactaatggtgtcactgctggcaatggtgataatggattaattcctcaaaggaagagcagaacacctgaaaatcagcaatttcctgacaacgaaagtgaagagtatcacagcctgggcgacaagagtaagacttcatttcaaaacagcaacaacaacaacaacaaacaacaagaacaacaacaacaaaacccaacattttctaatacaaggaaactcactaagctttataaggcccccatccctccaagtattatcctttccggctgccccaacattaatgacagcaactggcaggaaattgagcatggaatgcagacggcaggcttgccaacaaggcctctttcccacggcctgcagcagaaaggggctgctttccgctgcttgggctgcaaatgctctgagcccttcaccggcagccttattttacagaaggcgaaaactaacacccagaaatggcaagctacttacccaaagtcacagaacgaacaacttgtaccgtcagtgggtaaaagctacaggtgctcaacaccagcccagcccatgaagacagccgtggggcataaaccctgcaaagccacaggtgcagagctgcccaaggccttgggagcccagcccttacatccctgtgccctggatgtgggacaaggtttcaaaaagggtaattttggagctgtaggattgaatggccttctgggtttggagtttcatggggtctcgggggtcttgttagtgggtcctggtgatgggggtctaatcagtgagggtgtggtcagggaagacctgatgtgtggggtctggtcagcaggaacctggtcagtggggactgctgagcgctgcttggagaagccaggtgcattgcacgttatcgagggccctctggacagctgggatggcccagtgatgcccaatggcccggtcaaaagtagacaaagcagttgtttggatggacctgggagatgttgctcagagattctgacaggacaaagccatggtaacaagaagccagccagagccagttcaaaatctagtcaatcgatcaatgaccgaccactggctgtgctcaccaaccaatatcagtgtgagcagcttgcttctgaaagacagccaagcagcaacagctgctccatcagaatagacagtgcctga

SEQ ID NO: 9678 - DNA, 889 bp, Homo sapiens
  SIMILAR (473)..(535): 571254mologous to Homo sapiens cytochrome P-450LTBV,accession number D12621,Smith-Waterman Score=67.
aggagaacagcaagaggtccccagcaaacatccacagatggccttggaacctcaccctgcaggaatgccagtgaacatactgctgacatcttggagctcagtaccctcatagtgtaacggcgtcagtagatctgcctgtgcttggacttcctgtactacccattcctgaggggcgatgcttctgcagggcctgtgacttggtgcacaacttcagacaccatcatcttgcagcagcaccgcaccctcactagccagggtgttgatgacttcctcaaggccaaggccacattcaaggcttcggactttattgatgcgcttgtgctgagcaaggtggcttctccaaggatcttaattcaaggaggtagaatgggagcttgagatcaagtgtctgatcaagcctcagtgtatgggcgctgttcatcctctggtgctgaagcagccaagagacccaagtctgcctggctgcctcttaggatatgacagcagagccagtggcctctactagatcctgtacaacctcacaaaacacccagacatcgggagtgctgccagcctgtgatgcaagagtcctaatcctgaagacattgaatgacctgtcattctgctgtttttaccaaaaaggatcatgaggatcagagaggaaaagtcacttgcccaaagtcacacagctgaacaagtggtggagttcaactttgaccatgggctgtctggccccaaggtgtatgcttgcttctctcccaagagactcctttcttatcaggctcaaatgaatgaaaggagggatgttaaagttcctagaagctttaattgaatgaaagttcctagtagatctggtacctactaaaaaaccacacttctggaagctacgtggcccaccagaagacacagc

SEQ ID NO: 9679 - DNA, 851 bp, Homo sapiens
  SIMILAR (810)..(848): 841254mologous to Mus musculus leukotriene B4 omega- hydroxylase,accession number AB037540,Smith-Waterman Score=58.
atggtcattgttggcctggcagcgggggtcttgttagtgggtcctggtgatgggggtctaatcagtgagggtgtggtcagggaagacctgatgtgtggggtctggtcagcaggaacctggtcagtggggactgctgagcgctgcttggagaagccaggtgcattgcacgttatcgagggccctctggacagctgggatggcccagtgatgcccaatggcccggtcaaaaatcataaaggagaacagcaagaggtccccagcaaacatccacagatggccttggaaatctgcctgtgcttggacttcctgtactacccattcctgaggggcgatgcttctgcagggcctgtgacttggtgcacaacttcagacaccatcatcttgcagcagcaccgcaccctcactagccagggtgttgatgacttcctcaaggccaaggccacattcaaggcttcggactttattgatgcgcttgtgctgagcaaggtggcttctccgggatcttaattcaggaggtagaatggagcttgagatcaagtgtctgatcaaggtacttgaacttgatctggagggctctggggagccatggaagatgctggataaaggagtgacagtcagctatgttttcgagatgactgtaaaagcctgcctggaaggagtgaacaagagccaggagaccagggagggagcttgtggggcaggtctggagatggcgagggagggatcctgcttggatgaaaggtcttcagggactgtctcaagttacacacaggtgtcctcagagctagtgtgttcagggttcttgtctccaggatgaaaatgggaaggagttgtcagacgaggacatataa

SEQ ID NO: 9680 - DNA, 380 bp, Homo sapiens
  SIMILAR (208)..(339): 521254mologous to Arabidopsis thaliana 60S ribosomal protein L7,accession number AC004005,Smith-Waterman Score=127.
aagttcagcagaccttcagttaacatgctgaggattgtgaaaccatgtattacaaggggaacccaaatctgaaatcagtaaataaactcatctacaagcatggccgtggcaaaatcaataagaagcgaattgctttgacagataacactttgattgatcagtctcatggtcaatatggcatcatctgcatcgaggatctgattcatgagctctatactgtggcccttcaagttatcctctccacaaagtggaatgaagaaaaagaccacccattttgtagaaaatggagctgctgccaacagggagggccagatccacaggcttcttataagaatgaactgcggtgtctaccgtgattatttttctaatctggtcagtta

SEQ ID NO: 9681 - DNA, 568 bp, Homo sapiens
  SIMILAR (6)..(275): 981254mologous to Homo sapiens ribosomal protein L7,accession number X57959,Smith-Waterman Score=470.
  misc_feature (1)...(568): n = a,t,c or g
tggaattcggcaaaatcaataagaagcgaattgctttgacagataacgctttgattgctcgatctcttggtaaatacggcatcatctgcatggaggatttgattcatgagatctatactgttggaaaacgcttcaaagaggcaaataacttcctgtggcccttcaaattgtcttctccacgaggtggaatgaagaaaaagaccacccattttgtagaaggtggagatgctggcaacagggaggaccagatcaacaggcttattagaagaatgaactaaggtgtctaccatgattatttttctaagctggttggttaataaacagtacctgctctcaaattgggnnnnnnnnnnnnnnnnnnnnnnnnnnnnnnnnnnnnnnnnnnnnnncccctttnnnnnnnnnnnttttaannnnnnnnnnnnnnnnagnnnnnnnnnnnnnnnnggggcccctaaaataaaatccgggggcgggttttaaaaacnnnnnnnnnnnaaaaacccgggggttacccaaatttaaggggttgggaaaaaccccctttttnnnnnnnnnnaaaaaaaag

SEQ ID NO: 9682 - DNA, 400 bp, Homo sapiens
  SIMILAR (391)..(206): 501254mologous to Arabidopsis thaliana putative protein,accession number AL391141,Smith-Waterman Score=192.
ttttaatgttaaaaatatttattttttttcctaaaagatcacacaaaagtcgggaagagaaggatgtcaattagactacatcaaaatctgggcagagggaggacaaagagctgcctaaagaaactggtagctggagcaaactgcagagatcaagatgaccctagtccacggaaccagcagcccaggtcagccacattcaggccttctcccaatcgctgccattgaattcctcagtgaccatactccgcacagtgccctcatccaggcagtggggggcaattccgaagcctccggggtttgatcgtggagtatagaagctctgaacgccacatctcttacagaaggtatgctgggctttgtgagtattgaacgtgtaagtcgttatgtgctcagctccctt

SEQ ID NO: 9683 - DNA, 1137 bp, Homo sapiens
  SIMILAR (531)..(653): 591254mologous to Arabidopsis thaliana putative protein,accession number AL391141,Smith-Waterman Score=133.
atgcggcgatcgaggagctctgcggccgccaagctgcgcgggcagaagcggtccggggcctccgcggcccccgcggcctccgcggccgctgccttggcacccagcgccacccgcacacggcgctccgctagccaggccgggagcaagagccaggcggtcggagaagccgccgtcggagaagccgcggctgaggcgctcgtcgccgcgggcccaggaggagggcccgggggagccgccgccgcctgagctggcgttgctcccgccaccgccgccgccgccgccgactcccgcgaccccgacgtcctcggcgtccaacctggacctgggcgagcagcgggagcgctgggagacgttccagaagcggcagaagcttacctcgaaagggtgccgccaagctcctgctagacacctttgaataccaagggcctggtgaaagcacacaggaggctgccacttgtggaagcagttcgtttttgaaagttttgggcctcagcagactttgcatatatttgactgcaattgcagcattttgcaagaagaagcagaatagacacttcattgttccagcttctcgcttcaagctcctgaagggagctgagcacataacgacttacacgttcaatactcacaaagcccagcataccttctgtaagagaatgtggcgttcagagcttctatactccacgatcaaaccccggaggcttcggaattgccccccactgcctggatgagggcactgtgcggagtatggtcaactgagggaattccaatggcagcgattgggagaaggcccatgaaagagcacaagaccatcaagaacatgtctaaagagtgagcttctggcctctcctgccctgaaaaggaggaatgattggggccagcaactttgctctccctgccgtgcctcgggtggtgctcctgaatgtggctgacctgggctgctggttccgttgactagggtcatcttgatctctagcagtttgctccagctgaccagtttctttagggcagctctttgtcctccctctggcccagattttgatgtagtctaatttgacatccttctcttcccaacttttgttgttgatctttttagggaaaaaaaataaatattttttaacattaaagcaaaaaaaa

SEQ ID NO: 9684 - DNA, 663 bp, Homo sapiens
  SIMILAR (325)..(579): 891254mologous to Homo sapiens MIP-T3,accession number AF230877,Smith-Waterman Score=378.
atggtgcaagccattggccctcagtgcagacctcaggccaggcgagacaaccgtagcaacagctcacagcaatccatagtcactgggctcacctgctgctgtcagagcggcctccaccccccaattgagggcccctcttatgacagctatggaagaggatccactactaagcctgtgccagggttggatgggccccccggaggctctggagcagcccgcaacaccagccacggagcaggggggaatcggtatcccatgggccagaacatggctgattacattatgagggcaggaggaaggcaacggcagttgcggcctccagcagataaactggccgctgttgctgccgaagtggaggtggagcgatctctctttgagtcggcatggaagaaggagaaggacatcgtttccaaggagatagagaagctccgcacgtccatccagaccctgtgcaagagcgcacttcccctggggaagatcatggactacatccaggaagacgtggatgccatgcagaatgagctgcagatgtggcacagcgagaacaggcagcacgccgaggccctgcagcaggagcagagcagtgtcccgcacgaggaaggagctgtaagtactgatgactggcacactcgggcctcctgccctctggcagctgaaatgtga

SEQ ID NO: 9685 - DNA, 1038 bp, Homo sapiens
  SIMILAR (94)..(840): 951254mologous to Homo sapiens MIP-T3,accession number AF230877,Smith-Waterman Score=1175.
atggtggcctttctttctctcttgaaggtgattagaatgactggtttcatgaagggcctctacacagacgccgagatgaagtctgataatgtgaagctctctagtgacgatgcggtgcggagggttttagctggagagaagggagaagtgaaaggccgggcctcactgacctcaagatctcaggaattggataataagaatgtgcgagaagaagagtccagagttcacaaaaatacagaggtgaattccaagtcgcacatctttgaaaatgaaatagatagaggagacgctgaaataaaagagagaagtacaagcagagatcgaaaacagaaggaagaattgaaagaagaccgcaagccaagagaaaaggacaaggacaaggagaaggccaaggagaatggcggaaacagacacagagaaggggagagagagagagccaaagcccgggccaggccagacaacgagcgacagaaagacagaggcaacagggagcgggacagagactccgagcgcaagaaggagacagagagaaagagtgagggggggaaagagaaggagagactgagagacagggaccgagagcgcgaccgggacaaagggaaggacagggacagacggagagtgaaaaacggggagcactcctgggacctggacagggagaagaacagagagcatgacaaacctgagaaaaagtcagcaagctcaggggagatgtctaaaaagttatcagatggaacttttaaagactccaaggctgaaacagagactgagatttccactagagcttccaagtcattgacaacaaaaacatcaaaacggcgatccaaaaattcagtggaagtgttgttaaggcatgctgattttgatggacgaaaaacaaaaacgttgatgaccagtgaaatggtccttgtcatcgcgtggtcctgccacagcgcggacctggggtctctgtcctcgcagttgcaggtgttaccttgcactggtcatggtttaacatttggaattcagagtttgctggcagttgttacagttccttaa

SEQ ID NO: 9686 - DNA, 2575 bp, Homo sapiens
  SIMILAR (415)..(918): 911254mologous to Homo sapiens ASB-1 protein,accession number AF156777,Smith-Waterman Score=806.
atgcgggccgcggggggagccatgctgtgtgggaagcaggggcggtgggatccggagggggaaggagcccaccctggtttcattcctaagctggcctgctcttcccagggtgtgtttcgtcagctgcatctccgaacagcagtaactgctgccgtgtcgaggcacttccctcagccatcctggaggtacgacccaggtccccagtttttaggtgagaaaagtggcttcaaaccccgctgccctggtgtggcagtttgtcaatttcagagcatgaatgcctttatccattggttcaggaacaaggcctgggccagctcctgtgacagaatcaaaatacccgtcccaccagaagccactttcgtggaacctaactgtctgccaggagagataggccagctcctccggcagctgcagtcaggtcgtaatctgaaggagtggctgagggagcaattttgtgatcatccgctggagcactgtgaggacacgaggctccatgatgcagcttacgtcggggacctccagaccctcaggagcctattgcaagaggagagctaccggagccgcatcaacgagaagtctgtctggtgctgtggctggctcccctgcacaccgttgcgaatcgcggccactgcaggccatgggagctgtgtggacttcctcatccggaagggggccgaggtggatctggtggacgtaaaaggacagacggccctgtatgtggctgtggtgaacgggcacctagagagtacccagatccttctcgaagctggcgcggaccccaacggaagccggcaccatcgcagcacccctgtctaccacgcctctcgcgtgggccgggcagacatcctgaaggccctcatcaggccagctgcgtgtgatcgcagtgtgtccattactgccgatactcacttccgttatttgattaaggtggtgcctgccatgtttcgctcccgtaaagctattccttttctctctagctgcacagcgtggcgttgtgcagatgagctgcagttcattcagccagtcccgttagtggacacgtcagggagtggtaaaaccgtttcaaatgtgattacagagtcacacaattctgacaatgaagaggatgatcaatttgtggtggaagctgcccctcagctctctgaaatgtcagaaattgaaatggtaacagcagtggaactagaagaagaggagaagcatggtggacttgtgaaaaaaattttggagacgaagaaagattatgagaaattgcagcagtcacccaaacctggggagaagccttctgctactggctggcatggtgagtgcctgggcaccaggaacagggcacaaggggcactcgtgggctggggctggctgtacagtgagagacattcaggaatgttacgagccattacattaaaatacaaaggtggggggcgtcaaggaattcaggcccctggaaaagtgaaaccttccgctccagagcagcccctgaaaatcctctgggtcgctggggatttgccctcctttccaagatcatctcctaacgacaggttcttcaagttacacttctccctgagtccccaagcccgtgtaaatagccggttccctggatctgggaaggctgggctggggctgtggatggaaggtgcccgccctagtggtcatgtgcccaaggaaagggtagtggctggcaagaggccacaggtcccaacaaaagcacatcacacatgtgtgagggagactgcggggaaccaggagggtaatggggagggggccctgcagcaggagcagaggttgggggtagcagaggcagggagtaatggggagggggccctgcagcaggagcacaggatcacagactgtgccgtggagcccttaaaggctgagctcgcggagctggagcagctgatcaaagaccagcaagacaagatctgtgctgtgaaggccaacatcctcaagaatgaagaaaaaatccagaaaatggagcgatctctctttgagtcggcatggaagaaggagaaggacatcgtttccaaggagatagagaagctccgcacgtccatccagaccctgtgcaagagcgcacttcccctggggaagatcatggactacatccaggaagacgtggatgccatgcagaatgagctgcagatgtggcacagcgagaacaggcagcacgccgaggccctgcagcaggagcagaggtacggggctgatgttgacgtcaaccaccacctgactcctgatgtccagcctcgattctcccggcggctcacctccttggtggtctgccccttgtacatcagcgcagcctaccacaacctccagtgcttccggctgctcctcctggctggcgcgaaccctgacttcaactgcaatggtcctgtcaacacacagggattctacaggggctcccctgggtgcgtcatggatgctgttctgcgccacggctgtgaggcagccttcgtgagcctgctggtagaatttggagccaacctgaatctagtgaagtgggaatcgctgggcccagagtcgagaggaagaagaaaagtggaccctgaggccttgcaggtctttaaagaggccagaa

SEQ ID NO: 9687 - DNA, 1978 bp, Homo sapiens
  SIMILAR (981)..(1640): 871254mologous to Homo sapiens MIP-T3,accession number AF230877,Smith-Waterman Score=929.
catgaagggcctctacacagacgccgagatgaagtctgataatgtgaaggataaagatgcaaaaattagcttcctacaaaaggccatagacgtggttgtaatggtgtcgggagagccactgttggccaaaccagcccgaatcgtggcggggcatgagcctgaaagaacaaacgagctgctccagataattggaaaatgctgtctcaacaagctctctagtgacgatgcggtgcggagggttttagctggagagaagggagaagtgaaaggccgggcctcactgacctcaagatctcaggaattggataataagaatgtgcgagaagaagagtccagagttcacaaaaatacagaggatagaggagacgctgaaataaaagagagaagtacaagcagagatcgaaaacagaaggaagaattgaaagaagaccgcaagccaagagaaaaggacaaggacaaggagaaggccaaggagaatggcggaaacagacacagagaaggggagagagagagagccaaagcccgggccaggccagacaacgagcgacagaaagacagaggcaacagggagcgggacagagactccgagcgcaagaaggagacagagagaaagagtgagggggggaaagagaaggagagactgagagacagggaccgagagcgcgaccgggacaaagggaaggacagggacagacggagagtgaaaaacggggagcactcctgggacctggacagggagaagaacagagagcatgacaaacctgagaaaaagtcagcaagctcaggggagatgtctaaaaagttatcagatggaacttttaaagactccaaggctgaaacagagactgagatttccactagagcttccaagtcattgacaacaaaaacatcaaaacggcgatccaaaaattcagtggaaggtgactccaccagtgatgcagaaggagatgctggacctgctggccaagataagtctgagggtgccagagactccagaaattcctaatgagctttcatccaacatcagaagaattcctcggcctgggagtgcaagaccagcccctccccgggtcaaacggcaagacagcatggaggcgctacaaatggataggtcagggagtggtaaaaccgtttcaaatgtgattacagagtcacacaattctgacaatgaagaggatgatcaatttgtggtggaagctgcccctcagctctctgaaatgtcagaaattgaaatggtaacagcagtggaactagaagaagaggagaagcatggtggacttgtgaaaaaaattttggagacgaagaaagattatgagaaattgcagcagtcacccaaacctggggagaaggagcgatctctctttgagtcggcatggaagaaggagaaggacatcgtttccaaggagatagagaagctccgcacgtccatccagaccctgtgcaagagcgcacttcccctggggaagatcatggactacatccaggaagacgtggatgccatgcagaatgagctgcagatgatatcacagcgagaacaggcagcacgccgaggccctgcagcaggagcagaggatcacagactgtgccgtggagccctttaaaggctgagctcgcgtgagctggagcagctgatcaaagacccagccaagacaagatctgtgctgtgaaggccaacatcctcaagaatgaagaaaaaatccagaaaatggtatatagtatcaatttgacttcgagaaggtgaacactcaaaagtttcagagatgaaaagtcacctcagtttaaaagcaaaaaggaagatagaaaatcattactcttttaagttccagtttgctaagaaaatgaacagtttacaatgttattatccagctaattttcagagctttaaaactgtaagcatgttaagtgtattaaaaaaaccatgttttcttacctccttccagatggaatactggctagttataaatagcgcttccaaaca

SEQ ID NO: 9688 - DNA, 1209 bp, Homo sapiens
  SIMILAR (156)..(716): 331254mologous to Homo sapiens Human serine protease 67 (SP67),accession number W22987,Smith-Waterman Score=224.
atgctggccaccaccagcccaggacgacagctggcctcacagtcccgggggccacacccagcagacccaccctggggctgccagcagggtgacgggccaacctgccaactcaaccttactgccactgtggcctggcgccggccgcgctcaccaggattgtgggcggcagcgcagcgggccgtggggagtggccgtggcaggtagacctgtggctgcggcgccgggaacaccgttgcggggccgtgctggtggcagagaggtggctgctgtcggcggcgcactgcttcgacgtctacggggaccccaagcgtgggcggccttcctaggcacgccgttcctgagcggcgcggaggggcagtggagcgcgtggcgcgcatctacaagcacccgttctacaatctctacacctcgactacgacgtggcgctgctggagctggcggggccggtgcgtcgcaccgcctggtgcgtcccatctgcctgcccgagcccgcgccgcgacccccgacggcacgcgctgcgtcatcaccggctggggctcggctccatggcgcgcagctgcagaaggcggccgtgcgcctcctcagcgagcagacctgccgcgcttctacccagtgcagatcagcagccgcatgctgtgtgccggcttccccagggtggcgtggacagctgctcgggtgacgctgggggacccctggcctgcagggagccctctggagcgcccgtccccggccagccccgcacctgcacagctcctgcgcgttggccacggcgatctgcactttcacctgctccattatgagccctgggtccagcttcccgctgccggagcccccgaaatcggagccgaagccgccctccatggctccgcaaagtcaccaggaccgaggccgcgtgcgccgactcgtaactaactgcgccggaagcgggccgcccggggcaccacgggaaacggagtccgcgcggacggggacggaggactacaactcccacacgaccgcgcgcgcccgggccattcaaggtcgcgcggggggccctccgctcatgcggaggcctggacctgccgttacttacacgagcttacggtggttgcgaccacgcggttagaggtaggccctgtcttgaccggcgagtagtgaggttactacatgcggccgaatacaatcgctatgtactcgcactctgccttcagttagtttggaaggtcgaaa

SEQ ID NO: 9689 - DNA, 443 bp, Homo sapiens
  SIMILAR (103)..(141): 761254mologous to Homo sapiens calbindin D28K,accession number S46006,Smith-Waterman Score=45.
  misc_feature (1)...(443): n = a,t,c or g
ttctcacgtnnnnnnnnnnnnnnnnnnnnnnnnnnnnnnnnnnnnnnnnnnnnnnnnnnnnnnnnnnnnnnnnnnnnnnnnnnnnnnnnnnnngggacatgcatgaaatttggtgccgtgactcagatcgggggacctcctttgggagatcaatcccctgtcctcctgatctttactccatgagaaagatccacctacaacctcaagtcctcagactgaccagcccaagaaacatctcaccaatttcaaatccggaccctactgaaaatcagactgttcaactcacctggcagccactcccagagcccctggaactctggcccaaggctctctgactgactccttcccagatcttctcagcttagcagctgaagactgacactgcccaatcgcctcagaagcctacaggaccatcacagatgctctaggtaactctcacaggg

SEQ ID NO: 9690 - DNA, 286 bp, Homo sapiens
  SIMILAR (49)..(102): 441254mologous to Drosophila melanogaster arouser,accession number AF208262,Smith-Waterman Score=33.
cgcagtgatcagcaccgtagagcggggcgcgggccgcggacgaccccaggcgaagcccattcccgaggcagaggaggcgcagaggcctgagccggtggggacctcgagcaacgctgactcggcctccccggacctgggtccccggggtcctgacctggcggttctgcaggcggagcgggaagtggacatcctgaaccacgtgttcgacgacgtagagagctttgtatcgaggctgcagaagtcggcggaggcggccagagtgctggagcaccgggaacgcggccgc

SEQ ID NO: 9691 - DNA, 1059 bp, Homo sapiens; identical to SEQ ID NO: 806
  SIMILAR (328)..(459): 881254mologous to Homo sapiens calbindin D28K,accession number S46006,Smith-Waterman Score=211.

SEQ ID NO: 9692 - DNA, 933 bp, Homo sapiens; identical to SEQ ID NO: 3053
  SIMILAR (715)..(852): 511254mologous to Human T-cell lymphotropic virus type 2 gag protein,accession number X89270,Smith-Waterman Score=147.

SEQ ID NO: 9693 - DNA, 2286 bp, Homo sapiens; identical to SEQ ID NO: 2668
  SIMILAR (273)..(548): 341254mologous to Homo sapiens NK receptor, isoform b,accession number AJ006121,Smith-Waterman Score=92.

SEQ ID NO: 9694 - DNA, 930 bp, Homo sapiens
  SIMILAR (226)..(384): 791254mologous to Homo sapiens Human secreted protein, SEQ ID NO: 5210,accession number G01129,Smith-Waterman Score=220.
atggaaagaataggaagaaaaggaggaagaggaaaagatggaggagaaggaggagaggaaaaggagaaggaagaggaagaggaggagggaagagggaagagatggggaaagaaaaagaatggagaagcaaaaggagaaccaggatcctactcagcccacctgcacccaggtgaaataaacagccatgttgctcacacaaagcctgtttggtggtctcttcacacggacgcgcatgaaatttggtgccatgactcctatcgggggacctcccttgggagatcaatcccctgtccttctgctctttgctccttgagaaagatccacctacgacctcaggtcctcagaccgaccagcccaagaaacatctcaccaatttcaaatccggctgctcctcgccagaccgagctaggtcccaattcttcctcagcctccgctcctccaccctataatccttttatcgcctcccctcctcacacctggtccggcttacagtttccttccatgactagccctccccctcctgcccagcaatttactcttaaaaaggtggctggagctaaaggcatagtcaaggatttaattaacctcaccttcaaggtgtacaataatagaaaaaagttgcagttccttgcctccactgtgagacaaaccccagccacatctccagcacacaagaacttccaaacgcctgaactgcagcagccaggtgttcctccagaacctcctccccgaggagcttgctacaagttccagaaatctggccaccgggccaaggaatgcctgcagcccaggattcctcctaagccacatcccatctgtgtgggaccccactggaaatcggactgtccaactcacctggcagccactcccagagcccctggaactctggcccaaggctctctgactccttcccagatcttcttggcttag

SEQ ID NO: 9695 - DNA, 247 bp, Homo sapiens
  SIMILAR (112)..(2): 811254mologous to Homo sapiens Human secreted protein, SEQ ID NO: 5576,accession number G01495,Smith-Waterman Score=151.
ctggcaaccactcccagagcccctggaactctggcccaaagctctctgactccttcccagatcttctcggcttagcagctgaagactgacaccgcccaattgcctcggaagctctttgttgagtcccacaattaccattgttcttggcctggacttcaatccggcctcccacattattctggataccacacctcatcctcatgactgtatctctctgatccagctgacattcaccccatttccccat

SEQ ID NO: 9696 - DNA, 414 bp, Homo sapiens
  SIMILAR (103)..(53): 471254mologous to Gonostoma gracile adenosine triphosphatase subunit 8,accession number AB016274,Smith-Waterman Score=34.
  misc_feature (1)...(414): n = a,t,c or g
cacgtcttacgtaggctgagactggagagtttccgtggactcgtaaccctgcctttgtccctgcactgaagggtgtaaggtggttgctttctgcatgagccagtgtttctcagccttggtgctgctgccatctnnnnnnnnnnnnnnnnnnnnnnnnnnnnnnnnnnnnnnnnnnnnnnnnnnnnnnnnnnnnnnnnnnnnnnnnnnnnnnnnnnnnnnnnnnnnnnnnnnnnnnnnnnnnnnnnnnnnnnnnnnnnnnnagtggagagcaaaatcacccagcagagaactgctaggctagagaggtgcaggatcctaggctgggtgcggggnnnnnnnnnnnnnnnnnnnnnnnnnnnnnnnnnnnnnnnnnnnnnnnnnnnnnnnnnnnnnnnnnnnnnnnnnacgcgtggg

SEQ ID NO: 9697 - DNA, 560 bp, Homo sapiens
  SIMILAR (228)..(31): 351254mologous to Beta vulgaris Chitinase,accession number X81056,Smith-Waterman Score=83.
  misc_feature (1)...(560): n = a,t,c or g
caacgtgactcggcctccccggacctgggtccccggggtcctgacctggcggttctgcaggcggacggagaagtggtgagccgctaaggaaggggtctgggggcagggcaggcgactggaggcggggctagggcgtggaagggcggggcggctgcgggacgggcgttctctggtcagacttctgcgttatggaagaggggctgggtcgggggcggggcttggttgtggggcgtggcaggtgtttggggcgtggctgatctggggaagtgtataggtgctcaggttcagggcttcgacggggatggttttggaactcgggagccctgagcgtccccctcctctgtcccctaggacatcctgaaccacgtgttcgacgacgtagagagctttgtatcgaggctgcagaagtcggcggagcggccagggtgctggagacggngaacgcggccgcagaagccggcgcngggcgttgnggggtaaaggggcacctggcgtgggatctgaacccctcccgatctcttccaaatgtccccgctctccccangctctccctcncgcaa

SEQ ID NO: 9698 - DNA, 602 bp, Homo sapiens
  SIMILAR (192)..(524): 341254mologous to Bovine leukemia virus gag polyprotein,accession number M10987,Smith-Waterman Score=144.
gtttcagaggtgtcagaccacgcagggacgcctgccttggtccttcacccttagcggcaagtcccgcttttctggggaaggggcaagtaccccaaccccttctctctgtgtctctaccccttctccgcctttctggggggcaagaaacacccaaccccttctccttcaccctgagtggcaagtccgcttttctagaggagcaagtaccccaacctcgtatctctgtgccccagtcccttatttccacgccccgacctcttatctctgtggcccaatcccttatttctgcaccccaacctcttatatctctgtgccccaatcccttatttccatgccccgacctcttatctctgcaccccaaccccttatttccacgacccaacccctttcccgcttttctggaaggagcttgctacaagtgccagaaatctggccaccaggccaaggaatgcctgcagcccgggattcctcctaagctgcgtcccatctgtgcgggaccccactggaaatcggactgtccaactcacctggcagccactcccagagcccctggaactctggcccaaggctctctgactgcttcccagatcttcttggcttag

SEQ ID NO: 9699 - DNA, 546 bp, Homo sapiens
  SIMILAR (328)..(486): 481254mologous to Human T-cell lymphotropic virus type 1 Gag,accession number S74562,Smith-Waterman Score=158.
gctgctcctcgccagaccgagctaggtcccaattcttcctcagcctccgctcctccaccctataatccttttatcgcctcccctcctcacacctggtccggcttacagtttccttccatgactagccctccccctcctgcccagcaatttactcttaaaaaggtggctggagctaaaggcatagtcaaggatttaattaacctcaccttcaaggtgtacaataatagaaaaaagttgcagttccttgcctccactgtgagacaaaccccagccacatctccagcacacaagaacttccaaacgcctgaactgcagcagccaggtgttcctccagaacctcctccccgaggagcttgctacaagttccagaaatctggccaccgggccaaggaatgcctgcagcccaggattcctcctaagccacatcccatctgtgtgggaccccactggaaatcggactgtccaactcacctggcagccactcccagagcccctggaactctggcccaaggctctctgactccttcccagatcttcttggcttag

SEQ ID NO: 9700 - DNA, 180 bp, Homo sapiens
  SIMILAR (111)..(1): 451254mologous to Bombyx mori bombyxin C-2 precursor,accession number D00792,Smith-Waterman Score=66.
cctcgacgatttcgttggccgaatgcttactctaatgggctgtcccattcctgagtgtctagagttcccagcccgcttagggaaggaaggaaaacacaggcagctctaagtgtacgacgagggaggtctcatcggcggtgaggaagcccaggcgggtccccttcccagctgaaaggggtt

SEQ ID NO: 9701 - DNA, 420 bp, Homo sapiens; identical to SEQ ID NO: 448
  SIMILAR (106)..(219): 841254mologous to Homo sapiens Human secreted protein, SEQ ID NO: 5576,accession number G01495,Smith-Waterman Score=161.

SEQ ID NO: 9702 - DNA, 1029 bp, Homo sapiens
  SIMILAR (188)..(403): 291254mologous to Mus musculus Gag-Pol polyprotein,accession number U63133,Smith-Waterman Score=52.
atgaccttgggccctctgaccaaccagcgcaaggaacatctcaccaatttcaaatcagtctccaccccaagttctgagtcctttgaatgcttcttttctacggactcatctgacctctccccttctcctcaagctgctcgtcgccaggccgagccaggagcttgctttaagtgctggaaatctggccactgggctgaggaatgcctgcagcccaggattcctcctaagctgcatcccatctgtgtgggaccccactggaaatcggactgtccagctcacctggcagccactcccagagccgctggaactctggcccaaggctctctgactccttcccagatcttcttggctgagtggctgaagactgacactgcccgatcgcctcagaagcctcctggaccgtcacagacactttgggtaactcttacagtggaggtggctgccactgctttaatacttttagaggccctcaaaatcacaagctatgctccacttactctctacagttcccataactttcaaaatctattttcttcctcacacttaacgcatatactttctgcccccaagacccttcagctatactcactctttgttgagtcttccacaatcaccattgttgctggcccagacttcaatccggcctcccacattattcctgataccacacctgacccccatgactgtatctctctgatccacctgacattcattccatttccccatatttccttctttcctgttcctcaccctgatcacacttggtttattgatggcagttccaccaggcctaatcgccacacaccagcaaaggcaggctatgctatagtatcttccacatttatcattgaggctactgccctgcccccctccactacctctcagcaagccaaactcattgccttaactcaggccctcactcttgcaaagggactacttgtcaatatttatactgattctaaatatgccttccatatccagtaccaccatgctgttatatgggcagaaagaaatttcctcactacataa

SEQ ID NO: 9703 - DNA, 1083 bp, Homo sapiens
  SIMILAR (150)..(977): 1001254mologous to Homo sapiens NK receptor, isoform b,accession number AJ006121,Smith-Waterman Score=1485.
cccacgcgtccgcagcactaggccggcagaatctgagcgatgtctttcacactccctgccctgctctgcgtcggtgaggtctggcgtggaaggggaatgggatcacggtgtgcctgggaggcaacaggtctcattactcccgtcttccagggctgtgtctgagtcagaggatcagcgcccagcagcagactctcccaaaaccgttcatctgggccgagccccatttcatggttccaaaggaaaagcaagtgaccatctgttgccagggaaattatggggctgttgaataccagctgcactttgaaggaagcctttttgccgtggacagaccaaaaccccctgagcggattaacaaagtcaaattctacatcccggacatgaactcccgcatggcagggcaatacagctgcatctatcgggttggggagctctggtcagagcccagcaacttgctggatctggtggtaacagaaatgtatgacacacccaccctctcggttcatcctggacccgaagtgatctcgggagagaaggtgaccttctactgccgtctagacactgcaacaagcatgttcttactgctcaaggagggaagatccagccacgtacagcgcggatacgggaaggtccaggcggagttccccctgggccctgtgaccacagcccaccgagggacataccgatgttttggctcctataacaaccatgcctggtctttccccagtgagccagtgaagctcctggtcacaggcgacattgagaacaccagccttgcacctgaagaccccacctttcctgaccatgccctctgggatcacactgcccagaatctccttcggatgggcctggcctttctagtcctggtggctctagtgtggttcctggttgaagactggctcagcaggaagaggactagagagcgagccagcagagcttccacttgggaaggcaggagaaggctgaacacacagactctttgaagaatgaccatgagacaacagtggccatgggtggatctgaaagctggtgttgagcctgggcggcgtgagctctgtgttggacccacggaggagggagtcactg

SEQ ID NO: 9704 - DNA, 849 bp, Homo sapiens
  SIMILAR (1)..(459): 711254mologous to Homo sapiens nucleotide-binding site protein 1,accession number AF298547,Smith-Waterman Score=541.
  misc_feature (1)...(849): n = a,t,c or g
ttgtgtgaggtcttgagacatccagaatgtaacctgcgatatctcgggttggtgtcttgttccgctaccactcagcagtgggctgatctctccttggcccttgaagtcaaccagtccctgacgtgcgtaaacctctccgacaatgagcttctggatgagggtgctaagttgctgtacacaactttgagacaccccaagtgctttctgcagaggttgtcgttggaaaactgtcaccttacagaagccaattgcaaggaccttgcttgctgtgttggttgtcagccgggagctgacaccacctgtgcttggccaagaaccccattgggaatacaggggtgaagtttctgtgtgagggcttgaggtaccccgagtgtaaactgcagaccttggtgctttggaactgcgacataatctagcgatggctgctgcgatctcacaaagcttctccaagaaaaatcaatgcctgttgtgtttggatctggggctgattcacataggagttaagggaatgaagttcctgtgtgaggctttgaggaaaccactgtgcaacttgagatgtctgtggttgtggggatgttccatccctccgttcagttgtgaagacctctgctctgccctcagctgcaaccagagcctcgtcactctggacctggggtcagaatcccttggggttctagtgggagtgaagatgctgttttgaaaccttgacatgttccagtgggcaccctccgggacactcaggtttgaaaatagatggactttnaattgatggaacttcaattaagctgcttgggaaggaaataggaangaaaaaaacccacaantggttatttgattantgaggnaact

SEQ ID NO: 9705 - DNA, 1188 bp, Homo sapiens
  SIMILAR (1186)..(1115): 871254mologous to Homo sapiens Human secreted protein, SEQ ID NO: 5576,accession number G01495,Smith-Waterman Score=112.
tcatgggcctctggattggtcatgtggcatcccaaccactagactgagtggggatagctgccacagcaagccccaaccagactggtccttgtgcccatgtgtgggtatgtgagcatttggctgctttactactggagtgggcagagttactgacagtgatgggcccttgtacactggtccttgggcccctggcagccactcccagagcccctggaactctggcccaaggctctctgactccttcccaggtcttctcggcttagcggctgaagactgatgctgcccgatcgccttggaagccccatagaccatcatagacgccgagcttcgggtaactctcacagtggaggcagtttaaattctagtgaagtgatggaatatagagcaggggaaaggacagagggagtttgcgagtcgacaaggcagaaactggagtacacgagtgctggaaccagctggctgctttggcactggcaggagcgaactccatgcactctgacctgctatgttccacccctcatgggagggagcatgcagcctctctcactgtccctcaaccactttctcctttccactcttcaatctctcccttctcttaatttcaattcctttcattttctgggagagacaaaggagacacgttttatccgtggacccaaaactccggtgccggtcacggactgggaaggcagccttcccttggtgtttaatcattgcagggacacctctctgattatacacccacgtttcacgggtgtcagaccacgcagggacgcctgccttggtccttcacctttagcggcaagtcccgcttttctgagggaggggcaagatttaactaacctcgccttcaaggtgtacaataatagaaaaaagttgcaattccttgtccccactgtgagacaaaccccagccgcatctccagcacacaagaacttccaaacgcctgaaccgcagcggccaggtgttcctccagaacctcctcccccaggagcttgctacaagtgccagaaacgtggccaccaggccaaggaatgcctgcagcccaggattcctcctaagccacgtcccatctgtgccggaccccactggaaatcggactgtccaactcacctggcagccactcccagagcccctggaactctggcccaaggctctctgactgcttcccagatcttcttggcttag

SEQ ID NO: 9706 - DNA, 1655 bp, Homo sapiens
  SIMILAR (309)..(533): 761254mologous to Homo sapiens DRC3,accession number AF282167,Smith-Waterman Score=288.
tcgcggccgcaggagccggcgccgggcggctggggagggcttgctgacgctgcgggccaagccgccctcggaggccgagtacaccgacgtgctgcagaagatcaagtacgccttcagcctgctggcccggctgcgcggcaacatcgccgacccctcctctccggagctgttgcacttccttttcgggcctctgcagatgattgtgaacacgtcgggggggccggagttcgcgagcagtgtgcggcggccgcatcgtgacatcggatcgccgtggcgctgctgcgggaacaacgtcactccacgtgaaaacgagctctggacctcgctgggggactcgtggacccgccccgggctgggagctgtccccggaggagggacccccatacagacccgagttcttcagcggctgggagccgccggtcactgacccgcagagccgcgcctgggaggacccagttgagaaacagctacagcacgagcggaggcgccggcagcaaagcgccccctcaggtcgctgtcaatgggtcaccggagacttggagccagaatctgagcctcagctggagtcagagacagcaggaaaatgggtcctgtgtaattatgacttccaggccccgcaacagcagtgaagctgtccggtcaagcagcggggacgtactgggaggtcctgggatgacagtcggtaagtggtggaaggttcgggacccagcggggcaggagggatatgtgccctacaacatcctgacaccctaccccggaccccggctgcaccacagccaaagccctgcccgcagccatgaacagcactcctcctccaccaccagccccagccccaggccccacctccagctctggctcggccccgctgggacaggccccgctgggacagctgcgatagcctcaacggcttggaccccagcgagaaggagaaattctcccagatgctcatcgtcaacgaggaactgcaggcgcgcctggcccagggccgctcgggaccgagccgcgcagtcccagggccccgcgccccggaaccgcagctcagcccgggctcggacgcctccgaggtccgcgcctggctgcaggccaagggctttagctccgggaccgtggacgcgctgggtgtgctgaccggggcgcagcttttctcgctgcagaaggaggagctgcgggcggtgagccccgagggagggggcacgtgtgtacagcccagtcaccgtgcagcgctcgctgctggaggacaaaagagaaagtgtcagagctggaggcagtgatggagaagcaaaaggaagaaggtggaaggcgaggtggaaatggaggtcatttgacctgccaggcgcccttcgcaaagagtgacgaggccccgtgggagaacggacctcctcagactctccccaatagcggaagtcgatcttctgaaggatggccaatctgctccggccctggtcttcccccactcccggtggacagacttaacgatccttgctgcagtccctccggagaggatctggactggctgggagtggggagggcgtggagacagtctacggaaagcgctagcagacccccgagagggtgcagtggagccctgagcattgtaatactgcggcccagccctataaacatgcctccgtgcttagcaaaaaaaaaaaaaaaag

SEQ ID NO: 9707 - DNA, 795 bp, Homo sapiens
  SIMILAR (380)..(550): 791254mologous to Homo sapiens FKSG70,accession number AF338198,Smith-Waterman Score=230.
aattattattattttttattttactagtccttgcctgcatacatttcctccagggtacagagcttatgtggttctttgaccaaatactgttctagtcattgcatgtattagagaccaaggctttcctcgtcaaatcaattctgcatggttttcccatcttcttggttttctttttttttttttttttttaattttttattgatcattcttgggtgttttctccaaaagggggatttggcagggtcataggacaatagtggagggaaggtcagcagataaacaagtgaaacaaaaggtctctggttttcctaggcaagaggacactgcggccttccgcagtcgtttagtgtccctgggtacttgagattagggagtggtgatgactcttaacgagcatgctgccttcaagcatctgtttaacaaagcacatcttgcaccgcccttaatccatttaaccctgagtggacacagcacatgtttcagagagcaccgggttggggggtaaggtcttagattaacagcatcccaagggcagaaagaaattttccttagtacagaacaaaaatgggagttctccctattgtctacttctttctacacagacagggcaaccatccgatttctcaatcttttcccccacctttcccccctttctattccacaaaaccgccattgtcatcatggccagttctcaatgagctgttggatacacctcccagacagggtggtggccgagcagagagtctcctcacttcccagtaggggtggccgggcagaggcgcccctcacctcccg

SEQ ID NO: 9708 - DNA, 574 bp, Homo sapiens
  SIMILAR (148)..(552): 1001254mologous to Homo sapiens Human normal pancreas tissue derived protein 3,accession number Y59895,Smith-Waterman Score=730.
tccccgctgcgcccgctgctgctggccctggcccttgcctccgagccttgcgcccagggcgcctgccccgcctccgccgacctcaagcactcggacgggacgcgcacttgcgccaagctctatgacttgtagcgacccctactatgagaactgctgcgggggcgccgagctgtcgctggagtcgggcgcagacctgccctacctgccctccaactgggccaacaccgcctcctcacttgtggtggccccgcgctgcgagctcaccgtgtggtcccggcaaggcaaggcgggcaagacgcacaagttctctgccggcacctacccgcgcctggaggagtaccgccggggcatcttaggagactggtccaacgctatctccgcgctctactgcaggtgcagctgatgcattgctggtctctcatctgcagcttccacagagtgccaagcccctcactcagcccatccctgggctctgctccggggccccaagacccaggaggaggagcgttctgcctgccccctcccacctcccctgcaatacagcctttgtgccgttgaaaaaaaaaaaaaaaaa

SEQ ID NO: 9709 - DNA, 1857 bp, Homo sapiens
  SIMILAR (1)..(1503): 931254mologous to Homo sapiens tumor-related protein,accession number AF077831,Smith-Waterman Score=2404.
atgcctcagttactgcaaaacattaatgggatcatcgaggccttcaggcgctatgcaaggacggagggcaactgcacagcgctcacccgaggggagctgaaaagactcttggagcaagagtttgccgatgtgattgtgaaaccccacgatccagcaactgtggatgaggtcctgcgtctgctggatgaagaccacacagggactgtggaattcaaggaattcctggtcttagtgtttaaagttgcccaggcctgtttcaagacactgagcgagagtgctgagggagcctgcggctctcaagagtctggaagcctccactctggggcctcgcaggagctgggcgaaggacagagaagtggcactgaagtgggaagggcggggaaagggcagcattatgaggggagcagccacagacagagccagcagggttccagagggcagaacaggcctggggttcagacccagggtcaggccactggctctgcgtgggtcagcagctatgacaggcaagctgagtcccagagccaggaaagaataagcccgcagatacaactctctgggcagacagagcagacccagaaagctggagaaggcaagaggaatcagacaacagagatgaggccagagagacagccacagaccagggaacaggacagagcccaccagacaggtgagactgtgactggatctggaactcagacccaggcaggtgccacccagactgtggagcaggacagcagccaccagacaggaagaaccagcaagcagacacaggaggccaccaatgaccagaacagagggactgagacccacggtcaaggcaggagccagaccagccaggctgtgacaggaggacatgctcagatacaggcagggacacacacccagacacccacccagaccgtggagcaggacagcagccaccagacaggaagcaccagcacccagacacaggagtccaccaatggccagaacagagggactgagatccacggtcaaggcaggagccagaccagccaggctgtgacaggaggacacactcagatacaggcagggtcacacaccgagactgtggagcaggacagaagccaaactgtaagccacggaggggctagagaacagggacagacccagacgcagccaggcagtggtcaaagatggatgcaagtgagcaaccctgaggcaggagagacagtaccgggaggacaggcccagactggggcaagcactgagtcaggaaggcaggagtggagcagcactcacccaaggcgctgtgtgacagaagggcagggagacagacagcccacagtggttggtgaggaatgggttgatgaccactcaagggagacagtgatcctcaggctggaccagggcaacttgcataccaagtgtttcctcagcacagggccaggatgcagcccagtcagaagagaagcgaggcatcacagctagagagctgtattcctacttgagaagcaccaagccatgacttccccgactccaatgtccagtactggaagaagacagctggagagagtttggcttgtcctgcatggccaatccagtgggtgcatccctggacatcaagctcttcattatgcagcttcccttttaggtctttctcaatgagataatttctgcaaggagctttctatcctgaactctttctttcttacctgctttgcggtgcagacccctctcaggagcaggaagactcagagcaagtcacccctttgtactgaattgtcctcatcttgtggggggtttcaggactatttttatctctgacatctctctattgccccatctaccctaatgcatcaataaaaccttaagcccctggaaaaaaaaaaaaaa

SEQ ID NO: 9710 - DNA, 3031 bp, Homo sapiens
  SIMILAR (2)..(3031): 1001254mologous to Homo sapiens dJ620E11.1 (novel Helicase C- terminal domain and SNF2 N-terminal domains containing protein, similar to KIAA0308),accession number AL031667,Smith-Waterman Score =5327.
gtcctacttacattgtaaatgggccacaatggaagagctcgaaaaggatcctcgcatcgcacagaagatcaagcgatttaggaataaacaagcccagatgaagcacatttttacggagcctgatgaagacttgttcaatccagactatgtagaagttgatcgcatcttggaggtggcccacaccaaggatgcagaaacaggggaggaggtaacacattacctggtgaagtggtgctcactaccatatgaagaaagcacgtgggagctagaggaagatgtagatcctgcaaaagttaaagaatttgaatctcttcaagttctccctgaaattaagcatgtggagcggcctgcttcagactcctggcagaaacttgagaagtctcgcgagtataagaacagtaaccagctccgggagtaccagctggaagggatgaactggcttctttttaactggtataacagaaaaaactgtattttggctgatgagatgggcctagggaaaaccatccagtccatcacattcctttcagaaatatttctgagaggaatccacggcccttttctcattatcgcccctctctccaccatcactaactgggagcgggagttccggacatggacagagatgaatgccattgtgtaccacggcagccagatcagcaggcagatgatccagcagtatgaaatggtgtacagagacgcccagggaaaccccctttcaggagtcttcaagttccacgtcgtcatcacaacatttgaaatgatcctagcagactgcccagagttgaagaagattcactggagctgtgtgataattgatgaagcccacagactgaagaataggaactgcaaacttctggagggtctaaagcttatggccctggaacataaagtgcttctcactggaacacccttgcagaactctgtggaggagctcttcagtttgttaaattttctggagccatcacagtttccttcagagaccgctttcttggaggaatttggagatctgaaaacagaggagcaggtaaagaaactgcagtctatcctaaaaccaatgatgcttcggcggctgaaagatgatgtggaaaagaaccttgctcccaaacaagagacgatcattgaggtggaactgaccaatatccagaaaaagtactaccgtgccatcctcgagaagaacttttccttcctgaccaagggggcaaatcagcacaacatgcccaatctcatcaacaccatgatggagctgaggaagtgctgtaaccatccctacctgatcaatggtgcagaggagaaaattctagaagatttccgaaaaacccacagccctgatgcccctgactttcagctgcaggccatgattcaggcagcaggaaagcttgtgttgattgataaactactccctaagctgattgcaggtggccacaaagtactcatcttctcccagatggtgcgctgcctcgacatcctagaagattacctcatccagagaaggtacacctatgagcgaattgatgggcgagtacggggaaacctgcgccaggcagccatcgaccggttctgtaagccagattcagaccgctttgtctttcttctgtgcaccagagcgggaggcctggggatcaatctcacagctgctgatacctgcatcatatttgattctgactggaacccacaaaatgacttgcaggctcaggcccgatgtcaccgcataggccagagcaaagctgtgaaggtgtatcgcctcatcactcgaaattcctacgagcgcgagatgtttgacaaggccagcctaaagctggggctggacaaggctgttcttcaggacatcaaccgaaagggcggcaccaatggggtacagcagctctcaaaaatggaggtggaggacctactccggaaaggtgcttatggagccttaatggatgaagaagatgaaggctccaagttctgtgaagaagacatagaccagattctgcagaggcgaacgcacaccatcaccatccagtctgaggggaaagggtccacttttgccaaggctagctttgtggcttcaggaaacagaacagatatttccttagatgatcctaacttttggcagaaatgggctaaaatagctgaactagacactgaagcaaagaatgaaaaggaaagcttagtgatcgaccgacctcgcgtgagaaagcagaccaaacactacaactcgtttgaggaagacgagctcatggagttttcagagttagacagcgactcagacgaaaggcccacgagatccaggcgcctcaatgacaaagccaggcgctacctccgagcggagtgcttccgggtagagaagaacctgctcatctttgggtggggccggtggaaggacatcctgactcatggccgattcaagtggcatctgaacgagaaggacatggagatgatttgccgtgccctcctggtgtactgtgtcaagcattataagggggacgagaagatcaagagtttcatttgggaactgatcacacctaccaaagatgggcaagcccagaccctccagaaccactcaggtttatctgccccagtccccagagggaggaaggggaagaagacgaagaaccagttgctaatcccagagctaaaggatgcagattggctagccacctgcaaccccgaggtggtcttgcatgatgatggctataagaaacacctcaaacagcactgcaacaaggtacttttgcgagtccggatgctgtactacctaaaagctgaaatactgggagaagcagctgagaaagcatttgaaggatctcctgccagggagctggatgtacctctgcctgacatcgactacatggagatcccagtggactggtgggatgctgaagccgataagtcacttctcattggcgtgttcaagcatggttatgaaaggtacaatgccatgcgagcagacccagcactttgcttcctggagaaagttgggatgcccgatgagaagtccctttctgcagaacagggtgttacagatgggacctcagacattcctgaa

SEQ ID NO: 9711 - DNA, 7545 bp, Homo sapiens
  SIMILAR (3512)..(3204): 251254mologous to Drosophila melanogaster KISMET-L long isoform,accession number AF215703,Smith-Waterman Score=64.
ctaattggtgtcgttgttggagtctttgagtgccccctccccagcctgtgccccatgttctctctctgcgggcaaaggggcactgggttcggcacagttctcatcaccgctgggctccctttcacagctgggagcaggctctgggtgggagttggggttgtccccctttgtcttcttcttcttcctcttctggctctccagacctactatttccgagtgtctggcctgctgcatggctggcagagccatgcccataccaggggagaggaacatggatgggtaaatgagtccaggagatactcctgggatgagaaatgggttaaaagccacaggactactagtagttattgcaggttcagactgatcagaaaatggacctggaccaggcttgtcctcagctaaagtgtctgttttcacatcatggctactcggcttgtcttccgcagtcttttcagtcactgccgtaccacttttcgttgtgcttgatagagacgccggagcagtggaagtgcaggtggttgccatgggtggactgaggagtcccccaacaccaaacatctggggcacagcagccatgcctggcagcatcatgggcagcatgctcagggtacttttgacctcttcacctgttggcatcgtggcaaagccagctggaaaccccaccagcccggtgagggggatgcctggcatatttctcatgttctgaagtcctaccaggtccatcccagcaatcagtccattcatgaacagtggccccattccagagggagagtctgccacaatggaaggagccttcaggagttcgctccgaggccgcctccccctcctgcgggggcccgtatctcgaagaataggctcagccagagtgtgattgaacttgttttctggaagaaaccctgccccaaagccaggaacttctaaggagtagtcagcctgctgccttagccagtcaagcagactcttgctgggaatggatttctcggcttggctgctggctgccgtagctggctcaggagccgaggtggcaggccctggcccctcagggtgtgtggtgctcaaggtggcctgccctgggtcttcatggacttccaagattcccgcctgaagtgtctgctccttcaaaaagatgaggtccatccctccttcaacatgtttccgcctccctctccgcctcctcgtggctgcatcatctcttctgaggcttccattgacaatctgtccagtcacaggatggatcaggccagcttgcagaatcccagacaagtccatgccaagggctccctgaagtgaactgatagccccaatcttaggggtgctggcgctcactgggaaaggggatgtggctcctggggacccctctgatgagcaggagaggtccatagctgactccccatgccagccattgaggatgataggggtgtgcccgtgggtggcagagaactgctccaggccccgagcctttgcatccctctccacctcaaactcatagggacgcctgtgcttttgttcatcctttgtgaatactggagctaagaagctctccttgtggatctgggccgccaatgctgcgccgttgctgaagctgtgttctgctgcttccggctctgagaggctggttcgagaaccagcactgctggttaataccggggtgggcagtgtgcctgagggctcatactgctggctagagggccacttcccctttaacaccacgtggcagatattatctaggcggttaattatcacgcggtcctttggccactcagagaaggaatagagagttttctcctgtagcagctgagcaatagtgggagctcgagcctcctgtagctcatccccaatgtctcctgtgatgcccgatgttgagctcttgctctcctcttcagagtacttccctggataatcttgactatggcagtttccgtctctatcataatcatctttattctcaaaatccatgtcttctgatttgagctcacttccttcaagaggatatgtggggaaaacgttttgcccctctgcactttctttccaaggttcttttaaaagctcatgcttcactttaaacggctgtgatggaatagcagtgggttcaccctccatggcgatagtattggttttacttttgaacagatctgggatataagccttgggtttctcgatttcaaattcatcattctcgaggccatgcatccacctctccatgtgtttgcagtggcactgacaggctgctggagcggggaaagccctctgtagcccaggagtctggtttgccacctctaagcttcctttcttggtttcatcttggaagccttggttcttttcccttgagatgttagtagtgggctccgtgagatgcaatacctctggcctttcccccatgcctactgccatggctaagttttcctcctcgttttcctcctcttcttcctcctcatcactgtggttctgactcaaaatcaatttactttctaagcttttgttttccaataaatcaattaattgctgatctgatgacaggtttcttttggagtcacagacactaagactgcacatatctacaaacccactttcatttcctggattcaaggaaggggaagctaaacacttggcttccagctggccaatgttttcaggtctctgtcctgcctcactgcagcagagctccccttcctttgaaatagacatcaacaaatgttttccatttttgatgtttgcttgagctactcctcctgcttctaagctacccataaaagtagggccagaagctatttctgcctcagggccaccagactggcagttcccatctttgcttattgagatggtaataacatcttttctagattcagtattggtacttgggctctcctgaaaagagcttggttcttggctgagcaccttcttaccatacatcatgctctctaaggactcaggcagcagactttcatcatggttgatggaaatgacatcctgaactttagaaataaagttttcacatgtcacatcaggcaggctgagatgatcatctctgctttctactctcactagattttcaggttcattttcaagggactctgaagtcctactcatttgagaatatgtaagagattcatataacttggagttggtctggtaaaggcaacagagatttcctggtgcctgggtgccagatcttttatgctgggcatagtttctataggcatccaggaaggacagctgggggtcgttcatgatgtaacagtcagtgcggttcagcccatgtttggcagtgccgatgagcaggtctcgatcatgcttcccacactcccaccagactgggaggtagaggctgggcctgcacagctggaggcgttcatgcagctgagggcacttgagcacttgctctcggactttccgtaacagttcaatgcggtacagagttcttgcagcacgttcctcagtgatgggttcaacgtagatggtggtatctgggggaccgccatctttccatgtgggtagacgacagacattccggcacatggccacaaaactataaaaatactgttccaggctctcatccgacttcttgtccaaacgggaaatgatgcggaactgtgtccagtcaaaggttttcttttcttgatcgtaaacaacaccaaaggaagacactgttctatagaagtctgcttgttctctcctagtccacctcttttgggcttccttgttgatgaggtccatttctgaggttctcctgaacatctcttcctgaacccaatatccttggttacctggtcccagaatttcaggccggcacagttccttgcggttgcagcgctggtaaacagtgaccagacgtctgagacgagctgcccggctgtcatccttcttttcgctaaaaacgccatcacctccatcactggaactctccgtttgtttctggaggccatctactttgtcctcagcattgtcttctttatctgtgttgcctctttcaggaatgtctgaggtcccatctgtaacaccctgttctgcagaaagggacttctcatcgggcatcccaactttctccaggaagcaaagtgctgggtctgctcgcatggcattgtacctttcataaccatgcttgaacacgccaatgagaagtgacttatcggcttcagcatcccaccagtccactgggatctccatgtagtcgatgtcaggcagaggtacatccagctccctggcaggagatccttcaaatgctttctcagctgcttctcccagtatttcagcttttaggtagtacagcatccggactcgcaaaagtactttgttgcagtgctgtttgaggtgtttcttatagccatcatcatgcaagaccacctcggggttgcaggtggctagccaatctgcatcctttagctctgggattagcaactggttcttcgtcttcttccccttcctccctctggggactggggcagataagcctgagtggttctggagggtctgggcttgcccatctttggtaggtgtgatcagttcccaaatgaaactcttgatcttctcgtcccccttataatgcttgacacagtacaccaggagggcacggcaaatcatctccatgtccttctcgttcagatgccacttgaatcggccatgagtcaggatgtccttccaccggccccagccaaagatgagcaggttcttctctacccggaagcactccgctcggaggtagcgcctggctttgtcattgaggcgcctggatctcgtgggcctttcgtctgagtcgctgtctaactctgaaaactccatgagctcgtcttcctcaaacgagttgtagtgtttggtctgctttctcacgcgaggtcggtcgatcactaagctttccttttcattctttgcttcagtgtctagttcagctattttagcccatttctgccaaaagttaggatcatctaaggaaatatctgttctgtttcctgaagccacaaagctagccttggcaaaagtggaccctttcccctcagactggatggtgatggtgtgcgttcgcctctgcagaatctggtctatgtcttcttcacagaacttggagccttcatcttcttcatccattaaggctccataagcacctttccggagtaggtcctccacctccatttttgagagctgctgtaccccattggtgccgccctttcggttgatgtcctgaagaacagccttgtccagccccagctttaggctggccttgtcaaacatctcgcgctcgtaggaatttcgagtgatgaggcgatacaccttcacagctttgctctggcctatgcggtgacatcgggcctgagcccagtgccagaatccctggatatggaagcccccacccatgccctgcccacattcttcccctaacctcatggctgaaaatgacaccagaattcctatacttagtactaaagcggcccaaacactaagaagcccagtaagtactcttcccctcggagcagtgtgggagtttcctgagtcctgcttctggcgattgtggaaagggcctgtctcctcactctggactcccaactgacttccaaaatcctgcagacatgcagcagctgcattatcttgtggctgtgctcttggccaggacatctgctcccacactttctgaattctgccttcagggacctgcaagtcattttgtgggttccagtcagaatcaaatatgatgcaggtatcagcagctgtgagattgatccccaggcctcccgctctggtgcacagaagaaagacaaagcggtctgaatctggcttacagaaccggtcgatggctgcctggcgcaggtttccccgtactcgcccatcaattcgctcataggtgtatcttctctggatgaggtaatcttctaggatgtcgaggcagcgcaccatctgggagaagatgagtactttgtggccacctgcaatcagcttagggagtagtttatcaatcaacacaagctttcctgctgcctgaatcatggcctgcagctgaaagtcaggggcatcagggctgtgggtttttcggaaatcttctagaattttctcctctgctccattgatcaggtagggatggttacagcacttcctcagctccatcatggtgttgatgagattgggcatgttgtgctgatttgcccccttggtcaggaaggaaaagttcttctcgaggatggcacggtagtactttttctggatattggtcagttccacctcaatgatcgtctcttgtttgggagcaaggttcttttccacatcatctttcagccgccgaagcatcattggttttaggatagactgcagtttctttacctgctcctctgttttcagatctccaaattcctccaagaaagcggtctctgaaggaaactgtgatggctccagaaaatttaacaaactgaagagctcctccacagagttctgcaagggtgttccagtgagaagcactttatgttccagggccataagctttagaccctccagaagtttgcagttcctattcttcagtctgtgggcttcatcaattatcacacagctccagtgaatcttcttcaactctgggcagtctgctaggatcatttcaaatgttgtgatgacgacgtggaacttgaagactcctgaaagggggtttccctgggcgtctctgtacaccatttcatactgctggatcatctgcctgctgatctggctgccgtggtacacaatggcattcatctctgtccatgtccggaactcccgctcccagttagtgatggtggagagaggggcgataatgagaaaagggccgtggattcctctcagaaatatttctgaaaggaatgtgatggactggatggttttccctaggcccatctcatcagccaaaatacagttttttctgttataccagttaaaaagaagccagttcatcccttccagctggtactcccggagctggttactgttcttatactcgcgagacttctcaagtttctgccaggagtctgaagcaggccgctccacatgcttaatttcagggagaacttgaagagattcaaattctttaacttttgcaggatctacatcttcctctagctcccacgtgctttcttcatatggtagtgagcaccacttcaccaggtaatgtgttacctcctcccctgtttctgcatccttggtgtgggccacctccaagatgcgatcaacttctacatagtctggattgaacaagtcttcatcaggcattgtgcagtccgctctccacctatgccccattcccaccatgacagtcctcttgcagctgccctcaggttttgcaaagtccctcactgaatcctccgtaaaaatgtgcttcatctgggcttgtttattcctaaatcgcttgatcttctgtgcgatgcgaggatccttttcgagctcttccattgtggcccatttacaatgtaagtaggaaaaatttctatacttaacgtagaacagctccaagtcgaacggaggttctcctgggtgaacctcctggacagtcttagatgccaggatcttctcaatgatgtttgcatcatcttctggaggctc

SEQ ID NO: 9712 - DNA, 1955 bp, Homo sapiens
  SIMILAR (99)..(173): 281254mologous to Homo sapiens dJ620E11.1 (novel Helicase C- terminal domain and SNF2 N-terminal domains containing protein, similar to KIAA0308),accession number AL031667,Smith-Waterman Score =44.
atgaacttcaagctttcttattgcaaggaggacctctgtaacacagtgggccaagtggcaggagtacttactgggcttcttagtgtttgggccgctttagtactaagtataggaattctggtgtcattttcagccatgaggttaggggaagaatgtgggcagggcatgggtgggggcttccatatccagggattctggcactggggagaaaaaacattcccgctaaaagagactaggacttctggaaacaaaatggctgaagccaggtctggacaggaaatgtacaagaggagtgtggaatatgttgaaagcaagggaactattgaaagactaccagtctttgatataacatacaaacataaatgtacacatatccatacctatttctatatctgtgctcaggcccgatgtcaccgcataggccagagcaaagctgtgaaggtgtatcgcctcatcactcgaaattcctacgagcgcgagatgtttgacaaggccagcctaaagctggggctggacaaggctgttcttcaggacatcaaccgaaagggcggcaccaatggggtacagcagctctcaaaaatggaggtggaggacctactccggaaaggtgcttatggagccttaatggatgaagaagatgaaggctccaagttctgtgaagaagacatagaccagattctgcagaggcgaacgcacaccatcaccatccagtctgaggggaaagggtccacttttgccaaggctagctttgtggcttcaggaaacagaacagatatttccttagatgatcctaacttttggcagaaatgggctaaaatagctgaactagacactgaagcaaagaatgaaaaggaaagcttagtgatcgaccgacctcgcgtgagaaagcagaccaaacactacaactcgtttgaggaagacgagctcatggagttttcagagttagacagcgactcagacgaaaggcccacgagatccaggcgcctcaatgacaaagccaggcgctacctccgagcggagtgcttccgggtagagaagaacctgctcatctttggctggggccggtggaaggacatcctgactcatggccgattcaagtggcatctgaacgagaaggacatggagatgatttgccgtgccctcctggtgtactgtgtcaagcattataagggggacgagaagatcaagagtttcatttgggaactgatcacacctaccaaagatgggcaagcccagaccctccagaaccactcaggcttatctgccccagtccccagagggaggaaggggaagaagacgaagaaccagttgctaatcccagagctaaaggatgcagattggctagccacctgcaaccccgaggtggtcttgcatgatgatggctataagaaacacctcaaacagcactgcaacaaagtacttttgcgagtccggatgctgtactacctaaaagctgaaatactgggagaagcagctgagaaagcatttgaaggatctcctgccagggagctggatgtacctctgcctgacatcgactacatggagataccagtggactggtgggatgctgaagccgataagtcacttctcattggcgtgttcaagcatggttatgaaaggtacaatgccatgcgaggcagacccagcactttgcttcctggagaaagttgggatgcccgatgagaagtccctttctgcagaacagggtgttacagatgggacctcagacattcctgaaagaggcaacacagataaagaagacaatgctgaggacaaagtagatggcctccagaaacaaacggagagttccagtgatggaggtgatggcgtttttagcgaaaagaaggatgacagccgggcagcccaggatggctccgacccagacaaatcgccctggccagtttcctccgccctcacagctcgtctcagacgtctggtcactgtttaccagcgct

SEQ ID NO: 9713 - DNA, 1459 bp, Homo sapiens
  SIMILAR (338)..(421): 921254mologous to Mus musculus LPIN3,accession number AF286724,Smith-Waterman Score=144.
cgcagtgcccagaaggagaagactgcagccaaggagcagcagggggagaagacagaagtcctgagcagtgatgacgatgccccagacagccctgtgatcctggagatcccctccttgccaccctccactccaccctccactcctacctacaagaagtccctccgcctctcctccgatcagatccggcgcctgaacctgcaagaaggtgccaatgatgtggtcttcagcgtgaccactcagtaccagggcacctgccgctgcaaggccaccatctacctgtggaaatgggacgacaaggtggtcatctctgacatcgacggcaccatcaccaagtcagaatgctttgggccatatcctgccccagctggggaaagactggacacaccagggcatcaccagtctctatcacaaaatccaacttggtcagttagtgatgccccttgacgctcgaccagaacgtcccatggatggaatgaaggtgcgggcatttatggagcgcctgctgtttgtcaggcgaggtactgataagcgctggagtgtaaggatgtacgtgacctgctctcagagttcaaatttaaatgaagagatatacattaatcaagtagtcattcaagcaaatatgaaattacaactgtgggctatgcgaacagatgacgcgaggggcctgtccagtctgggagatacggaaccttccccttgtccctctgtggttcctgggctccaacccaagcctgcccctgtctgtgcgggtgatgctctgctgcaagcccaaatccctggggtcctccttggcaccctcttttctggggccgccttctactctggcctgtatgggggctcagagcagttcttggaccacctccttcacccggctcgcgccgcgccgcccccgccgctggtcggcccgggtcccgccccgagggtcccggggtccccttcggcccccgagctcgctggcccggccgtctggcgcttcgcggcggctgcgtcccgcggagtggtcgtcgctgctagcggctggggccgcggaggggaggcatcccagactttccagaccggcaaagagcccggaggcacaaggcacccaacacggatgcccctgggcagcacgggctgcattttccctggaacactggaaaagagccaaggttatgaaaggtacaatgccatgcgagcagacccagcactttgcttcctggagaaagttgggatgcccgatgagaagtccctttctgcagaacagggtgttacagatgggacctcagacattcctgaaagagcaaggcagaatgaggagcagctgacctcctttggtttactgtggccaaccccacagggatctaccgaccacattgacaaccaccccagagaaagatacccagaaatgagatgggagctggatgtacctttgcctgacatcgactacatggaaatcccagtggactggtgggatgcttaa

SEQ ID NO: 9714 - DNA, 4805 bp, Homo sapiens; identical to SEQ ID NO: 9408
  SIMILAR (3)..(1211): 941254mologous to Homo sapiens PEX1,accession number AB008112,Smith-Waterman Score=1934.

SEQ ID NO: 9715 - DNA, 900 bp, Homo sapiens; identical to SEQ ID NO: 3403
  SIMILAR (238)..(897): 881254mologous to multiple sclerosis associated retrovirus polyprotein,accession number AF009668,Smith-Waterman Score=1019.

SEQ ID NO: 9716 - DNA, 1219 bp, Homo sapiens
  SIMILAR (399)..(4): 871254mologous to Homo sapiens syncytin precursor,accession number AF208161,Smith-Waterman Score=575.
ttatattcgaccttgaatttctttaactttctcggtgatgattccggattgattaacataacaacagcatttttcctctaaaaataaaaaggttcccccgctttccgcggttagcaagtctaaagctcttcgattttgaaggactactgctgctagggagttaagttgatcttgcaaggtgaccagggtatcagcgacccattccatgtcaccatttagttcttgagacagtttgtagtagaactgagtagaggttgtgataccgccaatgccagtagctactccgcctagcactcctgctccaataacaaaaggaagaatgggtactcttttgttgcggggcttaggtatgacatgattgtataaatcttgttcagtgtagatgggcataggggccacagggtggaatagttcctttccctcttcttggggacaggctccctgtaatgttttaagaacctgttgatatttggctaaggagatgatgtctgcaactaagttggctgtctctcggtcaagcccaagttcattggttaggaagggccgtccatacagcattttgtatggactaagtcctgctttttggggagagtttcggattcttagtaaggctaacacctgggatactccttgggttactgtagccttgaaagcagggccattgtcactctgtaagccttggggaagtccgaatctgggaattatttcatgaacgtttattacctcttgggccttttctgtcctacaggggaaggcctctgcccaaccagtgaaagtatctacccagaatagtagatactgaaatccctgagatttgggcatgtgggtaaaatctagttgccagtcttctcctgggtaaatggcctgttctttgttctcctgaaggagcttggcgataaggcaggggattatttctttggcacacttcacaggccctgactatctgcttgatagttttgaaaaggcctggtccagtaaataatgatttggccatctgatgggtgctatcaatacctaagtgaagggtttggtgaagggttttaagtaatttccattggttagctgcaggcaaaagtatttttccttctttggtggctagccatcctgaggggaggaaactatgtccccgtgaggttccccattctatttcttcttctgagtactggggcttggtttcctggaggggattaccccatactaggtgtccttctataagcat

SEQ ID NO: 9717 - DNA, 497 bp, Homo sapiens
  SIMILAR (394)..(495): 761254mologous to Homo sapiens envelope protein precursor,accession number AF072506,Smith-Waterman Score=119.
gaatggggaacctcacgaggacatagtttcctcccctcaggatggttagccaccaaagaaggaaaaatacttttgcctgcagctaaccaatggaaattacttaaaactcttcaccaaacctttcacttaggcattgatagcactcatcagatggctgaatctttatttactggaccaggccttttcaaaactaacaagcagatagtcagggcctgtgaagtgtgccaaagaaataatcccctgcactgcaggccatacatttcaatccctgtatctttttaacctccttgttaagtttgtctcttccagaatcaaagctataaaactacaaatggttctccaaatggagccccagatgcagtccatgactaagatctactgcggacctctggaccggcctgctagcccagctcccacattaatgacatcaaaggcacccctcccgaggaaatctcaactgcatgacacctactacgccccaattcagcaggaagcag

SEQ ID NO: 9718 - DNA, 6507 bp, Homo sapiens; identical to SEQ ID NO: 9411
  SIMILAR (1153)..(2754): 881254mologous to Homo sapiens PEX1,accession number AB008112,Smith-Waterman Score=2320.

SEQ ID NO: 9719 - DNA, 5424 bp, Homo sapiens
  SIMILAR (3868)..(5421): 1001254mologous to Homo sapiens PS118 protein encoded by consensus sequence,accession number W85472,Smith-Waterman Score= 2698.
gggagcccacagcgtctctgtgacttggcaggacccagctccactgaatcagagtccagaaaaagatcaatttcaaaaagaaagtctcatctggatctcctcaaactcatcatggatggcatgaccgaagcatgcatcaagggtggcatcgaagcttgctatgcagccgtgtcctgtgtctgcaccttgctgggtgccctggatgagctcagccaggggaagggcttgagcgaaggtcaggtgcaactgctgcttctgcgccttgaggagctgaaggatggggctgagtggagccgagattccatggagatcaatgaggctgacttccgctggcagcggcgagtgctgtcctcagaacacacgccgtgggagtcagggaacgagaggagccttgacatcagcatcagtgtcaccacagacacaggccagaccactctcgagggagagttgggtcagactacacccgaggaccattcgggaaaccacaagaacagtctcaagtcgccagccatcccagagggtaaggagacgctgagcaaagtattggaaacagaggcggtagaccagccagatgtcgtgcagagaagccacacggtcccttaccctgacataactaacttcctgtcagtagactgcaggacaaggtcctatggatctaggtatagtgagagcaattttagcgttgatgaccaagacctttctaggacagagtttgattcctgtgatcagtactctatggcagcagaaaaggactcgggcaggtccgacgtgtcagacattgggtcggacaactgttcactagccgatgaagagcagacaccccgggactgcctaggccaccggtccctgcgaactgccgccctgtctctaaaactgctgaagaaccaggaggcggatcagcacagcgccaggctgttcatacagtccctggaaggcctcctccctcggctcctgtctctctccaatgtagaggaggtggacaccgctctgcagaactttgcctctactttctgctcaggcatgatgcactctcctggctttgacgggaatagcagcctcagcttccagatgctgatgaacgcagacagcctctacacagctgcacactgcgccctgctcctcaacctgaagctctcccacggtgactactacaggaagcggccgaccctggcgccaggcgtgatgaaggacttcatgaagcaggtgcagaccagcggcgtgctgatggtcttctctcaggcctggattgaggagctctaccatcaggtgctcgacaggaacatgcttggagaggctggctattggggcagcccagaagataacagccttcccctcatcacaatgctgaccgatattgacggcttagagagcagtgccattggtggccagctgatggcctcggctgctacagagtctcctttcgcccagagcaggagaattgatgactccacagtggcaggcgtggcatttgctcgctatattctggtgggctgctggaagaacttgatcgatactttatcaaccccactgactggtcgaatggcggggagctccaaagggctggccttcattctgggagctgaaggcatcaaagagcagaaccagaaggagcgggacgccatctgcatgagcctcgacgggctgcggaaagccgcacggctgagctgcgctctaggcgttgctgctaactgcgcctcagcccttgcccagatggcagctgcctcctgtgtccaagaagaaaaagaagagagggaggcccaagaacccagtgatgccatcacacaagtgaaactaaaagtggagcagaaactggagcagattgggaaggtgcagggggtgtggctgcacactgcccacgtcttgtgcatggaggccatcctcagcgtaggcctggagatgggaagccacaacccggactgctggccacacgtgttcagggtgtgtgaatacgtgggcaccctggagcacaaccacttcagcgatggtgcctcgcagccccctctgaccatcagccagccccagaaggccactggaagcgctggcctccttggggaccccgagtgtgagggctcgccccccgagcacagcccggagcaggggcgctccctgagcacggcccctgtcgtccagcccctgtccatccaggacctcgtccgggaaggcagccggggtcgggcctccgacttccgcggcgggagcctcatgagcgggagcagcgcggccaaggtggtgctcaccctctccacgcaagccgacaggctctttgaagatgctacggataagttgaacctcatggccttgggaggttttctttaccagctgaagaaagcatcgcagtctcagcttttccattctgttacagatacagttgattactctctggcaatgccaggagaagttaaatccactcaagaccgaaaaagcgccctccacctgttccgcctggggaatgccatgctgaggattgtgcggagcaaagcacggcccctgctccacgtgatgcgctgctggagccttgtggccccacacctggtggaggctgcttgccataaggaaagacatgtgtctcagaaggctgtttccttcatccatgacatactgacagaagtcctcactgactggaatgagccacctcattttcacttcaatgaagcactcttccgacctttcgagcgcattatgcagctggaattgtgtgatgaggacgtccaagaccaggttgtcacatccattggtgagctggttgaagtgtgttccacgcagatccagtcgggatggagacccttgttcagtgccctggaaacagtgcatggcgggaacaagtcagagatgaaggagtacctggttggtgactactccatgggaaaaggccaagctccagtgtttgatgtatttgaagcttttctcaatactgacaacatccaggtctttgctaatgcagccactagctacatcatgtgccttatgaagtttgtcaaaggactgggggaggtggactgtaaagagattggagactgtgccccagcacccggagccccgtccacagacctgtgcctcccggccctggattacctcaggcgctgctctcagttattggccaaaatctacaaaatgcccttgaagccaatattccttagtgggagacttgccggcttgcctcgaagacttcaggaacagtcagccagcagtgaggatggaattgaatcagtcctgtctgattttgatgatgacaccggtctgatagaagtctggataatcctgctggagcagctgacagcggctgtgtccaattgtccacggcagcaccaaccaccaactctggatttactctttgagctgttgagagatgtgacgaaaacaccaggaccagggtttggtatctatgcagtggttcacctcctccttcctgtgatgtccgtttggctccgccggagccataaagaccattcctactgggatatggcctctgccaatttcaagcacgctattggtctgtcctgtgagctggtggtggagcacattcaaagctttctacattcagatatcaggtacgagagcatgatcaataccatgctgaaggacctctttgagttgctggtcgcctgtgtggccaagcccactgaaaccatctccagagtgggctgctcctgtattagatacgtccttgtgacagcgggccctgtgttcactgaggagatgtggaggcttgcctgctgtgccctgcaagatgcgttctctgccacactcaagccagtgaaggacctgctgggctgcttccacagcggcacggagagcttcagcggggaaggctgccaggtgcgagtggcggccccgtcctcctccccaagtgccgaggccgagtactggcgcatccgagccatggcccagcaggtgtttatgctggacacccagtgctcaccaaagacaccaaacaactttgaccacgctcagtcctgccagctcattattgagctgcctcctgatgaaaaaccaaatggacacaccaagaaaagcgtgtctttcagggaaattgtggtgagcctgctgtctcatcaggtgttactccagaacttatatgacatcttgttagaagagtttgtcaaaggcccctctcctggagaggaaaagacgatacaagtgccagaagccaagctggctggcttcctcagatacatctctatgcagaacttggcagtcatattcgacctgctgctggactcttataggactgccagggagtttgacaccagccccgggctgaagtgcctgctgaagaaagtgtctggcatcgggggcgccgccaacctctaccgccagtctgcgatgagctttaacatttatttccacgccctggtgtgtgctgttctcaccaatcaagaaaccatcacggccgagcaagtgaagaaggtcctttttgaggacgacgagagaagcacggattcttcccagcagtgttcatctgaggatgaagacatctttgaggaaaccgcccaggtcagccccccgagaggcaaggagaagagacagtggcgggcacggatgcccttgctcagcgtccagcctgtcagcaacgcagattgggtgtggctggtcaagaggctgcacaagctgtgcatggaactgtgcaacaactacatccagatgcacttggacctggagaactgtatggaggagcctcccatcttcaagggcgacccgttcttcatcctgccctccttccagtccgagtcatccaccccatccaccgggggcttctctgggaaagaaaccccttccgaggatgacagaagccagtcccgggagcacatgggcgagtccctgagcctgaaggccggtggtggggacctgctgctgccccccagccccaaagtggagaagaaggatcccagccggaagaaggagtggtgggagaatgcggggaacaaaatctacaccatggcagccgacaagaccatttcaaagttgatgaccgaatacaaaaagaggaaacagcagcacaacctgtccgcgttccccaaagaggtcaaagtggagaagaaaggagagccactgggtcccaggggccaggactccccgctgcttcagcgtccccagcacttgatggaccaagggcaaatgcggcattccttcagcgcaggccccgagctgctgcgacaggacaagaggccccgctcaggctccaccgggagctccctcagtgtctcggtgagagacgcagaagcacagatccaggcatggaccaacatggtgctaacagttctcaatcagattcagattctcccagaccagaccttcacggccctccagcccgcagtgttcccgtgcatcagtcagctgacctgtcacgtgaccgacatcagagttcgccaggctgtgagggagtggctgggcagggtgggccgtgtctatgacatcattgtgtag

SEQ ID NO: 9720 - DNA, 470 bp, Homo sapiens
  SIMILAR (1)..(300): 991254mologous to Homo sapiens PS118 protein encoded by consensus sequence,accession number W85472,Smith-Waterman Score= 506.
cattccttcagcgcaggccccgagctgctgcgacaggacaagaggccccgctcaggctccaccgggagctccctcagtgtctcggtgagagacgcagaagcacagatccaggcatggaccaacatggtgctaacagttctcaatcagattcagattctcccagaccagaccttcacggccctccagcccgcagtgttcccgtgcatcagtcagctgacctgtcacgtgaccgacatcagagttcgccaggctgcgagggagtggctgggcagggtgggccgtgtctatgacatcattgtgtagccgactcctgttctactctcccaccaaataacagtagtgagggttagagtcctgccaatacagctgttgcattttccccaccactagccccacttaaactactactactgtctcagagaacagtgtttcctaatgtaaaaagcctttccaaccactgatcagcatta

SEQ ID NO: 9721 - DNA, 741 bp, Homo sapiens
caactttaaggtaatatacttttggctataaatacaggcaactaaaaacaatgtataaactctcattctgcttaggtctgtaaatacatgctaataactgttcgtaactttaaaaggctgccttgaattttgtcttactgttgctgcaaaagagactgtgaggagagaaacacctgacactttcagagactgggagggagggaaacaaagttgggggagtgggcagctgagtcacaggaacagggcaagagactgagctgggcagcctgggaaggtgccactcccctctcagtgttcttcatctcctccctttcttctccacctgctgggaagaacccacctgaatgccctactcattagagactactttgcatcaagctgcaaatacctctgagaagtactgctgtcactcagtgatggttctggttgaaatctgatgtcagtgtggatggctggtaactcgagtgcagagtatgttaggactgagttatagagaagacaatgggaaggtaccaaaacactcttaaaaaattgtaggtcaagagctctgtacacctactcatccttttattcttgggacccataatcaggctagaactagaacagtgtttggacacagtacagggtaaacttatgttcaagaattttggatcctataatagagcatcggggagaatgctgatttccaaacaaacaactaacatactttgggatacagtattcacccatcgtgccgaatct

SEQ ID NO: 9722 - DNA, 5956 bp, Homo sapiens
  SIMILAR (4227)..(4754): 961254mologous to Homo sapiens PS118 protein encoded by consensus sequence,accession number W85472,Smith-Waterman Score= 876.
atggatggcatgaccgaagcatgcatcaagggtggcatcgaagcttgctatgcagccgtgtcctgtgtctgcaccttgctgggtgccctggatgagctcagccaggggaagggcttgagcgaaggtcaggtgcaactgctgcttctgcgccttgaggagctgaaggatggggctgagtggagccgagattccatggagatcaatgaggctgacttccgctggcagcggcgagtgctgtcctcagaacacacgccgtgggagtcagggaacgagaggagccttgacatcagcatcagtgtcaccacagacacaggccagaccactctcgagggagagttgggtcagactacacccgaggaccattcgggaaaccacaagaacagtctcaagtcgccagccatcccagagggtaaggagacgctgagcaaagtattggaaacagaggcggtagaccagccagatgtcgtgcagagaagccacacgggtcccttaccctgacataactaacttcctgtcagtagactgcaggacaaggtcctatggatctaggtatagtgagagcaattttagcgttgatgaccaagacctttctaggacagagttttgattcctgtgatcagtactctatgggcagcagaaaaggactcgggcaggtccgacgtgtcagacattgggtcggacaactgttcactagccgatgaagagcagacaccccgggactgcctaggccaccggtccctgcgaactgccgccctgtctctaaaactgctgaagaaccaggaggcggatcagcacagcgccaggctgttcatacagtccctggaaggcctcctccctcggctcctgtctctctccaatgtagaggaggtggacaccgctctgcagaactttgcctctactttctgctcaggcatgatgcactctcctggctttgacgggaatagcagcctcagcttccagatgctgatgaacgcagacagcctctacacagctgcacactgcgccctgctcctcaacctgaagctctcccacggtgactactacaggaagcggccgaccctggcgccaggcgtgatgaaggacttcatgaagcaggtgcagaccagcggcgtgctgatggtcttctctcaggcctggattgaggagctctaccatcaggtgctcgaccaggaacatgcttggagaggctggctattggggcagcccagaagataacagccttcccctcatcacaatgctgaccgatattgacggcttagagagcagtgccattggtggccagctgatggcctcggctgctacagagtctcctttcgcccagagcagggagaatttgatgacttccacaagtggcaggcgttggcaatttgctcgctatattctggtgggctgcttggaagaacttgatcgatactttatcaaccccactgactggtcgaatggcggggagctccaaagggctggccttcattctgggagctgaaggcatcaaagagcagaaccagaaggagcgggacgccatctgcatgagcctcgacgggctgcggaaagccgcacggctgagctgcgctctagcccttgcccagatggcagctgcctcctgtgtccaagaagaaaaagaagagagggaggcccaagaacccagtgatgccatcacacaaggtaacaactggagggccagaacccacctggtgccttgggtgcagtatgcacacacctgcacaggcctacacacgccagccaacactcgtgcctgttctgtgtgtgatgcccgtgaaactaaaagtggagcagaaactggagcagattgggaaggtgcagggggtgtggctgcacactgcccacgtcttgtgcatggaggccatcctcagcgtaggcctggagatgggaagccacaacccggactgctggccacacgtgttcaggtgcatgacgggctcccacccccagatggcactaaccctgccttgggaaacctggagtgggctgtggcagaacatcagagtggattatccatgatgctctttaccagtaaacagacttactccgagatgagggaccttgcgaaccatcttcgtcccagggtgtgtgaatacgtgggcaccctggagcacaaccacttcagcgatggtgcctcgcagccccctctgaccatcagccagccccagaaggccactggaagcgctggcctccttggggaccccgagtgtgagggctcgccccccgagcacagcccggagcaggggcgctccctgagcacggcccctgtcgtccagcccctgtccatccaggacctcgtccgggaaggcagccggggtcgggcctccgacttccgcggcgggagcctcatgagcgggagcagcgcggccaaggtggtgctcaccctctccacgcaagccgacaggctctttgaagatgctacggataagttgaacctcatggccttgggaggttttctttaccagctgaagaaagcatcgcagtctcagcttttccattctgttacagatacagttgattactctctggcaatgccagcaattttaggagtgggcagtattatccccaggtttacagatgagatcattaaagaggaaaatctttggcccagtataacacaactactaaatggtgccaggattcgaatccagacggtcggacttctcggccctcctactgaaccgctacctcattccctcttatcatcaagttttgatcatacctgtcacgtcccaggagaagttaaatccactcaagaccgaaaaagcgccctccacctgttccgcctggggaatgccatgctgaggattgtgcggagcaaagcacggcccctgctccacgtgatgcgctgctggagccttgtggccccacacctggtggaggtgagcactgggaaggctgcttgccataaggaaagacatgtgtctcagaaggctgtttccttcatccatgacatactgacagaagtcctcactgactggaatgagccacctcattttcacttcaatgaagcactcttccgacctttcgagcgcattatgcagctggaattgtgtgatgaggacgtccaagaccaggttgtcacatccattggtgagctggttgaagtgtgttccacgcagatccagtcgggatggagacccttgttcagtgccctggaaacagtgcatggcgggaacaagtcagagatgaaggagtacctggttggtgactactccatgggaaaaggccaagctccagtgtttgatgtatttgaagcttttctcaatactgacaacatccaggtctttgctaatgcagccactagctacatcatgtgccttatgaagtttgtcaaaggactgggggaggtggactgtaaagagattggagactgtgccccagcacccggagccccgtccacagacctgtgcctcccggccctggattacctcaggcgctgctctcagttattggccaaaatctacaaaatgcccttgaagccaatattccttagtgggagacttgccggcttgcctcgaagacttcaggaacagtcagccagcagtgaggatggaattgaatcagtcctgtctgattttgatgatgacaccggtctgatagaagtctggataatcctgctggagcagctgacagcggctgtgtccaattgtccacggcagcaccaaccaccaactctggatttactctttgagctgttgagagatgtgacgaaaacaccaggaccagggtttggtatctatgcagtggttcacctcctccttcctgtgatgtccgtttggctccgccggagccataaagaccattcctactgggatatggcctctgccaatttcaagcacgctattggtctgtcctgtgagctggtggtggagcacattcaaagctttctacattcagatatcaggtacgagagcatgatcaataccatgctgaaggacctctttgagttgctggtcgcctgtgtggccaagcccactgaaaccatctccagagtgggctgctcctgtattagatacgtccttgtgacagcgggccctgtgttcactgaggagatgtggaggcttgcctgctgtgccctgcaagatgcgttctctgccacactcaagccagtgaaggacctgctgggctgcttccacagcggcacggagagcttcagcggggaaggctgccaggtgcgagtggcggccccgtcctcctccccaagtgccgaggccgagtactggcgcatccgagccatggcccagcaggtgtttatgctggacacccagtgctcaccaaagacaccaaacaactttgaccacgctcagtcctgccagctcattattgagctgcctcctgatgaaaaaccaaatggacacaccaagaaaagggaaattgtggtgagcctgctgtctcatcaggtgttactccagaacttatatgacatcttgttagaagagtttgtcaaaggcccctctcctggagaggaaaagacgatacaagtgccagaagccaagctggctggcttcctcagatacatctctatgcagaacttggcagtcatattcgacctgctgctggactcttataggactgccagggagtttgacaccagccccgggctgaagtgcctgctgaagaaagtgtctggcatcgggggcgccgccaacctctaccgccagtctgcgatgagctttaacatttatttccacgccctggtgtgtgctgttctcaccaatcaagaaaccatcacggccgagcaagtggaagaaggtcctttttgaggacgacggagagaagcacggattcttcccagcagtgttcatctgaggatgaagacatctttgaggaaaccgcccaggtcagccccccgagaggcaaggagaagagacagtggcgggcacggatgcccttgctcagcgtccagcctgtcagcaacgcagattgggtgtggctggtcaagaggctgcacaagctgtgcatggaactgtgcaacaactacatccagatgcacttggacctggagaactgtatggaggagcctcccatcttcaagggcgacccgttcttcatcctgccctccttccagtccgagtcatccaccccatccaccgggggcttctctgggaaagaaaccccttccgaggatgacagaagccagtcccgggagcacatgggcgagtccctgagcctgaaggccggtggtggggacctgctgctgccccccagccccaaagtggagaagaaggatcccagccggaagaaggagtggtgggagaatgcggggaacaaaatctacaccatggcagccgacaagaccatttcaaagttgatgaccgaatacaaaaagaggaaacagcagcacaacctgtccgcgttccccaaagaggtcaaagtggagaagaaaggagagccactgggtcccaggggccaggactccccgctgcttcagcgtccccagcacttgatggaccaagggcaaatgcggcattccttcagcgcaggccccgagctgctgcgacaggacaagaggccccgctcaggctccaccgggagctccctcagtgtctcggtgagagacgcagaagcacagatccaggcatggaccaacatggtgctaacagttctcaatcagattcagattctcccagaccagaccttcacggccctccagcccgcagtgttcccgtgcatcagtcagctgacctgtcacgtgaccgacatcagagttcgccaggctgtactgtgttgtacctttatttctgtatttctaaaagaagaaagttctttcctagcagggtttgaagtctgtggcttatcagcctgtgacacagagtacccagtgaaagtggctgtcctaacatactctgcactcgagttaccagccatccacactgacatcagatttcaaccagaaccatcactgagtgacagcagtacttctcagaggtatttgcagcttgatgcaaagtag

SEQ ID NO: 9723 - DNA, 2220 bp, Homo sapiens; identical to SEQ ID NO: 3408
  SIMILAR (7)..(1065): 1001254mologous to Cloning vector pSacBII SacB,accession number U09128,Smith-Waterman Score=1866.

SEQ ID NO: 9724 - DNA, 1726 bp, Homo sapiens
  SIMILAR (1)..(801): 821254mologous to multiple sclerosis associated retrovirus polyprotein,accession number AF009668,Smith-Waterman Score=1179.
atgcctgaaattgccacacccttgttagggagagacattctagcaaaaacaggggccattatacacctgaacataggagaaggaacacccgtttgttgtcccctgcttgaagtctgggtaacagaaggacaatatggacgagcaaagaatgcccgtcctgttcgagttaaactaaaggattctgcctcctttccctaccaaaggcagtacccccttagacccgaggcccaacaaggactccaaaaaattgttaaggacctaaaagcccaaggcctagtaaaaccgtgcagtagcccctgcaatactacaattttaggagtacagaaacccaatggacagtggaggttagtgcaagatttcgggattatcaatgaggccattgtccatctacacccagctgtacctaacccttatactctgctttcccaaataccagaggaagcagagtggtttacagtcctggaccttaaggatgcctttttctgtatccctgtacatcctgactctcaattcttgtttgcctttgaagatcctttgaacccaacatctcaactcacctggactgttttaccccaagggttcagggatagctcccatctatttggccaggcattaacccgagacttaagccagttctcatacctggacactcttgtcctttggtacatggatgatttacttttagctgcccattcagaaaccttgtgccatcaagccacccaagcgctcttaaatttccttgctgcctgtgactacaaggtttccaaaccaaaagttcagctctgctctcagcagggaagagattttactgtgtggacatctcatgatgtgaacggcatactgactgctaaaggagacttgtggctgtcagacaaccgtttacttaaatatcaggctctattacttgaagggccagtgctgcgactgcgcatttgtgcaactcttaacccagtcccatttcttccggacaatgaagaaaagatagaacataactgtcaacaagtaattgctcaaacctacaccgctcgagggggaccctttagagcaatatggagagaaggggaattcctaatttctgagggaacacctatcaaacatcaggaagccattaggagattattattcgctgtacagcaacctaaagaagtgacagtcttacactgccggggtcatcagaaaggaaaggaaagggaaatagaagggaaccgccaagaggatattgaagccaaaagagccgcaaggcaggaccctccattagaaatgcttataaaaggacccgtagtatggggtaatcccctccgggaaaccaagccccagtactcagaagaagaaatagaatgggggaccccacgagggccatagtttcctcccctcagaatggccagccaccgaagaaggaaaaatacttatgcctgcagctaaccaatggaaattacttaaaacccttcaccatatctttctcttaggcattaatagcacccatcagatggtcaaattattatttactagaccaggccttttcaaaactatcaagcagatagtcaaggcctgtgaagtgtgccaaagaaataatcccctgcactgcagcccatacatttcaatccctttatctttaacctccttgttaagtttgtctcttccagaatcaaagctgtaaaactacaaatagttcttcaaatggagccccagatgcagtccatgactaagatctaccatggacccctgg

SEQ ID NO: 9725 - DNA, 780 bp, Homo sapiens
  SIMILAR (205)..(642): 521254mologous to multiple sclerosis associated retrovirus polyprotein,accession number AF009668,Smith-Waterman Score=380.
atgaatattaaaaatccaatagctgctcagcatctggataaccttcctattgtaaaagccagcagcattggaatgacttggggacttgttagaaatggagtctcagcccccacccagaagtcctgcatcagaatccacatcttagcaagatgcacaggtgcagttgcatttgagaagctctacttcaagagccctgccaaccaggcccatgctaggaaggtgggaaaacaggtgcaggactgctacattgggagagacattgtagcaaaagcaggggccattatacatctgaacgtaggaaaaggaacacctgtttgttgtcccctgcttgaagaaggaattaattctgaagtctggacaacagaaggacaatatggacgagccaaagaatgcccgtcctgttcaagttaaactaaaggattccacctcctttccctaccaaaggcagtacccgcttagacccaaggcccaacaaagggcttccaaaagattgttaaggacctaaaagcccaaggcctagtaaaaccatgcagtaacccctgcagtactccaattttaggagtacagaaacccaacagacagtggagaattgaagctctaaagctacaaattgttcttcaaatggagccccagatgcagtccatgactaaaatctaccacggacccctgggccggcctgctagtccatgctctgatgttaatgacatcgagggcaatcctaccaaggaaatctcaactgcaccacccctactatgccccaattcagcaggaagcagttag

SEQ ID NO: 9726 - DNA, 415 bp, Homo sapiens
  SIMILAR (10)..(156): 671254mologous to Drosophila melanogaster EG:118B3.2,accession number AF181633,Smith-Waterman Score=169.
ccacgcgtccgcccacgcgtccggctggctttccaggcagctgaaagtgtcggcatcaaatccacactggacattaatgaaatggtacggactgaacgacccgactggcagaacgtgatgctgtatgtgacggcgatctacaagtactttgagacctgcaggccggtggctgctggagttttccttctgaagagaatattgaactacactggtgcctcatgggatgggggggtaggggtccccaggatcttctggaggaaggtggccatggatggatgggctgtatctgtgttttccctctgggagtctcatgggtccagcatcaggcctgaggtcagcaacagggaaagagggtgggcacggggagggcttggccccgcctatctagaggcttgcctcgggcccctccttgggg

SEQ ID NO: 9727 - DNA, 3650 bp, Homo sapiens
  SIMILAR (206)..(421): 621254mologous to Drosophila melanogaster EG:118B3.2,accession number AF181633,Smith-Waterman Score=243.
  misc_feature (1)...(3650): n = a,t,c or g
atggtgcatttcatatccaggctgctgtactcagatggcctggatgtcccaggggatcccatacaggactccgatgatgccgcactttctgtctctccgcactgctctcctgactcacgtgtcagcaccaccaagcacctttgggtatctccaagactgctgcgggtggctgtgagagtgaaaaatattgacattacaaacttcagcagcagctggaaatgatgggctggccttctgtgccctcctgcatacatatctccctgcccacattccatatcaagaactgaacagccaggataagagaaggaacttcatgctggctttccaggcagctgaaagtgtcggcatcaaatccacactggacattaatgaaatggtacggactgaacgacccgactggcagaacgtgatgctgtttgttattggcgatctacaagtactttgagacctgagcatgccgggaggagccgccccaatagcgggggtacccctccacagcgaccgagcgacaccgacgccattagctacgcacccctgtaaagcttccagcaactctgggctgccccacagcgtgtgagcctccagctcggggcttccgtattggaagaactcagccgtgtggcccacagctcccaccagggcccctcccacatgacccgtccattcaggtcatgtgggctcagcacacatcctgcaggccggtggctgctggagttttccttctgaagagaatattgaactacactagtgctccagggcaccaaacaaaaagggctcatgcacagctgaatttgggaaaagggattcagttctgtgggaaactcactagggttgatgaaggctcggccgcggcacttcctgactattggctggggtgggttccggtgctggtgagaacccagaaggagagtcagcgcctggcagttcccagcgccctgggcccttcaccgtcctagtttggaggagcatgttcaccacagacgtgggtcagctgccccacacctgacggggctgtcccggccgacacaatccaggcgtgttcagcctgagctaggagagtatctagagggcgtggtgcgggcacgccagggctggggtgctgctgctgcactcacgcggctgggctttctggcgggaagcagttacgggggccccttgcctggactcagcgacctgtcttccagcctggaaggggtttggagtcccagctctggctttagatttcttcatcataaggagtttttctagttaacatttttgttttgttacgagcaatgctggaaaaggtcgctcctgttctgattagtaccaaagttacattgttttcaataagcatagaaatctaaacaacatctgtacattagcatggtgagagcaaggaataaagcaggaaataggagaaaagtaaacaactttagggagcccaggcagtgtcatttaaactcactgagtcactaagacataattctcctaggccagagttaaagaaagtgccttaactcttcttgtgagggcagccactgccctccgtggccaaggcaggacctccaagactcagtggttgagttgtctcctaccaccatgcccgccctccccagggtacttggttccatgcccccgtgtgcccaccctccccagggtgctgggttccatgctgttttgaaccaaagccttatttaaagggtgggtcactggagatgcttctcaaggccagaactcaaacagctaatttttggggaataggggatctcccgtgtgcctaacgcagtagctattggtttgaacaatgtccagacaagacctgtaccttttgagaatataactgtgtttgtgcacctggcatagcaccatggngggatgaccagccaccagtggaagcggggtcactgccccacagactggatgcaatgaggggctcacaggaggcccagccagcccgattgtgggctgaggggtctgcattcaagcacgatgttctagaataggagtttaacgtgtctacgtaacctagaaatgtggttattaggaaaggggctgtgattgtgggtgcagctggcggcacacctgggtcaccagatggccagaagctgcccatcagccctgcccagatgtcagcctgggagctcaggctgctgccgcttggctggatgccctttagtgaaatgcctgttttcagctaagaaaggagaggccaggcaagcaaagtcatgccacaaagcatatcagagacccccgcagactcctggccccgtcccgccccccgttctgagttgtgtttttgttgctgttcctctgttgatggccagctctgctgttggcatgagccactgatgttcatgtgagaattactgtttttaagtgtctctccacttaggtgtcctcagttcccacttttgctctcatttgccttcacagaggccactccacctgtccggatccagctgtctggtcatggtttggtttatttattttgtccttcagggggctgtttttgccctaaagaattgaggggggcttccctgggtcttgcagtttcccaacttttatcccttgctgggccatgcggagcccagccctgggttgcctcatggggatggggggggtagggggtccccagggatccttcttggaaggaaggttggccatggatggatgggctgtatctgtgttttccctctgggagtctcatgggtccagcatcaggcctgaggtcagcaacagggaaaaaagggtgggccacggggaaggccttggccccgccctatcttagaggcttgcctcgggcccctcccttggggaaggtttgcgtgcagagctgcaagggagagggttccaagaaagcattgcccttttggcctcgtctaatagggatccttagggacactgtgggctttaggaatgcctatagatgcctcacacgtgtttaaagtgacatttggagatgctctcagtcctgtggcatctggcacgaagtctccaagaggccactttgcctcttctcccttcaagcacaagctttactgacaaaagggccagtcgcgtttctatttctctcgatcccaggcttttgcgggaccgaccgatacgtttaaatgttgttctagtccatctctcttgaatgtattaaaatggctgaaacaacaagcttgggcttttctagcttgccctccactccctgccgtccctctgacgtcgcataaaccagaacccagctccctcctgggactggctgtggagagaagggcacctctgagccagcctgtggccctaccccaaggcgcacttcctcatgtgggcagatcctgaccaggagtccagggtggcctcccctgggccacagcacatcaccgtgtggcctggggctgtgggacagtgagccctgtaaccactagggttctgtgacagatgccaagaccccagagaccgtggcagagctacccccaggagagcggaagcccctacacagcccagacacatgccttccctgggggctggggagtgtgtctcggaggggttttgtttgttttgaggcatgtatcatcttggaaataattgtcaggatgtataaaatagagaaaaagaaaaaaggtatcctaccccagaggcaacccagataaacttttttgcctgtgcaaaaaaaaaaaaaaaaa

SEQ ID NO: 9728 - DNA, 605 bp, Homo sapiens
  SIMILAR (112)..(372): 621254mologous to Homo sapiens envelope protein,accession number M12140,Smith-Waterman Score=297.
atgatgaatggccccctgagagaatcatacaatataatgagcctactacttggcatgggatggcttgtggggataccggacccggttttacatgatcaaccaaatcatatggtacaagctatcttagaaataatcactaataaaactgacagagccttgactattctggcccagcaagaaactcagatgagaaatgctatcaatcaaaatagattggctcttgactacttgccagcagctgaaggaggcatctgtgggaaatttaaccttactaattgctgtctacacgtagatgatcaagggcaagtagttgaagacatagtcagagatatgataaaactgtcacatgtgcccatgcaagtgtggcatggatttgatcctggggccatgtttggaaaatggttcccagtgttaggaggatttaaaactcttataataggagttatattagtaataggaacctgcttactgctcccttgtttgctacctgtacttcttcaaatgataaaaagcttcatcgctaccttagttcaccaaaatgcttcagaacaactgtactatatgaatcactatcgatctgtcttgcaagaatacatgggtagtga

SEQ ID NO: 9729 - DNA, 879 bp, Homo sapiens
  SIMILAR (49)..(591): 851254mologous to Homo sapiens human homolog of DnaJ protein,accession number D13388,Smith-Waterman Score=820.
atggagcaggtggcggttttggctcccccatggacatctttgatatgtttttttggaggaggaggaaggatgcacagagaaaggagaggtaaaaatgttgtacatcagctctcagtaaccctagaagacttatataatagtgcaacaagaaaactggctctgcaaaagaatgcaatttgtgacaaatgtgaagatagaggaggtaagaaaggaggagtagagtactgtcccaattgccgaggtactggaatgcaaataagaattcatcagataggacctggaaaggttcagcaaattcagtctgtgtgcgtggagtgccagggccatggggagcagatcagtcctaaagatagatgtgaaagctgcaatggaaggaagatacttcgagagaagaagattctagaatttcatattgacaaaggcatgaaatatggccagaagataacattccatggtgaaggataccaagaaccaggactggagggagaagatattatcattgtgttagatcagaaggacgatgctgtttttactcgacaaggagaagaccttttcatgtgtcagattgtcaagcatggagatatcaagtgtgtaataaatgaaggaatgccaatttatcctaggccatatgaaaagggtcgcctaatcattgaattcaaggtaaacttgcctgagaatgactttctctctcctgataaactgtctttgctggaaaaactcctacccaagaggaaggaagtggaagaaactgatgagatggatcaagtagaactggtggactttgatccaaatcaggaaagatggcaccattacaatggagaagcatatgaggatgatgaacatcatcccagaggtggtgttcggtgtcagacctcttaa

SEQ ID NO: 9730 - DNA, 410 bp, Homo sapiens
  SIMILAR (301)..(408): 1001254mologous to Homo sapiens human homolog of DnaJ protein,accession number D13388,Smith-Waterman Score=188.
gggtttttctcaagtgactttgaaggtaatgcttttgcttaccatatttccaagatggccacgtctgtgcccttaagcaaatatttaatctctgacctgattttccctcatctgtgattacatcacagtttgaggatcatctgtgataacgtgaacattctgtgtatatagtaggtagtcaacagatgtaccctgtgaggctcatcttttattattctttgccacattctttatagtgcctttagcacaaataagatccagcatcttaaacagatttgcaatgagaaatattttgttttaggtaaaaatgttgtacatcagctctcagtaaccctagaagacttatataatggtgcaacaagaaaactggctctgcaaaagaatgtgatttgtgacaaatgtgaaggtag

SEQ ID NO: 9731 - DNA, 1798 bp, Homo sapiens
  SIMILAR (1027)..(1341): 711254mologous to Rattus norvegicus DnaJ-like protein,accession number U53922,Smith-Waterman Score=338.
ctgcggcgcgccgggcggaactttccagaacgctcggtgagaggcggaggagcggtaactaccccggctgcgcacagggcggttctgggttcccgctttgtcacacacggggctcaacccgcaccggcagtagaagatggtgaaagaaacaacttactacgatgttttgggggtcaaacccaatgctactcaggaagaattgaaaaaggcttataggaaactggccttggaagtacccatcctgataagaacccaaatgaaggagagaagtttaaacagatttctcaagcttacgaagttctctctgatgcaaagaaaagggaattatatgacaaaggaggagaacaggcaattaaagagggtggagcaggtggcggttttggctcccccatggacatcctttgatatgttttttggaggaggaggaaggatgcagagagaaaggagaggtaaaaatgttgtacatcagctctcagtaaccctagaagacttatataatggtgcaacaagaaaactggctctgcaaaagaatgtgatttgtgacaaatgtgaaggtcgtagggaaggtttaaagaacagggagcagttagaagtgcttgtcccaattgccgaggtactggaatgcaaataagaattcatcagataggacctggaatggattcagcaaattcagtctgtgtgcatggagtgccagggccatggggagcggatcagacctaaagatagatgtaaaagctgcaacggaaggaagatagttcgagagaagaaaattttagaagttcatattgacaaaggcatgaaagatggccagaagataacattccatggtgaaggagaccaagaaccaggactggagccaggcgatattatcattgtgttagatcagaaggaccatgctgtttttactcgacgaggagaagaccttttcatgtgtatggacatacagctcgttgaagcactgtgtggcttccagaagccaatatctactcttgacaaccgaaccatcggtcatcacctctcatccagggtcagattgtcaagcatggagatatcaagtgtgtactaaatgaaggcatgcccaatttatcgtagaccatatgaaagagggtcgcctgaatcatcgaatttaaggtaaactttcctgagaatggctttctctctcctgataaactgtctttgctggaaaaactcctacccgaggaggaaggaagtggaagagactgatgagatggaccaagtagaactcggtggactttgatccaaatgcaggaaagacggcgccactacaatggagaagcatatgaggatgatgaacatcatcccagaggtggtgttcagtgttcagacctcttaatggggccagtggaataacactcactgctggcatttaatgtgcagtagtgaatgagtgaaggactgtaatcataatatagctcactacttgctcttgtttttgttttaattaaactattaggtagtgttttaaaaagttaaatggaggattaaacgccaaatataaaagctctggattttgccccggtatgtatgatggactttcagtggtgcaaagatggaagtttaaattaccccgtaaaaactacaaagaagttcccctaagcatttctaggccaaaccttgtaattgacttcagctatgtaccgtgggacaagcttagactgaaatgctaggtatatgtattggcttcagtgtatgacccttcattgttaagctatgaaagtaaaactctgtatttaactggcaatgaggaaaaaaaaattttgtagagaaaaaaaaaaaa

SEQ ID NO: 9732 - DNA, 480 bp, Homo sapiens
  SIMILAR (11)..(256): 321254mologous to Chlamydomonas reinhardtii vegetative cell wall protein gp1,accession number AF309494,Smith-Waterman Score=87.
atgggtactcccaagcccccagaaagagagaggagaatgctcatccctctcccagcctttctcaaaggcccaacccgatgcagcaagcctcgagccgccgtccctcgaaactcctgctggcaggacgccagcgacgctcacccagggcagccctcccgcggccgtccgggaaccgctatccccaggacacaacgcgaaagctcgactgaggtcccgtcccgccaggcctccgtggattccggaccccgaccccccgggtcactttgtcaccgatttctgcgcgccagaatctctgcagggggagacgcggacctcccgctcttttcagctcctgtgaagcctcaggcgccctctcccgcggagactcacctcttgctgagcggccggacccgcacggcgacctgcacgttcgccatccgtctgccacaacccaagtccagcgggtcagctcagcggcagcatcccaggcccccgccctaa

SEQ ID NO: 9733 - DNA, 474 bp, Homo sapiens
  SIMILAR (214)..(146): 391254mologous to Homo sapiens alpha 1-acid glycoprotein,accession number X06674,Smith-Waterman Score=48.
agtgggtcagtgtcttctcaggggcacagctgggggcacaggggatgcctctcagtgacgtttgagctgagactgaagagttcaggcaaatgcatctgggggaagactgcttcaggcaaaaggctagcatgtgcaaagtccctgaggaggcagagtgttcagcggagatggagggagaggaggcagcaggggcggcagggccagatccagttggccacaggaagaaatgtgggtttcatcctgtgtgtgagcgggaagccccgagcacatttgcagctgttatgatccatctggtgggtaatccctggcatgcaactgttttattcccactctggggccgggatgcctgggttcaaatcaaattctgccacttcccagctctgtgatctcgttccagttccttaccatctgtgagcctcggtttctccatctgtaaagtgcgggtagggggaggaggaaagacactgacccact

SEQ ID NO: 9734 - DNA, 1372 bp, Homo sapiens
  SIMILAR (524)..(730): 881254mologous to Homo sapiens Amino acid sequence of human hFATP1,accession number Y14942,Smith-Waterman Score=314.
atggagggagaggaggcagcaggggcggcagggccagatccagttggccacaggaagaaatgtgggtttcatcctgtgtgtgagcgggaagccccgagcacatttgcagctgttatgatccatctggtggttcagtacatcggggagatctgccgctacctgctgaagcagccggtgcgcgaggcggagaggcgacaccgcgtgcgcctggcggtggggaacgggctgcgtcctgccatctgggaggagttcacggagcgcttcggcgtacgccaaatcggggagttctacggcgccaccgagtgcaactgcagcattgccaacatggacggcaaggtcggctcctgtggtttcaacagccgcatcctgccccacgtgtaccccatccggctggtgaaggtcaatgaggacacaatggagctgctgcgggatgcccagggcctctgcatcccctgccaggccggggagcctggcctccttgtgggtcagatcaaccaacaggacccgctgcgccgcttcacatggctatgtcagcgagagcgccaccagcacgaagatcgcccacagcgtcttcagcaagggcgacagcgcctacctctcaagagacgcgctaatgatggatgaactgggctacatgtactatcgcgaccggagcggggacaccttccgctggcgaggggagaacgtctccaccaccgatgtggagggtgagcttagccgccttgctgggccagacagacgtggccgtctatggggtggctgttccaggcaagctggggttgcagggggtggtcctgaggcatggagtggagggtaaggcagggatggcggccgtcgcagacccccacagcctgctggaccccaacgcgatataccaggagctgcagaaggtgctggcaccctatgcccggcccatcttcctgcgcctcctgccccaggtggacaccacaggcaccttcaagatccagaagacgaggctgcagcgagagggctttgacccacgccagacctcagaccggctcttcttcctggacctgaagcagggccactacctgcccttaaatgaggcagtctacactcgcatctgctcgggcgccttcgccctctgaagctgttcctctactggccacaaactctgggcctggtgggagaggccagcttgagccagacagcgctgcccaggggtggccgcctagtacacacccacctggccgagctgtacctggcacggcccatcctggactgagaaactggaacctcagaggaacccgggcctctctgctgccttggtgcccctgtgtctgcctcctctccctgcttttcagcctctggctccttccatccctgtccctgtctggccttaactcttccc

SEQ ID NO: 9735 - DNA, 532 bp, Homo sapiens
  SIMILAR (362)..(45): 981254mologous to Homo sapiens ribosomal protein L8,accession number Z28407,Smith-Waterman Score=545.
tttttttggcataaacacaaactttattgaggccctcagcactagttctctttctcctgcacagtcttggttccccggagacgtccagtccggcgggcagcaatgagacccactttgcggccagcaggggcatctctgcggatggtggagggcttgcgcatgtgctggtggttgccacctccaaaaggatgctccacaggattcatggccacaccccgtactcgtggccagcagttcctctttgccttatatttgtggtacgcccggccagccttcaagatgggtttgtcaattcggccacctccagccaccacaccaaccacagctctgttggctgaggagataaccttcttggagccggaggcagcttcacacgggtcttcttggtctcagggttgtgggagataacggtggcatagttccctgatgcccgggccagcttgccacggtctccaggcttctcctccaggcagcacacgattgtaccctcaggcatggtgcttcacgtgcgcgcggaacacagacacggcgc

SEQ ID NO: 9736 - DNA, 463 bp, Homo sapiens
  SIMILAR (24)..(335): 1001254mologous to Homo sapiens ribosomal protein L8,accession number Z28407,Smith-Waterman Score=542.
gcgtgaggcagtgtcgtggaattcgggatccgtatcggtttaagaagcggacggagctgttcattgccgccgagggcattcacacgggccagtttgtgtattgcggcaagaaggcccagctcaacattggcaatgtgctccctgtgggcaccatgcctgagggtacaatcgtgtgctgcctggaggagaagcctggagaccgtggcaagctggcccgggcatcagggaactatgccaccgttatctcccacaaccctgagaccaagaagacccgtgtgaagctgccctccggctccaagaaggttatctcctcagccaacagagctgtggttggtgagtatcaggcagcagttgaatgctgagggctgtgggtgaacatgctgtgagtgccggtggacagccagtggctagacttggtccctggaattcgattacctgttgttctaaaacttgggttctgtaa

SEQ ID NO: 9737 - DNA, 843 bp, Homo sapiens
  SIMILAR (582)..(698): 691254mologous to Homo sapiens ribosomal protein L8,accession number Z28407,Smith-Waterman Score=128.
atgcaggaagtaccaggcatgtttgaacgtaattacccccaccctgctataactttcaagccatctgtgccagtttcacgcagtctggactacgcgcccctcccggggggggtcttccgcgacccgtactggtttaagaagcggacggagcttttcattgctgccgagggcattcacacgggccagtttgtgtattgcggcaagaaggcccagctcaacattggcagtgtgctccctgtgggcaccatgcctgagggtatgatcgtgtgctgcctggaggagaagcctggaggccgtagcaagctgtcctgggcatcagggaactatgccactgctatctcccacaaccctgagaccaagaagacccgtgtgaagctgccctctggctccaagaaggttgtctcctcagccaacagagctgtggttggtgtggtggctggaggtggccgaactgacaaacccatcttgaaggcttgccaagcctaccacaaatataaggcaaagaggaactggtggccacgagtatgggatgtggccatgaaccctatggagcatccttttggaggtggcaaccaccagcacatcggcatcccctccgccatctcagagatgaccctgctggctgcaaaatgggtctcattgctgcccgccagactggacgtctctggggaaccaagactgtgcaggagaaagagaactagtgctaaggggctcaataaagtttgtctttatgccaaaaaaaagtgtcagacctgcattgcagttccaggctccacctactcacggttcttcttccctttgtcctccatagacctttcccctgatacgtctcttgcacattga

SEQ ID NO: 9738 - DNA, 965 bp, Homo sapiens
  SIMILAR (266)..(427): 501254mologous to Homo sapiens Human secreted protein, SEQ ID NO: 6153,accession number G02072,Smith-Waterman Score=114.
cagtgtggcggaattcggagaacaggacccgtcgccatgggccgtgtgatccgtggacagaggaagggcgctttttctgtgtttcgcgcgcacgtgaagcaccgtagaggcgctgcgcgcctgcgcgccgtggatttcgctgagcggcacggctacatcaagggcatcgtcaaggtgcggaacgctggccggggcgggaggggaagggacgcccggccggaacgccgcactcacgccgcctctgcccacaggacatcatccacgaccggggccggcggcgcgcccctcgcccagggtggtcttccgggatccgtatcggtttaagaagcggacggagctgtttcattgccgccgaggggcattcacacgggccagttttgtgtattgcggcaagaaaggcccagcctcaacattggcaatgtgctccctgtgggcacccatgccctgagtgtacaatcgtgtgctgcctggaggagaagcctggagacctgtggcaagcctggcccgggcatcagggaactatgccaccgttatctcccaacaaccctgagaccaagaagaccccgtgtgaagctgccctccggctccaagaaggttatctcctcagccaacagagctgtggttggtgtggtggctggagggtggcccgaattgacaaacccatctttgaaggctggcccgggcggtaccacaaatataaggcaaagaggaactgctagccacgaatacggggtgtgggccatgaatcctgtggagcatcccttttggaggtggcaaccaccagcacatcggcaaagccctccacccatccgcagagatgccccctgctggccgcaaagtgggtctcattgcttgcccgccggactggacgtctccggggaaccaagactgtgcaggagaaagagaactagtgctgagggcctcaataaagttttgtgtttatgccaaaaaaaaaaaaaaaaaaa

SEQ ID NO: 9739 - DNA, 405 bp, Homo sapiens; identical to SEQ ID NO: 5813
  SIMILAR (19)..(180): 421254mologous to Homo sapiens Membrane-bound protein PRO1013,accession number Y66666,Smith-Waterman Score=116.
  misc_feature (1)...(405): n = a,t,c or g

SEQ ID NO: 9740 - DNA, 346 bp, Homo sapiens
  SIMILAR (34)..(183): 401254mologous to Haloferax volcanii ribonuclease P,accession number M61003,Smith-Waterman Score=66.
caagaaagtactttgagccactctcgcatggaaaggagtgtctttatgcctcgacctcaagctgtgggctcttccaattatgcttccaccagtgccggactgaagtatcctggaagtggggctgaccttcctcctccccaaagagcagctggagacagtggtgaggattcagacgacagtgattatgaaaatttgattagaacaaatcagatataccttctcttgtctgcatgactttgtgagataaagagagggcttccaacttttttctactagcttgatatgtattatcacttaaaatggttgcctttaaaaaaaaagggggggatcctattcccggtgggaa

SEQ ID NO: 9741 - DNA, 423 bp, Homo sapiens
  SIMILAR (7)..(192): 471254mologous to Homo sapiens Membrane-bound protein PRO1013,accession number Y66666,Smith-Waterman Score=152.
atgaaagtcattgggtggtacagattccggcgcaatacgcagcagcagatgtcctacagagagcaggttcttcacaagcagctcacccgcatcctcggcgtgcccgacctcgtctttcttctcttcagcttcatctccactgccaacaattccactcacgctttagaatatgtgctcttcagaccaaatagaagcgccaacagcaacgcggaccacgtaggtgccgggccccctgccgcgcccgctgggggctttcagcctctgtctcaggccggcgctcgcggccaagccgggacctcatgcggctcgccccctgggcaccagggccggccggaggagctggtgacccgggcggctcccgcccccggttgtcgtgggggtgctgcgagtgaaaccgtggctgtcactactgatacttgttag

SEQ ID NO: 9742 - DNA, 3020 bp, Homo sapiens
  SIMILAR (278)..(799): 331254mologous to Homo sapiens Membrane-bound protein PRO1013,accession number Y66666,Smith-Waterman Score=287.
tggagatttccatcatggcggcgtccatttcgggctacaccttcagtgctgtgtgtttccacagcgccaacagcaacgcggaccacgaaggatttttactgggagaggtaagacaagaggaaacgtttagcatcagtgactcacaaaatcagcaacacagaatttctgcaagtaattgaaatccataaccatcagccttgttcaaaactttttagtttttatgactacgcaagcaaagtgaatgaggagagtttggacaggattcttaaagatcggagaaagaaagtcattggggtggtacagattccggcgcaatacgcagcagcagattgtcctacaagtgagcaggttcttcacaagcagctcaccccgcatcctcggcgtgcccgacctcgtctttcttctcttcagcttcatctccactgccaacaattccactcacgctttagaatatgtgctcttcagaccaaatagaaggtataatcagaggatatcactcgctattcccaatctaggaaatactagccagcaagagtacaaagtgtcttcagtgccaaatacttctcagagttatgccaaagtgattaaagaacatggtactgacttttttgacaaggatggagtgatgaaagacatcagggcgatttatcaggtttataatgcacttcaggagaaagttcaggcagtgtgtgcagatgttgaaaagagtgagcgagttgttgaatcttgtcaggcagaagtgaacaaattaagaagacaaatcactcagaggaaaaatgaaaaggaacaagaaagaagattgcagcaggcagtgttaagcagacagatgccgtctgaaagcttggacccagcgttcagtcctcggatgccgtcctctgggtttgcagctgaaggcagaagtacacttggagatgcagaggcctcggatcctcctcccccttactctgattttcacccaaacaatcaagaaagtactttgagccactctcgcatgggaaaggagtgtctttatgcctcgacctcaagctgtggggctcttccaattatggcttccaccagtgccggatttgaagtattcctgggaagtggggctgaccttcctcctccccaaagagcagctggagacagtggtgaggattcagacgacagtgattatgaaaatttgattgaccctacagagccttctaatagtgaatactcacattcaaaggattctcgacccatggcacatcccgacgaggaccccaggaacactcagacctcccagatttaactaaacaaaagaaactctccacctagctagtgactgtttttcttcattgcttactgagagggtttttgagaacttaatctggggggagaactgctttctcagataccttaactcccgagaagagagttccttgtgcacagaacttgtgggagcctccatccgctgctctttacctttggatacagtgtgccaagtttcatgacagaatccattaggattaatcaaattgtcctaattctggtgcggattcatggatatactggtaaatttaggcaaagtgaaactttatccagcggtagtttctgttctttaaaataaattggaaattagagacctaagcacaattagtcctataaatggttcctataaatcaaaagcttaccctcttgcactatcatgccttgaaatttactttttcaaagggaaacaagtttagcagcagccttcaaagaacttctttctatgatgagcccaaattcatctttgccagaaaagaaattttgataattccaagaagcctgattagaacaaatcatatatagccttctcttgtctgcatgactttgtgagataaaagagagggcttccaacttttttctactagcttgatatgtattatcacttaaaatgggttgcctttaaaaaaaaaaagtagagatactaattaccagtaagtaatcatccaaataaatacgtcataaaataaattaattattttttctttgatggattacagtgactactgtgttgcactggcacatttatggtctctgttctggaatcttggaggacacacagcagtggagaacagaaggagtgagttttataatgaacagattccagacacggtaggtttagctgagttcatacagaggagatataactcatttagatcttctgacaaatcctagtgttagttttatctgtggaggaaagacatttaataataaactgtttgggaatcttggtgaataaagattcattttcaagctgaataaccatacttattttattttaagttgccattttggggaataattgcagtatgtgtagagactctcttggggatgcacttatatttttatttaatgactacttgttttctagttttgcccacaacgtctgaaaccactaagacattcaggagcatgttgagcttctggtttggaaacagcaagacccaccatttatgacaaggacagccatgaggttaatacttggagtttaactgccttccctttgaactagttaaaatctgtaagaataaggaagttgttgaaggcttaaaatctggggttctggaaaaagtagtttccagtttatgggataccacatttactcactggggctcccagttccaatactaaattagacagtatcatatagacggaaaatgaaatgcttagaactgccgttcttttggatcgccactctatgggggtctgtcttttaactacctctcctggttatggttgggccttacacccactgcccattggatttaaaacgctgcagacactttatctgcaaatgtgttccagttgttatcagctacctactacgcagcttcagcgccagtgtgaatttatttttttttaagtgccattacccgtctcctctgttcagattttgacattcaggaaaatatttttattttgatgccatactgaaatctacaatgtatatctgacaaagcagttaaatgtgacaataaaaaacttatttaatcatggtaaaaaaaaaaaaa

SEQ ID NO: 9743 - DNA, 516 bp, Homo sapiens
  SIMILAR (283)..(513): 841254mologous to Homo sapiens hnRNP H,accession number L22009,Smith-Waterman Score=332.
atggtgcttatggtggaggatatggagcctgtgacaattataatggctatggctatggatttgggtcagatagatttggaagagacctcaattattgtttttcaggaatgtctgatcacaaatatggggatggtggctctaccttccagagcacaacaggacactgtatatacggtacacattgaaattggtcctgatggcagagtaactggtgaagcagatgttgagtttgcaactcatgaagatgctgtggcagctatgtcaaaagacaaagcaaatatgcaacacagctatgtagaacccttcttgaattgtgcagcaggagccagcggtactgcttacggtagccaaatgatggggggcatgggcttgtcaatccagtccagttatggtggcccagccagcccgcagctgagtggtggttatggaggtggctatggtggccacagcagcatgagtggatttgaccaagttttacaggaaaactcatgtgattttcaatcagacattgcatag

SEQ ID NO: 9744 - DNA, 1314 bp, Homo sapiens
  SIMILAR (71)..(322): 1001254mologous to Homo sapiens hnRNP H,accession number L22009,Smith-Waterman Score=470.
  misc_feature (1)...(1314): n = a,t,c or g
ctaaatacctgtataaaatgaactaatggtttctctcccctccctaccccttccttatgaacaatgctttaggtatattgaaatctttaagagcagtagagctgaagttagaactcattatgatccaccacgaaagcttatggccatgcagcggccaggtccttatgacagacctggggctggtagagggtataacagcattggcagaggagctggctttgagaggatgaggcgtggtgcttatggtggaggctatggaggctatgatgattacaatggctataatgatggctatggatttgggtcagatagatttggaagaggtaaggtaagaattgaatttctcagttgaaggatgcttacactcttgtccatctagacctcaattactgtttttcaggaatgtctgatcacagatacggggatggtggctctactttccagagcacaacaggacactgtgtacacatgcggggattaccttacagagctactgagaatgacatttataattttttttcaccgctcaaccctgtgagagtacacattgaaattggtcctgatggcagagtaactggtgaagcagatgtcgagttcgcaactcatgaagatgctgtggcagcttatgtcaaaagacaaagcaaatatgcaacacagatatgtagaactcttcttgaattctacagcaggagccaagcggtggtgcttacgaacacagatatgtagaactcttcttgaattctacagcaggagcaagcggtggtgcttatggtagccaaatgatgggaggcatgggcttgtcaaaccagtccagctacgggggcccagccagacagcagctgagtgggggttacggaggcggctacggtggccagagcagcatgagtggatacgaccaagttttacaggaaaactccagtgattttcaatcaaacattgcataggtaaccaaggagcagtgaacagcagctactacagtagtggaagccgtgcatctatgggcgtgaacggaatgggagggttgtctagcatgtccagtatgagtggtggatggggaatgtaattgatcgatcctgatcactgactcttggtcaaccnnnnnnnnnnnnnnnnnnnnnnnnaaaaaactttaatttaaacagttttggcaataacagttggggatttatgcttactttaagggaaaatcaggatggttttgaaaactaaggcgcccattttttggattccaatcctcatttaggagtgaacggggaggctgggaaccttatacgtggaaactaaagtcccagctttttctaagtaagtaataga

SEQ ID NO: 9745 - DNA, 3714 bp, Homo sapiens
  SIMILAR (3477)..(3623): 971254mologous to Homo sapiens Human laminin A chain,accession number W50892,Smith-Waterman Score=288.
atgagggttcgccatgttggccaggctgctctcgaacttctgacctcagtaagagaatccagggcaacctctgcctttcaggtgtctccttatgaggatgagccttgccgcccctgtaattgtgaccctgtggggtccctcagttctgtctgtattaaggatgacctccattctgacttacacaatgggaagcagccaggtcagtgcccatgtaaggaaggttatacaggagaaaaatgtgatcgctgccaacttggctataaggattacccgacctgtgtctcctgtgggtgcaacccagtgggcagtgccagtgatgagccctgcacagggccctgtgtttgtaaggaaaacgttgaggggaaggcctgtgatcgctgcaagccaggattctataacttgaaggaaaaaaacccccggggctgctccgagtgcttctgctttggcgtttctgatgtctgcagcagcctctcttggcctgttggtcaggtaaacagtatgtccgggtggctggtcaccgacttgatcagtcccaggaagatcccgtctcagcaagatgcactaggcgggcgccatcaggtcagcatcaacaacaccgcggtcatgcagagactggctcccaagtactactgggcagcccccgaggcctaccttggaaataagctgactgcgtttggcggattcctgaaatacacggtgtcctacgatattccggtagagacggtagacagtaacctcatgtcgcatgctgacgtcatcattaagccttatgaagagtacctaaacgtggttagacttgtgcctgaaaacttccaagattttcacagcaaaaggcagattgatcgtgaccagctgatgactgtccttgccaatgtgacacatcttttgatcagagccacctacaattctgcaaaaatggctctttacaggtatgtattgaaattggaggaaaaacttatggtgaagcggcagtgcacgtgcaccgagaacctctttgctgggctgtgggtggtctttggtttcatgtttctgcggaaaccagctacagtgggatatgaaggctctgacattctagatcctggcccaccgtgttggttgttcctcatgggacagtcagtctctagcacagtttctgaatgtctgaaggaagtcaacgggaagcatcgggtcaatttcctgcctcagactgcaaaacggatctggacacatctcccatcactttgtgatacccatttgctttttcttcttgaaattgtactgtatggaagtggtgtgcaggcaacatcttcgccttctggtgcccttgatgatgattttctggaaaagaacattccaccagaggctgaagagctgtcatttgaagtgtcttattcagaaatggttacggaggctctaaaaagaaataaacttaagaaatcagagattaagaaagaagactatgttttaactaaatttaatgttcagaaaaccagatttggcttaactgaagcaggagatctgtctgctgaagacatgaagaaaatccgccatctctctctgattgaattgactgccttttttgatgcctttggaattcaactgaaaaggaacaaaacagagaaagtaaaaggacgagagaccttcattcacattgactcacctgttttcatattgaaattttgccaatatgtctttggctttggtttgattgttgagttgaatggccatggacaccttggagagaagtggagcatggacccgtatgactccttccggcactgcccagctctggctgagcctgcaggaggctgtgcggcatccggagtggtcaggggtgggtcagagttggccctggaaacaggtgcacgtcccctggatttatgcctcattttggacgctctcccccttcaccgcgacagcggcaacgtggacccctcggaggctggtcactgtgactcagtcaccggggagtgcctgaagtgcctggggaacacagatggcgcccactgtgaaaggtgtgctgacgggttctatggggacgctgtgacagccaagaactgccgcgacagaggatctcttaaaggaattctcggccactccccctttcaaagccctcctgtgacttcccactgtgccgaaaatccaaacaccctcaaagcccctcctccctatgttggagccacatctgccctggtgctgtccctgggtggtccagtgacaccgtggctctcggttgagctaagcatccgcacgttcgcctccagcggcctgatttactacatggctcatcagaaccaagcagactacgctgtgctccagctgcacgggggccgcctccacttcatgtttgaccttggcaaaggcagaacaaaggtctctcaccctgcactgctcagtgatggcaagtggcacacggtcaagacagactatgttaaaagaaaaggcttcataactgtcgacggccgagagtctcccatggtgactgtggtgggagatggaaccatgctggatgtggagggtttgttctacctaggaggcctgccctcccagtaccaggccaggaaaattggaaatatcacccacagcatccctgcctgcattggggatgtgacggttaacagcaaacagctggacaaggacagcccggtgtctgccttcacggtgaacaggtgctacgcagtggcccaggaaggaacatactttgacggaagcggatatgcagctcttgtcaaagagggctacaaagtccagtcagatgtgaacatcacactggagtttcgaacctcctcgcagaatggcgtcctcctggggatcagcactgccaaagtggatgccattggactagagcttgtggacggcaaggaaaatgtctttggccctcagtgcaacgaatgtcgagatggcaccttcgctctccgcgcagacaaccccctgggctgcagcccgtgcttctgctccgggctgtcccacctctgctcagagctggaggactacgtgaggaccccagtaacgctgggctccgatcagcctcttctgcgtgtggtttctcagagtaacttgaggggcacgactgagggggtttactaccaggcccccgacttcctgctggatgccgccaccgtccggcagcacatccgtgcagagccgttttactggcggctgccgcagcagttccaaggagaccagctcatggcctatggtggcaaactgaagtacagcgtggccttctattctttggatggcgtcggcacctccaattttgagcctcaagttctcatcaaaggtggtcggatcagaaagcaagtcatttacatggatgcaccagccccagagaatggagtgagacaggaacaagaagtagcaatgagagagaatttttggaaatattttaactctgtttctgaaaaacctgtcacgcgagaggattttatgtctgtcctcagcgatattgagtacatcctcatcaaggcatcgtatggtcaaggattacagcagagcaggactgcgcccctgggtaccacagagggaagctcccagcagggagtgacaggggaccacgccctctggttgctccttgtgttccctgcagttgcaacaaccacagtgacacctgtgaccccaacaccgggaagtgtctggtatgctggtttgtgggggtgcttgcctgagtttagaagtaaagtggacgctgagtgtcagatttccggtctaagtcatagccgtgccttggtttag

SEQ ID NO: 9746 - DNA, 286 bp, Homo sapiens
  SIMILAR (139)..(285): 1001254mologous to Homo sapiens laminin A chain,accession number X58531,Smith-Waterman Score=282.
tgcccagctctggctgagcctgcaggaggctgtgcggcatccggagtggtcaggggtgggtcagagttggccctggaaacaggtgcacgtcccctggatttatgcctcattttggacgctctcccccttcaccgcgacagcggcaacgtggacccctcggaggctggtcactgtgactcagtcaccggggagtgcctgaagtgcctggggaacacagatggcgcccactgtgaaaggtgtgctgacgggttctatggggacgctgtgacagccaagaactgccgcg

SEQ ID NO: 9747 - DNA, 278 bp, Homo sapiens
  SIMILAR (132)..(278): 971254mologous to Homo sapiens laminin A chain,accession number X58531,Smith-Waterman Score=278.
tcaaagagggctacaaagtccagtcagatgtgaacatcacactggagtttcgaacctcctcgcagaatggcgtcctcctggggatcagcactgccaaagtggatgccattggactagagcttgtggacggcaaggaaaatgtctttggccctcagtgcaacgaatgtcgagatggcaccttcgctctccgcgcagacaaccccctgggctgcagcccgtgcttctgctccgggctgtcccacctctgctcagagctggaggactacgtgaggacccca

SEQ ID NO: 9748 - DNA, 330 bp, Homo sapiens
  SIMILAR (1)..(165): 1001254mologous to Homo sapiens laminin A chain,accession number X58531,Smith-Waterman Score=282.
ccttatgaagagtacctaaacgtggttagacttgtgcctgaaaacttccaagattttcacagcaaaaggcagattgatcgtgaccagctgatgactgtccttgccaatgtgacacatcttttgatcagagccacctacaattctgcaaaaatggctctttacaggtatgtattgaaattggaggaaaaacttatggtgaagcggcagtgcacgtgcaccgagaacctctttgctgggctgtgggtggtctttggtttcatgtttctgcggaaaccagctacagtgggatatgaaggctctgacattctagatcctggcccaccgtgttgg

SEQ ID NO: 9749 - DNA, 795 bp, Homo sapiens
  SIMILAR (1)..(237): 1001254mologous to Homo sapiens Human laminin A chain,accession number W50892,Smith-Waterman Score=474.
gcctgcaattgcagtctcgtggggtcgactcatcatcggtgcgatgtggtcactggccattgccagtgcaagtcaaaatttggtggccgggcctgcgatcagtgttccttgggttacagagactttcccgactgtgttccctgtgactgtgacctgagggggacgtcgggggacgcctgcaacctggagcagggtctctgcggctgtgtggaggaaaccggggcctgcccttgcaagttcctaacgggttacacgtctacagcccaggggatggggacacctgtcttagttcatctggactgcagtaacaaaataccatacactgagtggcttataagtaacagaaatttggaggatgggaagttcaggatcaaggcaccagcagatttagtgtctagtaaagacttgcttccacctagacagccatcttcttcctgtgtcctcacagggagccatgacccttatgatggggagggcacggatgaactcagaacccagggcttgcagcccagacaccgagcaactggcccggcagtcaggcacatacccataagcctggggcaggccacggtgttagaagactctaaagcggcactgccaggtcttggacccacactaatggctgtgactgtggtgacaacagaagctgcagtagccatggttgtgggtgataggggagaggagagaggagggactctggtagctccaggaaccagggtgggaggccagtttgcccatcagtcaccggagcctgtccctatagagtctgcacagatatttaactctatgacctga

SEQ ID NO: 9750 - DNA, 837 bp, Homo sapiens
  SIMILAR (144)..(305): 831254mologous to Homo sapiens laminin A chain,accession number X58531,Smith-Waterman Score=254.
atggtggtggaaggtgaagttgtggcggtgcggggggcaggcacatcacgtggagagaatgggagaaagagagatagagaaggcggatgtccaactctttcaaacaaccagatctcaaccaagaatgaactgagcgagaactcaccaccaagggggggaaactgcagtgtcaatgtgagcataatacttgcggggagagctgtaacaggtgctgtcctgggtaccatcagcagccctggaggccgggaaccgtgtcctccggcaatacatgtgaagcaacttgtgcagacatggagcgggccagggtgtgattggagctgtgtgtttgaatatcgccctgctgccagcgttgaggagggaatggctgccaggggtgttgggttaggagacaagacccgaaatgaatctttctgcttggtaggaggagaaactgatcgtcaggttcacctcctgcctctgctgtggggcagcggctgcagccggaggtgtggacaggccgtccagagaaagaggcggcttgaaatgaaacacggaggggagacacacgagaaacaagagggagggcaggagagtgggcgtcccaaataccacaggaagagggcgatgcaaaagggagagggaggtcacggggtcccttccgcagagccacggggtaagagggggaccgaagtctgctccctgaatttggtgcctgggaaatctctggagactttagggagaacagatgcagcagacaaggggccaggaggacactatgcgaaacttggattggacggatgtgccagggaggtggatgttctgatggaggataaaagggagggggtgtcttgtgtttga

SEQ ID NO: 9751 - DNA, 539 bp, Homo sapiens
  SIMILAR (315)..(485): 1001254mologous to Homo sapiens laminin A chain,accession number X58531,Smith-Waterman Score=315.
atatcacattgtttggccagtcatcaaatgcatcattttacttcaaccagattaggagttcagtggttctggggggctgggggaacacggccaccaatcctaacaaccctatcactcaggacaaaagaggcaagaatgaacggttccaggatttccggcttggggaacctggtgggcgttatgccttcagccaagaaaaagaaagcctgtttcctgccattctcaatcttgccagcaatgctcacatcagcaccaatgccacctgtggcgagaaggggccggagatgttctgcaaacttgtggagcatgtgccaggcctgtttcctgccattctcaatcttgccagcaatgctcacatcagcaccaatgccacctgtggcgagaaggggccggagatgttctgcaaacttgtggagcatgtgccaggtcggcccgtccgaaacccacagtgccggatctgtgatggcaacagcgcaaaccccagaggcaagtgtcgcgcctttatttctgaaattcccatgggaatgtacactttgtga

SEQ ID NO: 9752 - DNA, 638 bp, Homo sapiens
  SIMILAR (9)..(638): 971254mologous to Homo sapiens Human laminin A chain,accession number W50892,Smith-Waterman Score=1066.
atgaagcgggcacattattagaaagcaggacgataaatgtgtccaatctgtacgtcgggggaattccagagggagaggggacgtcactgctcacaatgagaagatcgttccatggctgtatcaaaaacctgatcttcaatttggaacttttggatttcaacagtgcagttggccatgagcaagtcgacctggacacctgctggctgtcagaaaggcctaagctggctcccgatgcagaggacagcaagctcttgccagagccccgggctttttcagaacagtgtgtggtggatgcagctctggagtacgttcccggcgctcaccagtttggtctcacacaaaacagctattccatcttgccttttaatcagtcggctgtcagaaagaagctctcggttgagctaagcatccgcacgttctcctccagcggcctgatttactacatggctcatcagaaccaagcagactacgctgtgctccagctgcacgggggccgcctccacttcatgtttgaccttggcaaaggcagaacaaaggtctctcaccctgcactgctcagtgatggcaagtggcacacggtcaagacagactatgttaaaagaaaaggcttcataactgtcgacggccgagagtctccc

SEQ ID NO: 9753 - DNA, 2092 bp, Homo sapiens
  SIMILAR (1)..(369): 1001254mologous to Homo sapiens Human laminin A chain,accession number W50892,Smith-Waterman Score=648.
atgagctcaaatcaaaagtcaccaacaaaaacaagtaaatcccctgggacagctaatgttctggatgtaaacaattcaacactcatgtttgttggaggtcttggaggacaaatcaagaaatctcctgctgtgaaggttactcattttaaaggctgcttgggagaggccttcctgaatggaaaatccataggcctatggaactatattgaaagggaaggcaagtgccgtgggtgcttcggaagctcccagaatgaagacccttccttccattttgacgggagtgggtactctgtcgtggagaagtcacttccggctaccgtgacccagataatcatgctttttaataccttttcacctaatggacttctttctctacctgggttcatacggcacaaaagactttttatccatcgagctgtttcgtggcagagtgaaggttatgactgacctgggttcaggacccattacccttttgacagacagacgttataacaatggaacctggtacaaaattgccttccagcgaaaccggaagcaaggagtgctagcagttatcgatgcctataacaccagtaataaagaaaccaagcagggcgagactccgggagcatcttctgacctcaaccgcctagacaaggacccgatttatgtgggtggattaccaaggtcaagagttgtaaggagaggtgtcaccaccaaaagctttgtgggctgcatcaagaacctggaaatatccagatcaacctttgacttactcagaaattcctatggagtgagaaaaggctgtttactggagcccatccggagtgttagcttcctgaaaggcggctacattgaattgccacccaaatctttgtcaccagaatcagaatggctggtaacatttgccaccacgaacagcagtggcatcatcctggctgccctcggcggggatgtggagaagcggggtgatcgtgaggaagcacacgtgcccttcttttccgtcatgctgatcggaggcaacattgaggtacatgtcaatcctggggatgggacaggcctgagaaaagctctcctgcacgctcccacgggtacctgcagtgatggacaagcgcattccatctccttggtcaggaatcggagaattatcactgtccaattggatgagaacaatcctgtggaaatgaagttgggcgcattagtagaaagcaggacgataaatgtgtccaatctgtacgtcgggggaattccagagggagaggggacgtcactgctcacaatgagaagatcgttccatggctgtatcaaaaacctgatcttcaatttggatcatgggtttgtggactcggtagagcagaaacgtttctgtggagttcccagctgtgcccgggaaagtgccaggggacgtgcgcaggcacaggacacagcacaggagctgcagagtgaaagtgcgtgtgacaagcgtagcccacaacctcctggcaaggggaagcacatgtatgggggtgttctgcagccacagagtcttttccaaaagaacctgcttttattttatgatgaagtgcttgatttgcaaccaaatggcaaagagaaggaattcagtgttggtgcaaatcacaacgctttcatggtggttcactggggagtctgtggtttctgccttttcccttctggagagtggctggcttcccctttctgtgtgcatccccaaatcacaattcatcccccagataggttccaggccagtgttacagatgaagggtacttgttcctagcaaagcccacccagccagccccagcttgtcctctggatcccatccgccctctcctcctaggacatgcacagcagccactcctcacagaccagcacacagatgccgctgtcaccccatcgtcagcagtgacagcaagagcagcaaactattgtgctggaggaaggaacgaaaggaaaaagacaggaagagagaagcgtcacctcacaggaggtccctgtgtagccttgcggacattcacagtgctccacatcagcagccaccaccaggtcgatggcattagagctggctatgtccagagagacggactccaacctacaaatagacagattgttatgtga

SEQ ID NO: 9754 - DNA, 8707 bp, Homo sapiens
  SIMILAR (1325)..(7888): 991254mologous to Homo sapiens laminin A chain,accession number X58531,Smith-Waterman Score=11675.
atgcgcgggggcgtgctcctggtcttgctgctgtgtgtcgccgcgcagtgccggcagagaggcctgtttcctgccattctcaatcttgccagcaatgctcacatcagcaccaatgccacctgtggcgagaaggggccggagatgttctgcaaacttgtggagcatgtgccaggtcggcccgtccgaaacccacagtgccggatctgtgatggcaacagcgcaaaccccagagaacgccatccaatatcacatgccatagatggcaccaataactggtggcaaagtcccagcattcagaatgggagagaatatcactgggtcacaatcactctggacttaagacaggtctttcaagttgcatatgtcatcattaaagctgccaatgcccctcgacctggaaactggattttggagcgttctctggatggcaccacgttcagcccctggcagtattatgcagtcagcgactcagagtgtttgtctcgttacaatataactccaagacgagggccacccacctacagggctgatgatgaagtgatctgcacctcctattattccagattggtgccacttgagcatggagagattcatacatcactcatcaatggcagaccaagcgctgacgatctttcacccaagttgttggaattcacttctgcacgatatattcgccttcgcttcgaacgcattagaacgctcaatgcagatctcatgacccttagccaccgggaacctaaagaactggatcctatgttaccaagacgctattattattcaataaaggacatttctgttggaggcatgtgtatctgctatggccatgctagtagctgcccatgggatgaaactacaaagaaactgcagtgtcaatgtgagcataatacttgcggggagagctgtaacaggtgctgtcctgggtaccatcagcagccctggaggccgggaaccgtgtcctccggcaatacatgtgaagcatgtaattgtcacaataaagccaaagactgttactatgatgaaagtgttgcaaagcagaagaaaagtttgaatactgctggacagttcagaggaggaggggtttgcataaattgcttgcagaacaccatgggaatcaactgtgaaacctgtattgatggatattatagaccacacaaagtgtctccttatgaggatgagccttgccgcccctgtaattgtgaccctgtggggtccctcagttctgtctgtattaaggatgacctccattctgacttagagaatgggaagcagccaggtcagtgcccatgtaaggaaggttatacaggagaaaaatgtgatcgctgcccaacttggctataaggattacccgacctgtgtctcctgtgggtgcaacccagtgggcagtgccagtgatgagccctgcacagggccctgtgtttgtaaggaaaacgttgaggggaaggcctgtgatcgctgcaagccaggattctataacttgaaggaaaaaaacccccggggctgctccgagtgcttctgctttggcgtttctgatgtctgcagcagcctctcttggcctcttggtcaggtaaacagtatgtccgggtggctggtcaccgacttgatcagtcccaggaagatcccgtctcagcaagatgcactaggcgggcgccatcaggtcagcatcaacaacaccgcggtcatgcagagactggctcccaagtactactgggcagcccccgaggcctaccttggaaataagctgactgcgtttggcggattcctgaaatacacggtgtcctacgatattccggtagagacggtagacagtaacctcatgtcgcatgctgacgtcatcattaagggaaacggactcactttaagcacacaggctgagggtctgtcattgcagccttatgaagagtacctaaacgtggttagacttgtgcctgaaaacttccaagattttcacagcaaaaggcagattgatcgtgaccagctgatgactgtccttgccaatgtgacacatcttttgatcagagccacctacaattctgcaaaaatggctctttacaggttggagtccgtctctctggacatagccagctctaatgccatcgacctggtggtggctgctgatgtggagcactgtgaatgtccgcaaggctacacagggacctcctgtgagtcgtgcctctctggctattaccgcgtggatggaatactctttggaggaatttgtcaaccctgtgaatgccacggccatgcagctgagtgtaatgttcacggcgtttgcattgcgtgtgcgcacaacaccaccggcgtccactgtgagcagtgcttgcccggcttctacggggagccttcccgagggacacctggggactgccagccctgcgcctgccctctcaccatagcctccaacaatttcagccccacctgccacctcaatgatggagatgaagtggtctgtgactggtgtgccccgggctactcaggagcttggtgtgagagatgcgcagatggttactatggaaacccaacagtgcctggcgaatcttgtgttccctgtgactgcagcggcaacgtggacccctcggaggctggtcactgtgactcagtcaccggggagtgcctgaagtgcctggggaacacagatggcgcccactgtgaaaggtgcgctgacgggttctatggggacgctgtgacagccaagaactgccgcgcctgtgaatgccatgtgaaaggctcccattctgccgtgtgccatcttgagaccgggctctgtgactgcaaaccaaacgtgactggacagcagtgtgaccagtgcttgcatggctattatgggctggactcaggccatggctgccggccctgcaactgcagcgtggcaggctccgtgtcagatggctgcacggatgaaggccagtgtcactgtgtcccaggtgtggcagggaaaaggtgtgacaggtgtgcccatggcttctacgcctaccaggatggtagctgtacaccctgtgactgcccacacactcagaatacctgcgacccagaaactggagagtgtgtctgcccccctcacacacagggtgtgaagtgtgaagaatgtgaggatgggcactggggctacgatgcggaggtggggtgccaggcctgcaattgcagtctcgtggggtcgactcatcatcggtgcgatgtggtcaccggccattgccagtgcaagtcaaaatttggtggccgggcctgcgtacagtgttccttgggttacagagactttcccgactgtgttccctgtgactgtgacctgagggggacgtcgggggacgcctgcaacctggagcagggtctctgcggctgtgtggaggaaaccggggcctgcccttgcaaggaaaatgtctttggtcctcagtgcaacgaatgtcgagagggcaccttcgctctccgcgcagacaaccccctgggctgcagcccgtgcttctgctccgggctgtcccacctctgctcagagctggaggactacgtgaggaccccagtaacgctgggctccgatcagcctcttctgcgtgtggtttctcagagtaacttgaggggcacgactgagggggtttactaccaggcccccgacttcctgctggatgccgccaccgtccggcagcacatccgtgcagagccgttttactggcggctgccgcagcagttccaaggagaccagctcatggcctatggtggcaaactgaagtacagcgtggccttctattctttggatggcgtcggcacctccaattttgagcctcaagttctcatcaaaggtggtcggatcagaaagcaagtcatttacatggatgcaccagccccagagaatggagtgagacaggaacaagaagtagcaatgagagagaatttttggaaatattttaactctgtttctgaaaaacctgtcacgcgagaggattttatgtctgtcctcagcgatattgagtacatcctcatcaaggcatcgtatggtcaaggattacagcagagcagaatctcagacatttcaatggaggttggcagaaaggctgaaaagctgcacccagaagaagaggttgcatctcttttagagaattgtgtctgtcctcctggcactgtgggattctcatgtcaggactgcgcccctgggtaccacagagggaagctcccagcagggagtgacaggggaccacgccctctggttgctccttgtgttccctgcagttgcaacaaccacagtgacacctgtgaccccaacaccgggaagtgtctgaactgtggcgataacacagcaggtgaccattgtgatgtgtgtacttctggctactacgggaaggtgactggctcagcaagtgactgtgctctgtgtgcctgtcctcacagccctcctgccagttttagtcccacttgtgtcttggaaggggaccacgatttccgttgtgacgcctgtctcctgggctatgaaggaaaacactgtgaaaggtgctcctcaagctattatgggaaccctcaaacaccaggtggcagttgccagaagtgtgactgcaacccgcacggctctgtccacggtgactgtgaccgcacatctgggcagtgcgtttgcaggctgggggcctcggggctccggtgcgatgagtgtgaaccgaggcacattctgatggaaacagattgtgtttcctgtgatgatgagtgtgtaggtgtgctgctgaatgacttggatgagattggtgatgccgttctttctctgaacctcactggcattatccctgtcccatatggaattttgtcaaacctggaaaatacaactaaatatctccaggaatctttattaaaagaaaatatgcaaaaggacctgggaaaaattaagcttgaaggtgttgcagaagaaacgggacaacctgcaaaaagaagctccactaggatgttagcgagtacccaaaaggtgaatagggcaactgagagaatcttcaaggagagtcaagacctggccatagccattgagaggctgcagatgagcatcacagaaattatggaaaagacaactttaaatcagactttggatgaagatttcctactacccaattctactcttcagaacatgcaacagaatggtacatctttgctagaaatcatgcagataagagacttcacacagttgcaccaaaatgccacccttgaactcaaggctgctgaagatttattgtcacaaattcaggaaaattaccagaagccgctggaagaattggaggtattgaaagaagcagcaagccacgtcctttcaaagcacaacaatgaactaaaggcggctgaggcgctcgtgagggaagctgaggcaaagatgcaggaaagcaaccacctgctgctcatggtcaatgctaatctgagagaattcagtgataaaaagctacatgttcaagaagaacaaaatctgacctcagagctcattgtccaaggaagaggattgatagatgctgctgctgcacaaacagatgctgtacaagatgctctagagcacttagaggatcaccaggataagctacttttatggtctgccaaaatcaggcaccacatagatgacctggtcatgcacatgtcccaaaggaacgcagtcgacctggtctacagagctgaggaccatgccgctgagttccagagactagcagatgttctgtacagtggccttgaaaacatcagaaatgtgtccctgaatgccaccagtgcagcctatgtccattacaacatccagagcctgattgaagaatcggaggaactggccagagatgctcacaggactgtgactgagacgagcctgctctcagaatcccttgtttctaacgggaaagcggccgtgcagcgcagctccagatttctaaaagaaggcaacaacctcagcaggaagcttccaggtattgcattggaactgagtgaattgagaaataagacaaacagatttcaagagaatgctgttgaaattaccaggcaaaccaatgaatcactcttgatacttagagcaattcctgaaggtataagagacaagggagccaaaaccaaagagctggccacgtctgcaagccagagcgcggtgagcacgctgagggacgtggcggggctgagccaggagctgctgaacacatctgccagcctgtccagggtcaacaccacattacgagagacacaccagcttctgcaggactccaccatggccactctgttggctggaagaaaagtcaaagacgtggaaactcaagccaaccttttgtttgatcggttgaagcctttgaagatgttagaggagaatctgagcagaaacctatcagaaattaaactgttgatcagccaggcccgcaaacaagcagcttctattaaagtcgccgtgtctgcagacagagattgcatccgggcctaccagcctcagatttcctctaccaactacaataccttaacactaaatgttaagacacaggaacccgataatcttctcttctacctcggtagcagcaccgcttctgatttccttgcagtggagatgcggcgagggagagtggccttcctgtgggacctgggctccgggtccacacgcttggagtttccagactttcccattgatgacaacagatggcacagtatccatgtagccagatttggaaacattggttcactgagtgtaaaggaaatgagctcaaatcaaaagtcaccaacaaaaacaagtaaatcccctgggacagctaatgttctggatgtaaacaattcaacactcatgtttgttggaggtcttggaggacaaatcaagaaatctcctgctgtgaaggttactcattttaaaggctgcttgggggaggccttcctgaatggaaaatccataggcctatggaactatattgaaagggaaggcaagtgccgtgggtgcttcggaagctcccagaatgaagacccttccttccattttgacgggagtgggtactctgtcgtggagaagtcacttccggctaccgtgacccagataatcatgctttttaataccttttcacctaatggacttcttctctacctgggttcatacggcacaaaagactttttatccatcgagctgtttcgtggcagagtgaaggttatgactgacctgggttcaggacccattacccttttgacagacagacgttataacaatggaacctggtacaaaattgccttccagcgaaaccggaagcaaggagtgctagcagttatcgatgcctataacaccagtaataaagaaaccaagcagggcgagactccgggagcatcttctgacctcaaccgcctagacaaggacccgatttatgtgggtggattaccaaggtcaagagttgtaaggagaggtgtcaccaccaaaagctttgtgggctgcatcaagaacctggaaatatccagatcaacctttgacttactcagaaattcctatggagtgagaaaaggctgtttactggagcccatccggagtgttagcttcctgaaaggcggctacattgaattgccacccaaatctttgtcaccagaatcagaatggctggtaacatttgccaccacgaacagcagtggcatcatcctggctgccctcggcggggatgtggagaagcggggtgatcgtgaggaagcacacgtgcccttcttttccgtcatgctgatcggaggcaacattgaggtacatgtcaatcctggggatgggacaggcctgagaaaagctctcctgcacgctcccacgggtacctgcagtgatggacaagcgcattccatctccttggtcaggaatcggagaattatcactgtccaattggatgagaacaatcctgtggaaatgaagttgggcacattagtagaaagcaggacgataaatgtgtccaatctgtacgtcgggggaattccagagggagaggggacgtcactgctcacaatgagaagatcgttccatggctgtatcaaaaacctgatcttcaatttggaacttttggatttcaacagtgcagttggccatgagcaagtcgacctggacacctgctggctgtcagaaaggcctaagctggctcccgatgcagaggacagcaagctcttgccagagccccgggcttttccagtaggagcggcttcctttactatcagtcaggtccagtcagcaaaggagggcctaggacagagggagttaaaatggggccttgctgtaaaggtgcctgcgaaagctggagctggagctggagctggagctgtgctaaaaatcagagcggggacagggagggaaaggatgtatgggggtgttctgcagccacagagtcttttccaaaagaacctgcttttattttatgatgaagtgcttgatttgcaaccaaatggcaaagagaaggaattcagtgttggtgcaaatcacaacgctttcatggtggttcactggggagtctgtggtttctgccttttcccttctggagagtggctggcttcccctttctgtgtgcatccccaaatcacaattcatcccccagataggttccaggccagtgttacagatgaagggtacttgttcctagcaaagcccacccagccagccccagcttgtcctctggatcccatccgccctctcctcctaggacatgcacagcagccactcctcacagaccagcacacagatgccgctgtcaccccatcgtcagcagtgacagcaagagcagcaaactattgtgctggaggttga

SEQ ID NO: 9755 - DNA, 824 bp, Homo sapiens
  SIMILAR (148)..(498): 761254mologous to Homo sapiens MARK,accession number AF154845,Smith-Waterman Score=408.
atgggtgacctggaggataagctggtgcccttcattggagagttgcccaggcatctggaccagaattcagagcagctgaagcaagtggtccagcgggagctgaaggagctccatgagacatgccagcaacatcagctatgtcaagcaagtacatcaggggaaccaaaagaaagagacaaggaagagggtaaagattctaagccgcgttctttgcggttcacatggagtatgaagaccactagttcaatggaccctaatgacatgatgagagaaatccgaaaagtgttagatgcaaataactgtgattatgagcaaaaagagagatttttgcttttctgtgtccatggagacgctagacaggatagcccccgtgccagtggggagatgggaagtcctgccaagttggcccacgactgtcaccttaatggggtttcgcttcaagcgaatatcctgggacatcctattgccctttaaagaacattgccatcaaaaatagccaaatgagcttaagcctgtaaagaagtcccaaatttaccaggttcagggaagatacatacatatatgaggtacagtttttgaatgtactggtaatgccctaatgtggtcctgccctgtgaatctccccatgtagaatttgcccttaatgcaataaggttatacatagttatgaactgtaaaattaaagtcagtatgaactataataaatatctgtagcttaaaaagtaggttcacatgtacaggtaagtatattgtgtatttctgttcattttctgttcatagagttgtataataaaacatgattgcttaaaaacttgaaaaaaaaa

SEQ ID NO: 9756 - DNA, 452 bp, Homo sapiens
  SIMILAR (216)..(449): 751254mologous to Rattus norvegicus TAP-like ABC transporter,accession number AB027520,Smith-Waterman Score=293.
ggccaatgcccacggcttcatcatggaactccaggacggctacagcacagagacaggggagaagggcgcccagctgtcaggtggccagaagcagcgggtggccatggcccgggctctggtgcggaaccccccagtcctcatcctggatgaagccaccagcgctttggatgccgagagcgagtatctgatccagcaggccatccatggcaacctgtcagaagcacacggtactcatcatcgcgcaccggctgagcaccgtggagcacgcgcacctcattgtggtgctggacaagggccgcgtagtgcagcagggcacccaccagcagcttgcttgccccagggcgggcttttacggcaagctggtgcagcggcagatgctggggcttcagcccgccgcagacttcacagctggccacaacgagcctgtagccaacggcagtcacaaggcctga

SEQ ID NO: 9757 - DNA, 501 bp, Homo sapiens
  SIMILAR (94)..(498): 881254mologous to Homo sapiens px19,accession number AF153607,Smith-Waterman Score=604.
  misc_feature (1)...(501): n = a,t,c or g
atggtgaagtattactgggccagggcgtgctccgcagttcctgggacaagttgttnccgcctttggcagcggtaccgaaatcctgtgcaacggtatctgacggaagacatagtacaccgggagaatcagaccatgaccaccttcacctggaacatcaaccacgcccggccgatggtggtggaggaacgatgtgtttactgtgtgaactctgacaacagtggctggaccgaaatccgccgggaagcgtgggtctcctctagcttatgcggtgtctccagagctgtctgggaatttggtcttgcccagttcaaaagcaacgtgaccaagactttgaagggttttgaatatatcttggcgaagctgcaaggcgaggctgcttccaaaacacttattaagacagccagggaagccaaggagaaggcaaaggagacggccctggcagctacagagaaggccaaggacctcgccagcaaggcggccaccaagaagcagcagcagtag

SEQ ID NO: 9758 - DNA, 475 bp, Homo sapiens
  SIMILAR (30)..(143): 781254mologous to Homo sapiens px19,accession number AF153607,Smith-Waterman Score=148.
atacactggctagggtcagtgggcaactcagtatccttcccattctcatctcatgccaggaatttggtcttgcccgattcaaaagcaacgtgaccaagactatgaagggttttgaatatatcttggctaagctgcaaggtgagtttctgggtatgtggatattcctcatagggagaggctcattcagcctagcgggcgtggagtctgggttagtcattgccctgctctgagctgggactccttgtctgtactgggggtgggaggagggtgaataccacctttttagtggagcctggcccagaggagattggtgtcatgggggagggaaattaggttggtctttcaggcatcttctaaaggcagccacctgccgttcgcgacaggcgaggccccttccaaaccacttattgagacagccaaggaagccaaggagaaggcaaaggagacggcactggcagctacagagaagacgaaa

SEQ ID NO: 9759 - DNA, 449 bp, Homo sapiens
  SIMILAR (25)..(378): 921254mologous to Homo sapiens insulin receptor tyrosine kinase substrate,accession number AF119666,Smith-Waterman Score= 573.
  misc_feature (1)...(449): n = a,t,c or g
tcgcgggtcgacccacgcgtccgcgctactcaatatgaacacaaagtaattgtttatgtggagaccgntacttctcgtcggagtgtttttcagaaattcattgcagatggctgcaaagaggctctgcttgaagagaagaggcgcttctgctttctggttgataagcactgtggctttgcaaaccacatacattattatcacttacagtctgcagaactactgaattccaagctgcctcggtggcaggagacctgtgttgatgccatcaaagcgccagagaaaatcatgaatatgatcgaagaaataaagaccccagcctctacccccgtgtctggaactcctcaggcttcacccatgatcgagagaagcaatgtggtacttccgaagatcccagtttacagcgatcagttttggttgcaacgggacttgaacatgatgaaaaagccgag

SEQ ID NO: 9760 - DNA, 439 bp, Homo sapiens
  SIMILAR (183)..(437): 421254mologous to Homo sapiens Similar to BAI1-associated protein 2,accession number BC002495,Smith-Waterman Score=113.
gtgttttgtattgatatatgtactgtgtgtgtctgtgtgtgtgagatcaagatcaggttttgattggtgatgtactattactgttgtccttggtcagggacacagaggatgtttggggtttggtggtgagacattatctaacacgtgctgtgtcctttttgggtttgagccccacaccagtgagaagcatcagcaccgtgaacttgtctgagaatagcagtgttgtcatccccccacccgactacttggaatgcttatccatgggggcagctgccgacaggagagcagattcggccaggacgacatccacctttaaggccccagcgtccaagcccgagaccgcggctcctaacgatgccaacgggactgcaaagccgccttttctcagcggagaaaacccctttgccactgtgaaactccgcccgactgtgacgaatga

SEQ ID NO: 9761 - DNA, 1729 bp, Homo sapiens
  SIMILAR (319)..(939): 671254mologous to Homo sapiens insulin receptor tyrosine kinase substrate,accession number AF119666,Smith-Waterman Score= 619.
cttctccgcctcccctgtcccttctcctccccgtcccttctcctcttccctgaccctcagagctctggagaccaccccccatccccagaccagctacacattttacaactagtgcacttaagttggggaggggtctgttgtgcgtcggtggggcccacgtcctcctcacaacttcttggaatcagtgacccgtgctgtcctggctgccgggcttaagcctccgggaccaaagacacaagctcgagtttcctctaagaaaagaaagcgcccaagaatgtgggggtgaaactcccctgtaattaggatcgccagaatgttatggaacagttcaatcctgggctgcgaaatttaataaacctggggaaaaattatgagaaagctgtaaacgctatgatcctggcaggaaaagcctactacgatggagtggccaagatcggtgagattgccactgggtcccccgtgtcaacttgaactgggacatgtcctcatagagatttcaagtacccacaagaaacttcaacgagagtctttgatggaaaatttttaaaaaattccacaaagagattatccatgagctggagaagaagatagaacttggacgtgaaatatatgaacgcaactctaaaaagataccaaacagaacacaagaataaattagagtctttggagaaatcccaagctgagttgaagaagatcagaaggaaaagccaaggaagccgaaacgcactcaaatatgaacacaaagaaattgagtatgtggagaccgttacttctcgtcagagtgaaatcctagaaatccattgcagatggttgcaaagaggctctgcttgaaagagaaagaggcgcttcctgctttcctgggttgaataagcactgtggctttgcaaaacccacatacattattatcacttacagtctgcagaactactgaattcccaagctgcctcggtggcaggagacctgtgttgatgccatcaaagtgcccagagaaaatcatgaatatgatcgaagaaataaagaccccagcctctacccccgtgtctggaactcctcaggcttcacccatgatcgagagaagcaatgtggtaaggaaagattacgacaccctttctaaatgctcaccaaagatgccccccgctccttcaggcagagcatataccagtcccttgatcgatatgtttaataacccagccacggctgccccgaattcacaaagggtaaataattcaacaggtacttccgaagatcccagtttacagcgatcagtttcggttgcaacgggactgaacatgatgaagaagcagaaagtgaagaccatcttcccgcacactgcgggctccaacaagaccttactcagctttgcacagggagatgtcatcacgctgctcatccccgaggagaaggatggctggctctatggagaacacgacgtgtccaaggcgaggggttggttcccgtcgtcgtacacgaagttgctggaagaaaatgagacagaagcagtgaccgtgcccacgccaagccccacaccagtgagaagcttcagtggagaggcctaactctaatgtcgcctgcttaagcaaatcatgcttctctgtttcacgtagttgggttgacaagtttctgcctttaagataaatgagtaatagtctaatgaccagctcagccatttaaaatattttcttcctattctgttcaagaaacagtaaacttggtttcaatctttaaaaaa

SEQ ID NO: 9762 - DNA, 1993 bp, Homo sapiens
  SIMILAR (76)..(501): 791254mologous to Homo sapiens insulin receptor tyrosine kinase substrate,accession number AF119666,Smith-Waterman Score= 578.
  misc_feature (1)...(1993): n = a,t,c or g
atgttacgcctgcattttggaaagatccctggcatctgtgaggaaggacatgtcctcatagagatttcaagtacccacaagaaactcaacgagagtcttgatgaaaattttaaaaaattccacaaagagattatccatgagctggagaagaagatagaacttgacgtgaaatatatgaactatgtggagaccgttacttctcgtcagagtgaaatccagaaattcattgcagatggttgcaaagaggctctgcttgaagagaagaggcgcttctgctttctggttgataagcactgtggctttgcaaaccacatacattattatcacttacagtctgcagaactactgaattccaagctgcctcggtggcaggagacctgtgttgatgccatcaaagtgccagagaaaatcatgaatatgatcgaagaaataaagaccccagcctctacccccgtgtctggaactcctcaggcttcacccatgatcgagagaagcaatgtgtccctgttccttctgggcaatgatcaaagcgaggaaataggacagggtacttccgaagatcccagtttacagcgatcagtttcggttgcaacgggactgaacatgatgaagaagcagaaagtgaagaccatcttcccgcacactgcgggctccaacaagaccttactcagctttgcacagggagatgtcatcacgctgctcatccccgaggagaaggatggctggctctatggagaacacgacgtgtccaaggcgaggggttggttcccgtcgtcgtacacgaagttgctggaagaaaatgagacagaagcagtgaccgtgcccacgccaagccccacaccagtgagaagcatcagcaccgtgaacttgtctgagaatagcagtgttgtcatccccccacccgactacttggaatgcttgtccatgggggcagctgccgacaggagagcagattcggccaggacgacatccacctttaaggccccagcgtccaagcccgagaccgcggctcctaacgatgccaacgggactgcaaagccgccttttctcagcggagaaaacccctttgccactgtgaaactccgcccgactgtgacgaatgatcgctcggcacccatcattcgatgagaggacagccaaggactctcccagggcctctccggttctcccttgcggaatgatgggccgcatccctgtctgccacgtgctgacggtcggggaagcttcagtggaaaggcctaactctaatgtcgcctgcttaagcaaatcatgcttctctgtttcacgtagttgggttgacaaagtttctgcctttaagataaatgagtaatagtcgaatgaccagctcagccatttaaaatattttcttcctattctgttcaagaaacagtaaacttggtttcaatctttactgtattttttaaatgaattttttccttaatgacagccagaataagggatagtctatgctttcaggactggctttctgcacctgatatgaatgagaccagttttattttataaagcatgtgctcttaatagcattatgtctaaagaagatatcacgtaagtttggcatcttattcatgcaaatcataattttaaggcaatataaattatgaaaatactatataaatggtaatttaacttaaaatggtttaaggtgtaggaggcttccaggagatgggaggaaacccccaccctcccctcccaacccacggccaggagcctggtaggagtgccttaaggacgcctttgcctggcccctttattnacagccacacgtagcactcgacgaaatctcctccgagagctccttttcttggtagttaggagtcgccaacggattcagctgcacacgggccatccaggacacaggctggggcgttcggagtcacggctccttgtggtctcactcagctagctggccaaagctgcatgcattaccagtacactcaaactggtgggtgccctgggttgcctcctagtcctc

SEQ ID NO: 9763 - DNA, 449 bp, Homo sapiens
  SIMILAR (314)..(448): 531254mologous to Homo sapiens A human beta-alanine-pyruvate aminotransferase (HAPA),accession number B08069,Smith-Waterman Score=99.
ccgaatttccgggcagcccacgcgtccggcccagagaaggccagccattgcccaaggtccccaccttactgctggcagagccagggtgcaaagccccgagacctcctgggtcctgatcttatccctctcaaccacagcccccgtgtcagtcatctcctctgccacaggcacatccgcaaggccgggagggtctttgttgcagatgagatccaggttggctttggccgggtaggcaagcacttctgggccttccagctccagggaaaagacttcgtccctgacatcgtcaccatgggcaagtccattggcaacggccaccctgttgcctgcgtggccgcaacccagcctgtggcgagggcatttgaagccaccggcgttgagtacttcaacacggggtgttgggctcttcattggtgtggatctgatcaaagatgaggccacaaggacac

SEQ ID NO: 9764 - DNA, 438 bp, Homo sapiens
  SIMILAR (92)..(235): 441254mologous to Human immunodeficiency virus type 1 rev protien,accession number AB032741,Smith-Waterman Score=87.
aaaatgtactatttttaatgggtgtgcatgtcaggattttctttagaaatacactggtctggtctaatttatttaagcaggagcactttaaagtatcccaccctaccccattccacccccagtggacagaaaggaaattgactgacttgaggggatgcagacatctgggttattccaacagaccagtggttaggaggagggggtgggtagcattatggcctcgggcaggcccccccaccctgagcctctgaaagctgactttatctgtaagagggaggtcaggctcgccttctcaatagcgtgtatttggatgagatgagtttcttctggagtacacttaggcagagcagggctggcttagggctggagcctcagcgtttcacaacttctcaccttctcttccatgtcttgataccaagtaggcagcctcttcagttg

SEQ ID NO: 9765 - DNA, 851 bp, Homo sapiens
  SIMILAR (505)..(648): 1001254mologous to Homo sapiens A human beta-alanine-pyruvate aminotransferase (HAPA),accession number B08069,Smith-Waterman Score=240.
atggacgctgacatcagctttactcaaaactgccaaaacctggaagcagccaacatgtccttcagtcgccaggaactgggtgtcatcctcatgccttgctcccccaacccctcgcaacagccaccaaatcctggccagccagtctccaaaatgtcccttgagcccctgcgctgccccaagttaagtgccaaggcccacaccagaagggcgagccagggagcatggggcctcggggagagaacggtgtggacggtgccccaggaccgaagactcttttttcccgaggatcctgttaagattgtccgggcccaagggcagtacatgtacgatgaacaggggccagaatacatcgattgcatcagcaatgtggcgcacggcctgacccctgagttctcgggggcaaatggaaagcctgattttgatgtgacgctcttcagatttttcaatgttggcaacaaacagaaaagccccaaaccctccaaaacacaaagacatgagcggggcccagtgtcctgcgctgtggggctggccgtcctgaatgtcttggagaaggagcagctccaggatcatgccaccagtgtaggcagcttcctgatgcagctcctcgggcagcaaaaaatcaaacatcccatcgtcggggatgtcaggcaccagtgcctgaaaccactggggctggtgggctgccaaaggccactgagagagcacagaaagaggtacaggaaggcacatgagcagaaccaggtgctcaacaccaacagccggtacctgcatgacaacatcgtggactatgcgcagaggctgtcagagaccctgccggagcagctctgtgtgttctatttcctgaattctgg

SEQ ID NO: 9766 - DNA, 925 bp, Homo sapiens
  SIMILAR (794)..(901): 381254mologous to Methylobacillus flagellatus putative,accession number L37434,Smith-Waterman Score=54.
ctctatcctggctgggagtttggaaagagtggattaggatagtcttaaattttctataaaatgacagtctttgaggcagttaggggaagcagtggttattactccagtggacagtgatagaggcctttttctctatgtgccataatgggaaatgggtgggaagagcctctaaggcagagtttaagtgaaactactggtagtgagtcttaggagtaagtatatttagttggttatattcagtatttttaatttagtaggatagaatatatcagattgcattattttaatttgccaattaaaagtatgactgggacactgtaaaatgtactatttttaatcgggtggtgccatgtcaaggatttttcttttagaaatacactggtctggtctaatttatttaagcaggaagcacttttaaaagtatcccaccctaccccattccacccccagtggacagaaaggaaattgactgacttgaggggatgcatacatctgggttaatcccaaacagaccagtggttaaggaggcagggggtgggtagcattatggcctcgggcaggcccccccaccctgagcctctgaaagctgactttatctgtaagagggaggtcaggctcgccttctcaataagcgtgtatttcggatgagatgagtttcttctgtaaagagaaaaagatgttaaaacctcattgtctaaggcccctcatctggagaagtcttgtctgaccctctagcccagcaggaccaaggtgtggtgcctggtcccagcctgtcctctggctcccctggggctgcaagttggcccagtttgcctgcctccaattagatacggagttggctctgggggctgagatgcccatctcaagtggcatccggtccggaagggttccctgctggaaggcctttgggttttaagttgggaat

SEQ ID NO: 9767 - DNA, 1194 bp, Homo sapiens
  SIMILAR (626)..(799): 1001254mologous to Homo sapiens A human beta-alanine-pyruvate aminotransferase (HAPA),accession number B08069,Smith-Waterman Score=297.
  misc_feature (1)...(1194): n = a,t,c or g
aggcgttgatgctgaccactagnccagngcggnggaattcccagccattgcccaaggtnnnnnnttactgctggcagagccagggtgcaaagccccgagacctcctgggtcctgatcttatccctctcaaccacagcccccgtgtcagtcatctcctctgccacaggcacatccgcaaggccggaggggtctttgttgcagatgagatccaggttggctttggccgggtaggcaagcacttctgggccttccagctccagggaaaagacttcgtccctgacatcgtcaccatgggcaagtccattggcaacggccaccctgttgcctgcgtggccgcaacccagcctgtggcgagggcatttgaagccaccggcgttgagtacttcaacacgtttgggggcatgcccagtgtcctgcgctgtggggctggccgtcctgaatgtcttggagaaggagcagctccaggatcatgccaccagtgtaggcagcttcctgatgcagctcctcgggcagcaaaaaatcaaacatcccatcgtcggggatgtcaggggtgttgggctcttcattggtgtggatctgatcaaagatgaggccacaaggacaccagcaactgaagaggcatgtctacttggtatcaaggctgaaggagaactacgttttgctgagcactgatggccctgggaggaacatcctgaagtttaagcccccaatgtgcttcagcctggacaatgcacggcaggtggtggcaaagctggatgccattctgactgacatggaagagaaggtgagaagttgtgaaaaccgctgaagctccagccctaagccagccctgctctgcctaagtgtactcccagaagaaactcatctcatccaaatacacgctattgagaaggcgagcctgacctccctcttacagataaagtcagctttcagaggctcagggtgggggggcctgcccgaggccataatgctacccaccccctccctcctaaccactggtctgttggaataacccagatgtctgcatcccctcaagtcagtcaatttcctttctgtccactgggggaggaatggggtagggagggatactttaaagtgctcctgcttaaataaattacaccaaaccagcggtatttctaaagaaaatcctgacatgcacacccgattaaaaatagtacattttacagtgaaaaa

SEQ ID NO: 9768 - DNA, 622 bp, Homo sapiens
  SIMILAR (6)..(437): 991254mologous to Homo sapiens macrophage ABC transporter,accession number AF250238,Smith-Waterman Score=729.
ggaggcaggaggtgtgccggatcttgaaacaggtcttccttatcttcccccacttctgcttgggccgggggctcattgacatggtgcggaaccaggccatggctgatgcctttgagcgcttgggagacaggcagttccagtcacccctgcgctgggaggtggtcggcaagaacctcttggccatggtgatacaggggcccctcttccttctcttcacactactgctgcagcaccgaagccaactcctgccacagcccagggtgaggtctctgccactcctgggagaggaggacgaggatgtagcccgtgaacgggagcgggtggtccaaggagccacccagggggatgtgttggtgctgaggaacttgaccaaggtataccgtgggcagaggatgccagctgttgaccgcttgtgcctggggattccccctggtgaggtgagtccaggggtggaggccaggtgcagggacagtgagtggctgccctactgcatgccctgcccatcatcctttactgaacacctactgtgtatccaccaccttttattgggcacctactgtatgccaatatttgtgctcctatttttattttattaaattattatttatttaaaaaaaaaaaa

SEQ ID NO: 9769 - DNA, 3437 bp, Homo sapiens
  SIMILAR (3221)..(3352): 311254mologous to Homo sapiens ABC transporter member 7,accession number AF328787,Smith-Waterman Score=46.
atggggtttcaccatgttggtcaggctggtctcaaactcctgacctcaggcactcctcagctgctggccctggtacagcactgggtgcccggggcacggctggtggaggagctgccacacgagctggtgctggtgctgccctacacgggtgcccatgacggcagcttcgccacactcttccgagagctagacacgcggctggcggagctgaggctcactggctacgggatctccgacaccagcctcgaggagatcttcctgaaggtggtggaggagtgtgctgcggacacagatatggaggatggcagctgcgggcagcacctatgcacaggcattgctggcctagacgtaaccctacggctcaagatgccgccacaggagacagcgctggagaacggggaaccagctgggtcagccccagagactgaccagggctctgggccagacgccgtgggccgggtacagggctgggcactgacccgccagcagctccaggccctgcttctcaagcgctttctgcttgcccgccgcagccgccgcggcctgttcgcccagatcgtgctgcctgccctctttgtgggcctggccctcgtgttcagcctcatcgtgcctcctttcgggcactacccggctctgcggctcagtcccaccatgtacggtgctcaggtgtccttcttcagtgaggacgccccaggggaccctggacgtgcccggctgctcgaggcgctgctgcaggaggcaggactggaggagcccccagtgcagcatagctcccacagcgcccttgagtgtgcacagcccattgtctgcaggttctcggcaccagaagttcctgctgaagtggccaaggtcttggccagtggcaactggaccccagagtctccatccccagcctgccagtgtagccggcccggtgcccggcgcctgctgcccgactgcccggctgcagctggtggtccccctccgccccaggcagtgaccggctctggggaagtggttcagaacctgacaggccggaacctgtctgacttcctggtcaagacctacccgcgcctggtgcgccagggcctgaagactaagaagtgggtgaatgaggtcagatacggaggcttctcgctggggggccgagacccaggcctgccctcgggccaagagttgggccgctcagtggaggagttgtgggcgctgctgagtcccctgcctggcggggccctcgaccgtgtcctgaaaaacctcacagcctgggctcacagcctggatgctcaggacagtctcaagatctggttcaacaacaaaggctggcactccatggtggcctttgtcaaccgagccagcaacgcaatcctccgtgctcacctgcccccaggcccggcccgccacgcccacagcatcaccacactcaaccaccccttgaacctcaccaaggagcagctgtctgagggtgcactgatggcctcctcggtggacgtcctcgtctccatctgtgtggtctttgccatgtcctttgtcccggccagcttcactcttgtcctcattgaggagcgagtcacccgagccaagcacctgcagctcatggggggcctgtcccccaccctctactggcttggcaactttctctgggacatgtgtaactacttggtgccagcatgcatcgtggtgctcatctttctggccttccagcagagggcatatgtggcccctgccaacctgcctgctctcctgctgttgctactactgtatggctggtcgatcacaccgctcatgtacccagcctccttcttcttctccgtgcccagcacagcctatgtggtgctcacctgcataaacctctttattggcatcaatggaagcatggccacctttgtgcttgagctcttctctgatcagaagctgcaggaggtgagccggatcttgaaacaggtcttccttatcttcccccacttctgcttgggccgggggctcattgacatggtgcggaaccaggccatggctgatgcctttgagcgcttgggtgagaacttcctgtcaggagacaggcagttccagtcacccctgcgctgggaggtggtcggcaagaacctcttggccatggtgatacaggggcccctcttccttctcttcacactactgctgcagcaccgaagccaactcctgccacagcccagggtgaggtctctgccactcctgggagaggaggacgaggatgtagcccgtgaacgggagcgggtggtccaaggagccacccagggggatgtgttggtgctgaggaacttgaccaaggtataccgtgggcagaggatgccagctgttgaccgcttgtgcctggggattccccctggtgagtgttttgggctgctgggtgtgaatggagcagggaagacgtccacgtttcgcatggtgacgggggacacattggccagcaggggcgaggctgtgctggcaggccacagcgtggcccgggaacccagtgctgcgcacctcagcatgggatactgccctcaatccgatgccatctttgagctgctgacgggccgcgagcacctggagctgcttgcgcgcctgcgcggtgtcccggaggcccaggttgcccagaccgctggctcgggcctggcgcgtctgggactctcatggtacgcagaccggcctgcaggcacctacagcggagggaacaaacgcaagctggcgacggccctggcgctggttggggacccagccgtggtgtttctggacgagccgaccacaggcatggaccccagcgcgcggcgcttcctttggaacagccttttggccgtggtgcgggagggccgttcagtgatgctcacctcccatagcatggaggagtgtgaagcgctctgctcgcgcctggccatcatggtgaatgggcggttccgctgcctgggcagcccgcaacatctcaagggcaggtcccagccggcagcggccttcgtggcggccgagttccctggggcggagctgcgcgaggcacatggaggccgcctgcggcttccaagctgccgccgggagggcgctgcgcccctggcgcgcgtctttggagagctggccggtgcacggcgcagagcacggcgtggaggactttttccgtgagccagacgatgcttggaggaggtattcttgtacttctccaaggaccaggggaaggacgaggacaccgaagagcagaaggaggcaggagtgggagtggaccccgcgccaggcctgcagcaccccaaacgcgtcagccagttcctcgatgaccctagcactgtcgagactgtgctctgagcctccctcccctgcggggccgcggggaggccctgggaatggcaagggcaaggtagagtgcctaggagccctggactcaggctggcagaggggctggtgccctggagaaaataaagagaaggctggagagaagccgtggtggtgaaaaaaaaaaa

SEQ ID NO: 9770 - DNA, 728 bp, Homo sapiens
  SIMILAR (52)..(519): 861254mologous to Homo sapiens R28379_3,accession number AC006276,Smith-Waterman Score=685.
cggacgcgtgggccgccgccgcagagccggagcgggggccgccggcgccgcatccctctctacctgccaacatcctgtattaaagaacttgtggccggaggtgtggctgtggagagctggccggggagggacgctgctcagctgctgctctgctcctgtctcctgtcccctcccccggtcatgacagagacccgtgagccagctgagactgggggctacgccagcttggaagaagatgatgaagacctttccccaggccccgagcattcctctgattcagaatacactctctcagagccggactccgaagaggaagaagatgaggaggaggaggaagaggagaccactgacgatcctgaatatgatcctggctacaaggtgaagtagcgccttggcggaggccgtggtggcccatcccgccgggccccccgttgcagcccagcccccggcccagccttgccagctctgtggccgctcaccccttggggaggccccaccgggaaccccacgctgcacgggcacttcatgctgcatgcccggggtgaggtgtaggcagagcccccatacggggagcttggcagaaggggtggggtgggaggagggggctgaggaaattggggttgtgacagtggtcatgggggatggggtactgccggtctgtgttgtcttagaagtagatgtgtgatggccagaataaaagccaaaatctgtaaaaaaaaaaaaaaaaa

SEQ ID NO: 9771 - DNA, 711 bp, Homo sapiens
  SIMILAR (31)..(381): 791254mologous to Homo sapiens R28379_3,accession number AC006276,Smith-Waterman Score=493.
atggagagtgacatcggcagaaagggtggcaaagaccctgaggcaggccccgagcattcctctgattcagaatacactctctcagagccggactccgaagaggaagaagatgaggaggaggaggaagaggagaccactgacgatcctgaatatgatcctggctacaaggtgaagcagcgccttggcgggggccgtggtggcccatcccgccgggccccccgtgcagcccagcccccggcccagccttgccagctctgtggccgctcaccccttggggaggccccaccgggaaccccaccctgccggctctgctgccctgctacagccccccaggaagcaccagcccctgaaggcagggccctcggggaggaagaggaggaaccacctcgggctggggagggccgaccagctgggcgggagaaggaggaggaagaggaggaggagggaacctaccactgtacggaatgtgaggattccttcgacaacctgggggagctgcacgggcacttcatgctgcatgcccggggtgaggtgtaggcagagcccccatacggggagcttggcagaaggggtggggtgggaggagggggctgaggaaattggggttgtgacagtggtcatgggggatggggtactgccggtctgtgttgtcttagaagtaaatgtgtgatggccagaataaaagccaaaatctgtaaaaaaaaaaaaaaa

SEQ ID NO: 9772 - DNA, 2064 bp, Homo sapiens
  SIMILAR (592)..(915): 851254mologous to Homo sapiens proteasome subunit p112,accession number D44466,Smith-Waterman Score=483.
cacaagaacttcgtgaagcatacacaagtatcaatagccatatctatcaagcagaagaaaggatatcagagattgaagatcaactcaatgaaataaagcaagaaaacaagattagagaaaaaagaatgaaaagaaacgaacaaagcctgcaagaagtaggggactatgtgaaaagaccaaatctacgtctgattggtgtatctgaaagtgacggggaaaatggaaccgagttggaaaatactcttcaggatattaaccaggagaacttccccaatctagcaaggcaggccaacattcaaattcaggaaatacagagagcaccacaaagatactcctcgaaaagagcaaccccaagacacataatcgtcagattcaccaaggcctcccttacaagaactcctgaaggaagcactaaacgtggaaaggaacaaccggtaccagccacagcaaaaacataccaaattgtaaagaccattgatgctacaaagaaactgcaacaacgggcaaaataacccaggtcacaggatgtccccccaaagccatcccagtcagatgtctgcagacacctgctcccctggcaacagtgacccagacctgattcagtcttcatcaatcattctactagatacgcttctcctcactgaaaatgaaggtggtcataatgtcacaatctccttgcagtccaggactgggcatactcatatgccttctgtggttggcgtccttgtatttacccagttttggttctggtttcctctttcacacttcctgtcattggcttatacccctacctgtgtcattggccttaacaaggacttaaagatgccgaaagttcagtataaatcgaactgtaaaccatccacatttgcatatcctgcccctctggaagtaccaaaagaaaaagaaaaggaaaagcattgtaagacatatagtccagagaggatatctacaaccagcgctgaaggaaattgttctattttccattgctttcctgtaaagcaaaaaggctatagcacccaaatctcaatcttggaagtacatgagagcaaattcatatccaaggtttctactgctgtattatctataattgccaaggctaaaaagaaggaaaaagaaaaggaaaaaaaggaggaggagaaaatggaagtggcatctcccgtgcactccggacccttccgggacagactcgatccgctacgcacggcccgctctccgctagctgcgaggcctggctctaggcacctccctgctctgagcctcagtttacctcggtgctcaataagggaatggccaaaggggtccaacttgggggacgtgcccgagccaccgcccgcccgcgcccagccggccccgcgcagtctcacctggatgcccgtctccggcggcttgcagggccctgcaggcggccgctggacggcaggcaggaggcgtggagtggtcagtaggcggccgctgcacgggcccccccgcctggcgccgaacacgggcgcaacagcgcctccagcagccgcagccccggcgccaccgcgtcctctggcccggcctcggcaccagcaccccgaccagcgccgccccggccgccgccggccgcgcacgtcccgcagcatctcccgcagcggcgcgcggctcccgggcggccagcgacgacgcgcggcacagcacgaagaccagcggcgagcggatggcgcggccgccgccgccgcgcccccgccgccccagccgccctcgccgccctctgcgccccgcgccgccccgggccccgcgccctctgccgccgcgccgcccggcttggccgcgcctggctccggcgggaacaccgcccgacagggctgcaccaactgcacccaagctggcacctcaactgtcaggcccattgaggttaaagtggagcaaagagcagttattactggaggcaaccttattcctcccccaagtctcagagcagctcctcggtccccggctgatgaaaaaataggaagtgtgcaagtgttggggcaatgggcagtgggtgacttcatgatcatcgttcatgaggtgcctgatatagaacaaggtgaccattaa

SEQ ID NO: 9773 - DNA, 849 bp, Homo sapiens
  SIMILAR (87)..(812): 631254mologous to Homo sapiens p40,accession number U93568,Smith-Waterman Score=690.
taatgctttacagcaggggtccccaacccatgggccatggaccagtcctagtctgtggcctgttaggaactggctgcacagcaggagcacaagaacttcgtgaagcatacacaagtatcagtagccaaatcgatcaagcggaagaaaggatatcagaaattgaagataaactcaatgaaataaagcgtgaagacaagattacagaaaaaagaatgaaaaggaacgaacaaagcctccaagaaatatgggactatgtgaaaagaccaaatctacgtctgattggtgtacctaaaagtgatgtggagaatggaaccaagttggaaaacactcttcaggatattatccaggagaacttccccaatctagcaaggcaggccaacgttcagattcaggaaatacagagaacgccacaaagatactcctcgagaagagcaactccaagacacataattgtcagattcaccaaagttgaaatgagggaaaaaagtgttaagggcagccagagagaaaggtcgggttacccacaaagggaagccggtcagactaacagctgatctctcagcagaaaccgtacaagccagaagagagtgggggccaatattcaacattcttaaaggaaagaattttcaacccagaatttcatatccagccaaactaagcttcataagtgaaggagaaataaaatactttacagacaagcaaatgctgaaagattttgtcaccaccagcctgccctaaaagagctcctgaaggaagcactaaacatggaaaggaacaactggtaccagccactgcaaaagcatgccaaattgtaaagaccatcgaggctaggaagaaagtgcatcaact

SEQ ID NO: 9774 - DNA, 563 bp, Homo sapiens
  SIMILAR (151)..(336): 741254mologous to Homo sapiens dJ1184F4.2 (novel protein similar to nucleolar protein 4 (NOL4) (NOLP)),accession number AL034550,Smith-Waterman Score=235.
atggtgaatggaagaatcccgcaggcccccagccagttctcgcacctcgcgagactccacccagccccttccccgaacagcgacccgtccccgttcctagctgagctcctgcttatgccctctgtgattggcctaactcctagttacccttcaagattcagctcagaaagcaccttcctccaggaagccttccctgatctctgccaggcagaggaccctgtgtacgccaacggcggcctcaactacagttaccgcgggtacggggccttgagcagcaacctgcagccccctgcctccctccaaacaggaaaccacagtaatgggcccacggacctcaagcatgaaaggcggggcctttaccacctccaccacccccacgcccaccccttccagcaccagcaccagcaggcccgtgcccaccgctcagctcagccccacggagatcagcgccgtgcggcagctcatcgcgggctaccgggagtctgctgccttcctgctgcgctctgcagatgaactggaaaacctcatcctacagcagaacagaccccgccggcacctgtaat

SEQ ID NO: 9775 - DNA, 477 bp, Homo sapiens
  SIMILAR (205)..(2): 881254mologous to Homo sapiens Human secreted protein, SEQ ID NO: 8148,accession number G04067,Smith-Waterman Score=355.
  misc_feature (1)...(477): n = a,t,c or g
gaaaggggtccagtttcagttttcttcatatggctagccagttttcccaacaccatttattaaatagggagtcctttccccattgtttgtttttctcaggtttctcaaagatcagatggttgtagatgtgtagcattatttctgagggctctgttctgttccattggtctatatctctgttttggtactggtaccatgctgttttttttttactgtagccttgtagtatagtttgaagtcaggtagtgtgatgcctccagctttgttcttttggcttaggattgtcttggctataaaggctcttttttgcttccatatgaaatttatagcaggtttttctaattctgtgaagaaagtcaatgttagcttgatggggatagcattgaatctataaattactttgggcagtatgggccattttcacaatattgattcctcctatccatgagcatggnatggttttccatttgtttgtgt

SEQ ID NO: 9776 - DNA, 352 bp, Homo sapiens; identical to SEQ ID NO: 3402
  SIMILAR (2)..(193): 871254mologous to multiple sclerosis associated retrovirus polyprotein,accession number AF009668,Smith-Waterman Score=292.

SEQ ID NO: 9777 - DNA, 517 bp, Homo sapiens
  SIMILAR (1)..(114): 321254mologous to Homo sapiens Human secreted protein, SEQ ID NO: 7157,accession number G03076,Smith-Waterman Score=67.
ttttttttttttttttataaatatatgtatatattttatttacattatatacatggcatatctatacagttacatttacacttgacttagagtcaaagtcatatacacacacacaggacttggactcaaagcttttaatgacaagcatgcaaaatttcttagtatagaccctaagagtacccttaatataagtatgtttatttaaaaattctatgtatctactactgttaccagggggtccttgctcccagagctcccaagatggtggcaggctgcttccaagacggtggcaagcctcgtgttctctgacctggggttcttggcctcacggattccaaggaatggaatcttgggccatgcggtgagtgttatagctctattagaagccgtgggtcacggaagagaaccgtggaacccagtgactagtgttcagctcgattaggacgaacccaggctcttagccgtgcaggaacaatgggcaagccttcagtccgattcaggagttggcaaagggcgc

SEQ ID NO: 9778 - DNA, 1926 bp, Homo sapiens
  SIMILAR (742)..(1431): 841254mologous to multiple sclerosis associated retrovirus polyprotein,accession number AF009668,Smith-Waterman Score=1009.
atgaatcaaagtgaccaggaaatgactggagcgtttgtccacatgaaaagttatacgggcctgatctcaggggtggcagtaaagatggaaagacacatttatcaagacagacgaattgcaatagagaaagagtttaattcatgtagaactggctgtatgggagactggagttttactattactcaaatcagactcctggaaaacacagggatcagggtttttaaggataatttggtagaggaagcagagtggtttacagtcctggaccttatggatgcctttttctgcatccctgtacatcctgactctcaattcttgtttgcctttgaagatccttcgaacccagcatctcaacttacctggactgttttaccccagaggttcaagaatagtccccatctatttggccaggcattagcccaagacttgagccagttctcatacctggacactcttgtccttcggtacatggatgatttacttttagctgcctattcagaaaccttgtgccatcaagccaccgaagctctcttaaatttcctcgccacctgtggctacaaggtttccaaaccaaaggctcagctctgctcacagcaggttaaatacttagggctaaagttatccaaaggcaccagggcccccagtgaggaatgtatccagcctatactggcttatcctcatcccaaaaccctaaagcaactaagagcgttccttggcataacaggtttctgccgaatatggattcccagcatactcactgctaaaggagacttgtggctgtcagataaccatttacttaaatatcaggttctattacttgaagggccagtgctgcaactgcgcacttgtgcaactcttaacccagccacatttcttccagacaatgaagaaaagatagaacataactgtcaacaagtaattgctcaaacctacgccactcgaggggaccttttagaggttcccttgactgatcccgacctcaacttgtatactgatggaagttcctttgtacaaaaaggacttcaaaaagcgggatatgcagtggtcagtgataatggaatacttgaaagtaatcccttcactccaggaactagcactcagctggcagaactggtagccctcacttgggcactagaattcggagaaggaaaaagggtaaatataaatacaggctctaagtatgcttacctagtcctccatgcccatgcatcaatatggagagaaagggaattcctaacttccgagggaacacctatcaaacatcaggaagccattaggagattattattggttgtacagaaacctgaagaggtggcagtcttacactgctggggtcatccgaaaggaaaggaaagggaaatagaagggaactgccaagcggatattgaagccaaaagagcctcaaggcaggaccctccattagaaatgcttatagaaagacacctagtatggggtaatcccctctgggaaaccaacccccagtactcagcagaagaaatagaatggggaatctcacgaggacatagttttctcccctcaggatggcaagccaccgaacaaggaaaaatacctttgcctgcagctaaccaatggaaattacttaaaaccactcaccaaaactttcacttatgcattgatagcacccatcagatggccaaattgttatttactggaccaggacttttcaaaactctcaagcagatagttggggcctgtaaatttgtctcttccagaattaaagctgtaaaactacaaatcattcttcaaatggagccccagatgcagtccatgactaagatctaccgcggacccctggaccaccctgacagcccatgctccaatgttaacgacatcgaaggcacccctcctgaggaaatctcaactgcacaacccctactacaccccaggccagcaggaagcagttag

SEQ ID NO: 9779 - DNA, 2121 bp, Homo sapiens
  SIMILAR (1274)..(1357): 531254mologous to multiple sclerosis associated retrovirus polyprotein,accession number AF009668,Smith-Waterman Score=63.
atggtattagtagtagtagcagtagtagtggtggttttggtagtagcagtaattgtagtcgtagtagtagtagtagcagcagtagtggtaggagcagtagtagtagtggtggtggtggtaatggtagtagtggtggtggtagtggtagtagaggaggacaaccagcacaaaactggtgcaataaacaacaataatacagctaagaaccctcaacagagtccatttcactcccctgccacctccactggagcagaggctactcaaatgagaaggaaccagaaaaccaatcctcataatatgacaaaacaagtctctttaacaccccccaaaatcacactagctcaccagcaatggatccaaaccaagaagaaatacctgatttacctgaaaaagcattcaggagtgaataaaatacctaggaatccaacttatgagggatgtgaaggaccttttcaaggagaactacaaaccactgctcaacaaaataaaggaggacacaaacaaacggaagatcattccatgctcatggataggaagaatcaatattgtgaaaatggccatactgcccaagctgtacctaacccttacactctgctttcccaaataccagaggacgcagagtggtttacagtcctggaccctaagcatgccgttttctgcatccctgtacatcctgactctcaattcttgtttgcctttgaagatccttcaaacccaatgtctcaactcatctggactgttttaccccaagggttcaggaatagcccccatctatttggccaggcattagcccaagacttgagccaattctcctacctggacactcttgtccttcggtacatggatgatttacttttagccacccattcagaaaccttgtgccatcaagccacccaagcactcttaaatttccttgctacctgtggctacaaggtttccaaaccaaaggctcagctctgctcacagcaggttaaatacttagggctaaaattatccaaaggcaccagaaccctcagtgaggaacgtatccagcctatactgggttatcctcatcccaaaaccctaaagcaactaacagcgttccttggcataacaggtttctgccaaatatggattcccaggtacagcaaaatagccagaccattaaatacacgaattaaggaaactcaaaaagccaatacccatttagtaagatggacacctgaagcagaagtggctttccaggccctaaagaaggcgctaacacatgccccagtgttaagcttgccagtggggcaaaacttttctttatatgtcacagaaaaaaacaggaatagctctaggagtccttacacaggaactagtgctcagctggcagaactaatagccctcactcgggcaccagaattaggagaaggaaaaagggtaaatatatatgcaaactcaatagggagagaaagggaattcctaacttccaagggaacacttgtcaaacatcaggaagccattaagagattattattggctgtacagaaacctaaagaggtggcagtcttacactgctggggtcatcagaaaggaaaagaaagggaaatagaagagaaccgccaagcggatattgaagccagaagagccgcaaggcaggaccctccattagaaatgcttacagaaggacccctagcattcgagctggcaatggctacggctcgagctgagctttcactcgccatccaccactgctgtttgccgccgccaccgcagacccgctgctggcttccatcccttcggatccggcagggtgtctgctgcattcctgatccagcgagagctataacactcaccgcatggcccaagattccattccttggaatccgtaaggccaagaatccccaggtcagagaacacgaggcttgccaccatcttggaagtggcctgccgccattttggaagtggcccaccaccatcttgggagctctcggagcaaggacccctggtaacactggcagtacttatactttcattggttatacttatacttccccggttatatttatactttcctggcagtacgtatactttcatggtttatactattttaaaattattttttattaaatggagccaaattttttaaaaaaaaaa

SEQ ID NO: 9780 - DNA, 1287 bp, Homo sapiens
  SIMILAR (871)..(1281): 901254mologous to Homo sapiens p40,accession number U93564,Smith-Waterman Score=638.
atgattacgaattcgagctcggtaccccctgaacctggaggatacctctcctgcggcaatgcagtcaccctgaagtgttccaggaaggctgtctataggttcagccacactgagctcctgtgggagaagccccagctgtgtctgcagtggtggacaagcggttttttcgccctttgcgttggagttccacgttctttaatagtggactcttgttccaaactggaacaacactcaaccctatctcgggctattcttttgatttataagggattttgccgatttcggaaccaccatcaaacaggattttcgcctgctggggcaaaccagcgtggaccgcttgctgcaactctctcagggccaggcggtgctgaatgtggagtaaatgcagatgttgagaaacatcttgaattgggcaagaaattacttgcagctggacagctagctgatgctttatctcagtttcatgctgccgacagagaatgtgaagacaatgtgaagacacataaggaaaagaaagccatttacgaaccaaggagagtacgtctgtgttatattctttcctcgcagccctcagaaggtatcaaccctgtggacaccttcatcttggactttcagcttccagaactaaatgccaaaaagcaagaaattattaaagcataccgaaaattagcactgcagtggcacccagataacttccagaatgaagaagaaaagaaaaaagctgagaaaaagttcattgatatagcagctgctaaagaattaaggtcctttctgttagagggaaaccttacaaccagaaaggacatccccaccaaaaacccatctgtacatcaccatcatcaaagaccaaaagtagataaacccacaaagatggggaaaaaacagaacagaaaaactggaaactctaaaaagcagagcgcatctcctcctctaaaggaacgcagttcctcaccagcaacagaacaaagctggatggagaatgactttgacgagctgagagaagaaggcttcagacgatcaaattactctgagctacgggaggacattcaaaccaaaggcaaagaggttgaaaactttgaaaaaaatttagaagaatgtataactagaataaccaatacagagaagtgcttaaaggagctgatggagctgaaaaccaaggctcaagaatgcagaagcctcaggagccaatacgatcaactggaagaaagggtatcagcgatggaagatgaaatgaatgaaatgaagcgagaagggaagtttagaagaaaaaagaataaaaagaaatga

SEQ ID NO: 9781 - DNA, 3464 bp, Homo sapiens
  SIMILAR (746)..(982): 831254mologous to Homo sapiens p58,accession number U28424,Smith-Waterman Score=313.
atggtggcccccggctccgtgaccagccggctgggctcggtattccccttcctgctagtcctggtggatctgcagtacgaaggtgctgaatgtggagtaaatgcagatgttgagaaacatcttgaattgggcaagaaattacttgcagctggacagctagctgatgctttatctcagtttcatgctgccgtagatggtgaccctgataactatattgcttattatcggagggctactgtctttttagctatgggcaaatcaaaagctgcacttcctgatttaactaaagtgattcaattgaagatggacttcactgcagcaagattacagagaggtcacttattactcaaacaaggaaaacttgatgaagcagaagatgattttaaaaaagtgctcaaatctaatccaagtgaaaatgaagaaaaggaagcacagtctcaacttataaaatctgatgaaatgcagcgtttgcgttcacaagcacttaacgcttttggaagtggagattatactgctgctatagccttccttgataagattttagaggtttgtgtttgggatgcagaactacgggaacttcgagctgaatgttttataaaagaaggagaacctaggaaagctataagtgacttaaaagctgcgtcaaagttgaagaatgataatactgaagcgttttataaaataagcacactgtactaccaactaggagaccacgactgttccttcagtgagtttcgggatgttcttaaccttgaccaggatcataaaaggttgtttcgcacactataaacaagtaaagaaacttaataagctgattgagtcagctgaagagctcatcagagatggcagatacacagatgctaccagcaaatatgaatctgtcatgaaaacagagccaagcattgctgaatatacagttcgttcaaaggagaggatttgcccactgctttttctaaggacgagaaagcctgttgaagctattacgggtttgttctgaagttttacagatggaacctgacaatgtgaatgccctgaaagatcgagcagaggcctatttgatagaggaaatgtatgatgaagctattcaggattatgaaactgctcaggaacacaatggaaaatgatcagcagattcgagaaggtctagagaaagcacaaagattattggaaacagtcgcagaaacgagattattattaaaatcttgggagtaaaaagaaatgccaaaaagcaagaaattattaaagcataccgaaaattagcactgcagtggcacccagataacttccagaatgaagaagaaaagaaaaaagctgagaaaaagttcattgatatagcagctgctaaagaagtcctctctgatccagaaatgagaaagaagtttgacgacggagaagatcctttggatgcagagagccagcaaggaggcggcggcaaccctttccacagaagctggaactcatggcaagggttcaatcccttcagctcaggcggaccatttagatttaaattccacttcaattaaaccaactgtttttctggtcttcttaatttggttaaatattaaaaacaaagaaatcttgttccgggaccctaatgaaaaaaaatttcaaatcttttcagtttgtccatgaccaaagagttgctttaataggaaaaaatctgttcttatccctgtcagatttatggttaatgggtttgcaacggcaaggaggcaaggaatggttctatttctgacagagcagcctgcatctgctttatgctgtctggagggaagtggtctgaggcaggctcacccgtggaagtgctcacgtattctgtattatttttctacactggagctggagattcttctcttcaacagccttgcagagtaagtccagtgcctaacaaagtgtaagaaggagctgtaatcttcaatgaggatggttatacttcagtattcttaaagagaacatgaacatttttgagctgtatgttcttagggacaactgtgcttcgatgtggtcagtctcgtcacttgtgagtagctgtgaaatctttagtgtgcatgtgtttgcacctctgtggtctgtcaacgtggctgtcactgaaggagcaagagaccatcttttaggaaccctgccaccaaataataatataccccccggcctagacctttggattaatgttaaatgtaccatttttttggttcagtacccgaagaagaatacctgaaacttgaatcctataaattccctatgaccccttttaatattaaacacaacaaattaaaagttgttataggtaaaataagttcagataaaatagtggtggtatttaaaataatattgctgaagtgcaggattgaaatactttttaaacaactgaagttctgagtttttataggggattttcatgtaacaagactggtttagaaacgtaaagttgcgcagtcaacataaataaatacagaatgccatgttctccacttctaagtaaagacagtgggcagcttctgtttctccttctatcaaggcttcaccctatcttaaaggtctgtggtgcctcccacgtgggacctgtctgctggtatgtgttaaacagcagaccggcccttctaccagatcttgatgcctctgattttctcctgcctacaagaaaatacaggcaaggttagtcaggtctggctatatttccactgttgtttcatttaataagatggcatctcctcttgagatatgttcttcttaccttttaagaagatactatttaagaagtgaactattcagtctttgtatactgaatgctttttccctaaaaaatgttaatcaagaatattgaatatttatggcactcttgatgctgcattttgaaagctgaaggaattactttagatagataggaattgctacctttattctggaaaggttttgtttctgcctcaaagcattttgaagtgttttaaccattaaagggtctaatttttttttcttaaatgaaatcaagcattttaattcactgtgggaggcatcctgaccacggacatccataacagcaaagcacaaatcgttttcgtctgtagtcatatcctgaaacataggtggacaaattttaaacccggagagacaaaaatccaccaaagtggaattggaggcagaaacacctaaagtgccttcctgcatcctatttagggagtctatttcctacccaataaacttgacaacgcatttgggaaaactagtgaacacccttacagctttcattttgctttaatgtttcaattcaagccggtgtaaaaataatttcccaaggcatttctgtttattctttagtaatctcactactggctatgtcagcaatatctttttcaatctggttccttttgtatatgatgtcactgtgacctctttgaaatatagtgatggcttttacctactttgaaaagaattttcacatagagtcagaaaaaaaaaaaaagtcgacg

SEQ ID NO: 9782 - DNA, 522 bp, Homo sapiens
  SIMILAR (106)..(519): 731254mologous to Rattus norvegicus HMG2,accession number D84418,Smith-Waterman Score=538.
atgactgacctgccaggaagagcacaagaagaaacacccggactcttctgtcaatttcgtggaattctccaagaagtgtttggagagatggaagaccacgtctgcaaaggagaagtgaagtttgaagagaaggcaaaaagtgacaaagctcgctgtgacagggagattaaaaattacattcctccgaaatgtaagaaaggaaggccaccatctgccttcttcctgttttgctctgaacatcgcccaaagatcaaaagtggacacccaggcctatttgtcgtggaaactgcaaagaaactgggtgaaatgtggtctgggcagtcagccaaagataaacaaccatatgagcagaaagcagttaagctacaggagagatatgaaaagggtattgctgcatatcgtgctaagggcaaaagtgaagcaggaaagaagggctcaaagaagaacaaaccagaagatgaggaggaggaggaggagaaagaagatgaagatgaggaggaagagggtgaagatgaagaataa

SEQ ID NO: 9783 - DNA, 3546 bp, Homo sapiens
  SIMILAR (400)..(1023): 841254mologous to Cloning vector pBACe3.6 levansucrase,accession number U80929,Smith-Waterman Score=919.
tactctatagctacggttctggcagcggaggaaaagctagatcccagaagagatgaggcaaaacgcctgaggccgcagcgcaacttcaatatcacattcacccacgggacggtttttcgccctttgacgttggagtccacgttctttaatagtgcactcttgttcaccaccatcaaacaggaccttcccccactgcccaagaccatcatcactaacgcatttcaccgatttcggaaccaccatcaaacaggatttaagctgtctgcggcaaaccagcgtggaccgcttgctgcaactctctcagggccaggcggtgaaggacaatcagctgttgcccgtctcactggtgaaaagaaaaaccaccctggcgcccaatacgcaaaccgcctctccccgcgcgttggccgattcattaatgcagctggaacgacaggtttcccgactggaaagcgcgcaaggagcgactcaagcctcgcgaaagaaaataaccaaaaagcatacaaagaaacgtacggcgtctctcatattacacgccatgatatgctgcagatccctaaacagcagcaaaacgaaaaataccaagtgcctcaattcgatcaatcaacgattaaaaatattgagtctgcaaaaggacttgatgtgtgggacagctggccgctgcaaaacgctgacggaacagtagctgaatacaacggctatcacgttgtgtttgctcttgcgggaagcccgaaagacgctgatgacacatcaatctacatgttttatcaaaaggtcggcgacaactcaatcgacagctggaaaaacgcgggccgtgtctttaaagacagcgataagttcgacgccaacgatccgatcctgaaagatcagacgcaagaatggtccggttctgcaacctttacatctgacggaaaaatccgtttattctacactgactattccggtaaacattacggcaaacaaagcctgacaacagcgcaggtacacaataagccttccgaagatctccaaacttgttccctcaatcttggacacattctgcccattatcaagtttaatgatgacagcccggaagcgaggaaaataacccggcgctggagaataggtgaagcagcggatttagttggggtttcttctcaggctatcagagatgccgagaaagcagggcgactaccgcacccggatatggaaattcgaggacgggttgagcaacgtgttggttatacaattgaacaaattaatcatatgcgtgatgtgtttggtacgcgattgcgacgtgctgaagacgtatttccaccgtttaatgatgacagcccggaagcgaggaaaataacccgccgctggagaataggtgaagcagcggatttagttggggtttcttctcaggctatcagagatgccgagaaagcagggcgatctaccgccacccggatattggaaattcgaggacgggttgagcaacgtgttggttatacaattgaacaaattaatcatatgcgtgatgtgtttggtacgcgattgcgacgtgctgaagacgtatttccaccggtgatcggggttgctgcccataaggagttaaataatgattacacatcgaaaaaagtaatgaagccgctgatcacttcaaacacggtaactgatgaaatcgagcgcgcgaatgttctcaaaatgaacggcaaatggtacttgttcactgattcacgcggttcaaaaatgacgatcgatggtattaactcaaacgatatttacatgcttggttatgtatcaaactctttaaccggcccttacaagccgctgaacaaaacagggcttgtgctgcaaatggctcttgatccaaacgatgtgacattcacttactctcacttcgcagtgccgcagaccaaaggcaacaatgtggttatcacaagctacatgacaaacagaggcttcttcgaggataaaaaggcaacatttgcgccaagcttcttaatgaacatcaaaggcaataaaacatccgttgtcaaaaacagcatcctggagcaaggacagctgacatggctccaagtagcgaagcgagcaggactgggcggcggccaaagcggtcggacagtgctccgagaacgggtgcgcatagaaattgcatcaacgcatatagcgctagcagcacgccatagtgactggcgatgctgtcggaatggacgatatcccgcaagaggcccggcggtagcatgccagttccctgagaaaaacgactttcgcttctctggttttctgtctacgaagagtgactgccacatagtaggccctcaaccaatatttgctgaacataatcaagcagagggatgtagacttgaacacttttgctccacccccacccttgtgtccatgctcaattttcttggacgcaggacaaagaagccaggtactagttcagagaacaagaaactgctacattacggtgcattggcaaaactacaaccatatttcggtgcaggaagaagggatcatcagaagggtggacgcggatctgtcaacatgggtaaaggagaccccaacaagccgcggggcaaaatgtcctcgtacgccttcttcgtgcagacctgccgggaagagcacaagaagaaacacccggactcttccgtcaatttcgcggaattctccaagaagtgttcggagagatggaagaccatgtctgcaaaggagaagtcgaagtttgaagatatggcaaaaagtgacaaagctcgctatgacagggagatgaaaaattacgttcctcccaaaggtgataagaaggggaagaaaaaggaccccaatgctcctaaaaggccaccatctgccttcttcctgttttgctctgaacatcgcccaaagatcaaaagtgaacaccctggcctatccattggggatactgcaaagaaattgggtgaaatgtggtctgagcagtcagccaaagataaacaaccatatgaacagaaagcagctaagctaaaggagaaatatgaaaaggatattgctgcatatcgtgccaagggcaaaagtgaagcaggaaatttggccctggttggccaacaggctcaaagaagaagaacgaaccagaagatgaggaggaggaggaggaagaagaagatgaagatgaggaggaagaggatgaagatgaagaataaatggctatcctttaatgatgcgtgtggaatgtgtgtgtgtgctcaggcaattattttgcttaagaatgtgaattcaagtgcagctcaatacgtagcttcagtataaaaactgtacagatttttgtatagctgataagattctctgtagagaaaatacttttaaaaaatgcaggttgtagctttttgatgggctactcatacagttagattttacagcttctgatgttgaatgttcctaaatatttaatggtttttttaatttcttgtgtatggtagcacagcaaacttgtaggaattagtatcaatagtaaattttgggttttttaggatgttgcatttcgtttttttaaaaaaaatatttgtaataccaattatgtatattatttcaaaaaaaaaaaaaaaaaaa

SEQ ID NO: 9784 - DNA, 704 bp, Homo sapiens
  SIMILAR (8)..(430): 871254mologous to Homo sapiens bA346K17.1.2 (Novel protein similar to MAP1ALC3 (micotubule-associated proteins 1A/1B light chain 3) from Rat, isoform 2),accession number AL118520,Smith- Waterman Score=598.
ttttcttgagttacctcccgcagccgcagccgccgtgctcagcgcgagccccggagcccttgagcgcgaggcgcggagcccccggagcccccaaaccgcagacacatccccgcgccccagagccccggcctgcgcgcccagccgggcccgcgcgatgccctcagaccggcctttcaagcagcggcggagcttcgccgacccgctgtaaggaggtacagcagatccgccgaccagcaccccagcaaaattccggtggatcatcgagcgctacaagggtgagaagcagctgcccgtcctggacaagaccaagtttttggtcccggaccatgtcaacatgagcgagttggtcaagatcatccggcgccgcctgcagctgaaccccacgcaggccttcttcctgctggtgaaccagcacagcatggtgagtgtgttccacgcccatcgcggacatctacgagcaggagaaagacgaggacggcttcctctatatggtctacgcctcccaggaaaccttcggcttctgagccagcagcccctgcctgtctgcccatctgcccctcacccacccgaggctctgcccaccgcctggacctgcccacccctgaaagactggcccctggctccccgcccctcggtctccacgtggtgtatggatctgtggtcattgtccctctgcagaataaagattgctcaggcctgcctga

SEQ ID NO: 9785 - DNA, 794 bp, Homo sapiens
  SIMILAR (3)..(245): 1001254mologous to Homo sapiens bA346K17.1.1 (Novel protein similar to MAP1ALC3 (micotubule-associated proteins 1A/1B light chain 3) from Rat, isoform 1),accession number AL118520,Smith- Waterman Score=412.
tccgcgaccagcaccccagcaaaatcccggtgatcatcgagcgctacaagggtgagaagcagctgcccgtcctggacaagaccaagtttttggtcccggaccatgtcaacatgagcgagttggtcaagatcatccggcgccgcctgcagctgaaccccacgcaggccttcttcctgctggtgaaccagcacagcatggtgagtgtgtccacgcccatcgcggacatctacgagcaggagaaagacggaggacggcttcctcctatatggtctacggcctcccagggaaacctttcggcttctgagccaagcagtaggggggctcggcctggggagtcggggggccccggtcaggccctggcccagagagctcctgggtctggaaacttggagcctggcctcttaacccgtggtgggctgggcagggcatgtgccccccctaaatcaaagggcacctaaacccaaccctactctgccccctgggtggaatccctgggccggtccgtgttaagggttggtccctctgggtgctggctggtgggatgggggagggtggggagcagctcccagcaccccctcctgtgtggttcatctttttttttaggcccctgcctgtttgcccatttgcccctcacccacccgaggctttgcccaccgcctggacctgcccacccctgaaagactggcccctggctccccgcccctcggtctccacgtggtgtatggatctgtggtcattgtccctctgcagaataaagattgctcaggcctgcctggcaaaaaaaaaaaaaaaaa

SEQ ID NO: 9786 - DNA, 2133 bp, Homo sapiens
  SIMILAR (422)..(2107): 1001254mologous to Homo sapiens 68 kDa type I phosphatidylinositol-4-phosphate 5-kinase alpha,accession number U78576,Smith-Waterman Score=2912.
gtgaagcggccgggttgggcgattaacaggccgtggttaggaaggacggagaaggggcgttcgctcctttgggacttttcatgcctcgtttttttttcagatgtggcttggtctgggcgcaaggtcccagcagccagcttaagcttactcttctgtgaaaggggaaagtatcccctgtggaaagcggttaaacttgtggagggggtgcgggacgtgagttcttccccatgccaggcgaatggtgtggccttgagctggtccaggagccggctcgacgtgtctgagggaggcccggagggggcggggaggtggcccacagaacgcgggttctgtaaagagacgttgggaagattcgattccgagaagaggaagaaccggattgaaagagagccaggccgctgagggggagggggctgctaagatggcgtcggcctcctccgggccgtcgtcttcggtcggtttttcatcctttgatcccgcggtcccttcctgtaccttgtcctcagcagcatctggaatcaagagacccatggcatctgaggtcttggaagctagacaggattcttacatctcattggtgccttatgcctctggcatgcccatcaagaaaataggccatagaagtgttgattcctcaggagagacaacatataaaaagacaacctcatcagccttgaaaggtgccatccagttaggcattacccacactgtggggagcctgagtaccaaaccagagcgtgatgtcctcatgcaagatttctacgtggttgagagtatcttctttcccagtgaagggagcaacctgacccctgctcatcactacaatgactttcgtttcaagacctatgcacctgttgccttccgctacttccgggagctatttggtatccggcccgatgattacttgtattccctctgcagtgagccgctgattgaactctgtagctctggagctagtggttccctattctatgtgtccagcgacgatgagttcattattaagacagtccaacataaagaggcggaatttctgcagaagctgcttccaggatactacatgaacctcaaccagaaccctcggactttgctgcctaaattctatggactgtactgtgtgcaggcaggtggcaagaacattcggattgtggtgatgaacaatcttttaccaagatcggtaaaaatgcatatcaaatatgacctcaaaggctcaacctacaaacggcgggcttcccagaaagagcgagagaagcctcttcccacatttaaagacctagacttcttacaagacatccctgatggtctttttttggatgctgacatgtacaacgctctctgtaagaccctgcagcgtgactgtttggtgctgcagagcttcaagataatggattacagcctcttgatgtcaatccataatatagatcatgcacaacgagagcccttaagcagtgaaacacagtactcagttgatactcgaagaccggccccccaaaaggctctgtattccacagccatggaatccatccagggagaggctcgacggggtggtaccatggagactgatgaccatatgggtggcatccctgcccggaatagtaaaggggaaaggcttctgctttatattggcatcattgacattctacagtcttacaggtttgttaagaagttggagcactcttggaaagccctggtacatgacggagacactgtctcagtgcatcgcccaggcttctacgctgaacggttccagcgcttcatgtgcaacacagtatttaagaagattcccttgaagccttctccttccaaaaagtttcggtctggctcatctttctctcggcgagcaggctccagtggcaactcctgcattacttaccagccatcggtctctggggaacacaaggcacaagtgacaacaaaggcagaagtggagccaggcgttcaccttggtcgtcctgatgttttacctcagactccacctttggaggaaatcagtgagggctcgcctattcctgaccccagtttctcacctctagttggagagactttgcaaatgctaactacaagtacaaccttggaaaagcttgaagttgcagagtcagagttcacccattaagcgcaaagcctcagaagacctgg

SEQ ID NO: 9787 - DNA, 2010 bp, Homo sapiens
  SIMILAR (402)..(1901): 1001254mologous to Homo sapiens 68 kDa type I phosphatidylinositol-4-phosphate 5-kinase alpha,accession number U78577,Smith-Waterman Score=2605.
gattaacaggccgtggttaggaaggacggagaaggggcgttcgctcctttgggacttttcatgcctcgtttttttttcagatgtggcttggtctgggcgcaaggtcccagcagccagcttaagcttactcttctgtgaaaggggaaagtatcccctgtggaaagcggttaaacttgtggagggggtgcgggacgtgagttcttccccatgccaggcgaatggtgtggccttgagctggtccaggagccggctcgacgtgtctgagggaggcccggagggggcggggaggtggcccacagaacgcgggttctgtaaagagacgttgggaagattcgattccgagaagaggaagaaccggattgaaagagagccaggccgctgagggggagggggctgctaagatggcgtcggcctcctccgggccgtcgtcttcggtcggtttttcatcctttgatcccgcggtcccttcctgtaccttgtcctcagcatctggaatcaagagacccatggcatctgaggtgccttatgcctctggcatgcccatcaagaaaataggccatagaagtgttgattcctcaggagagacaacatataaaaagacaacctcatcagccttgaaaggtgccatccagttaggcattacccacactgtggggagcctgagtaccaaaccagagcgtgatgtcctcatgcaagatttctacgtggttgagagtatcttctttcccagtgaagggagcaacctgacccctgctcatcactacaatgactttcgtttcaagacctatgcacctgttgccttccgctacttccgggagctatttggtatccggcccgatgattacttgtattccctctgcagtgagccgctgattgaactctgtagctctggagctagtggttccctattctatgtgtccagcgacgatgagttcattattaagacagtccaacataaagaggcggaatttctgcagaagctgcttccaggatactacatgaacctcaaccagaaccctcggactttgctgcctaaattctatggactgtactgtgtgcaggcaggtggcaagaacattcggattgtggtgatgaacaatcttttaccaagatcggtaaaaatgcatatcaaatatgacctcaaaggctcaacctacaaacggcgggcttcccagaaagagcgagagaagcctcttcccacatttaaagacctagacttcttacaagacatccctgatggtctttttttggatgctgacatgtacaacgctctctgtaagaccctgcagcgtgactgtttggtgctgcagagcttcaagataatggattacagcctcttgatgtcaatccataatatagatcatgcacaacgagagcccttaagcagtgaaacacagtactcagttgatactcgaagaccggccccccaaaaggctctgtattccacagccatggaatccatccagggagaggctcgacggggtggtaccatggagactgatgaccatatgggtggcatccctgcccggaatagtaaaggggaaaggcttctgctttatattggcatcattgacattctacagtcttacaggtttgttaagaagttggagcactcttggaaagccctggtacatgacggagacactgtctcagtgcatcgcccaggcttctacgctgaacggttccagcgcttcatgtgcaacacagtatttaagaagattccctgcgttcaccttggtcgtcctgatgttttacctcagactccacctttggaggaaatcagtgagggctcgcctattcctgaccccagtttctcacctctagttggagagactttgcaaatgctaactacaagtacaaccttggaaaagcttgaagttgcagagtcagagttcacccattaagcgcaaagcctcagaagacctggaacaagattctgccatctctgtgatcccaagatgtcagcccttgccccagcaatgctgaattttcttctacttggtcatcaaa

SEQ ID NO: 9788 - DNA, 449 bp, Homo sapiens; identical to SEQ ID NO: 4660
  SIMILAR (20)..(175): 1001254mologous to Homo sapiens 68 kDa type I phosphatidylinositol-4-phosphate 5-kinase alpha,accession number U78577,Smith-Waterman Score=260.

SEQ ID NO: 9789 - DNA, 1992 bp, Homo sapiens
  SIMILAR (1508)..(1537): 801254mologous to Homo sapiens 68 kDa type I phosphatidylinositol-4-phosphate 5-kinase alpha,accession number U78575,Smith-Waterman Score=45.
atggcgtcggcctcctcccaaccgtcgttggcggtcggtttttcatcctttgatcccggggccccttcctgtaccgcgtcctcagcatctggaatcttgagccccacggcatctgaggtgccttatgcctctggcatgcccatcaagaaaacaggccatcgaggtgtcgattcctcaggagagacaacatataaaaagacaacctcaacagccttgaaaggtgccatccagttaggcattacttacactgtggggagcctgagtaccaaaccagagcgtgatgtcctcatgcaagatttctacgtggtggagagtatcttcttccccagtgaagggagcaacctgacccctgctcatcactacaatgccttccgtttcaagacctatgcgccggttgccttccgctactttcgggagctatttggtatcccgcccgatgattacttgtgctccctctgcagtgagccgctgattgaactctgtagctctggagctagtggttccctgttctatgtgtccagcgacgatgaactcattattaagacactccaacataaagaggcggagtttctgcagaagctgcttccaggatactacttgaacctcagccagaaccctcggactttgctgcctaaattctttggactgtactgtgtgcagacaggtggcaagaacattcggattgtggtgatgaacaatcttttaccaagatccgtcaaaatgcatatcaaatatgacctcaaaggctcaacctacaaacgccgggcttcccagaaagagcgagagaagcctcttcccacatttaaagatctagacttcttacaagacatccctgatggtctttttttggatgctgacacgtacaatgctctctgtaagaccctgcagcgtgactgtttggtgctgcagagcttcaagataatggactatagcctctggctgtcaatccacaatatagatcatgcacaacgagagcccttaagcagcgacactcttcaagtgtcaatcgacactcaaagactggctccccaaaaggctctgtattccacagccatggaattcatccagggagaggctcggctgggcgacaccatggaggccgatgaccatatgggtggcatccctgctcagaatagtaaaggggaaaggcttctgctttatattggcatcattgacattctacagtcttacacgtttcttaagaagttggagcactcttggaaagccgtggtacatgatggggacgctgtctcagtgcatcgcccaggcttctacgctgaacggttccagcacttcatgtgcaacgcagtatttaagaagatccccttgaagccttctccttccaaaaagtttcggtctggcttatctttctctctgcatacgggctccagtggcaactcctgcattacttaccagccattggtctctgaggaacacaagtcacaagtgataaaggtgcaagtggagccaggtgttcaccttggtcgttctgatgttttacctcagacctcagaatccacctttggaggaaatcacagcccattagggcttaagtgcgtcacagacagcttcatcgagttgagtattcatggctggcgatttccctctgaggtagctatgaagactagctgcacagccccactcgctgtcccttggggcatggtggcacaaaccctacttctgcttttagcttttgtcactgactcttcttcaagagtgcactttccaatttccagactgatccactactgcttcaacatcaaagaagtctatggattattgtctaaatttcccaaaagtatgtccacctgtgtttttgataaacaagggcagaaaccaagctttagtcagcttcttagccctagttcctggaacacaggccctgtctccaaataccgtcacaatgtggttacagctttacttgatgaattcaggggagacaaaattcagtccataacagggactgagctggatgagcaggaggacttgtaa

SEQ ID NO: 9790 - DNA, 3714 bp, Homo sapiens
  SIMILAR (1419)..(2048): 981254mologous to Homo sapiens 68 kDa type I phosphatidylinositol-4-phosphate 5-kinase alpha,accession number U78575,Smith-Waterman Score=1078.
attaacaggccgtggttaggaaggacggagaaggggcgttcgctcctttgggacttttcatgcctcgtttttttttcagatgtggcttggtctgggcgcaaggtcccagcagccagcttaagcttactcttctgtgaaaggggaaagtatcccctgtggaaagcggttaaacttgtggagggggtgcgggacgtgagttcttccccatgccaggcgaatggtgtggccttgagctggtccaggagccggctcgacgtgtctgagggaggcccggagggggcggggaggtggcccacagaacgcgggttctgtaaagagacgttgggaagattcgattccgagaagaggaagaaccggattgaaagagagccaggccgctgagggggagggggctgctaagatggcgtcggcctcctccgggccgtcgtcttcggtcggtttttcatcctttgatcccgcggtcccttcctgtaccttgtcctcagcatctggaatcaagagacccatggcatctgaggtgccttatgcctctggcatgcccatcaagaaaataggccatagaagtgttgattcctcaggagagacaacatataaaaagacaacctcatcagccttgaaaggtgccatccagttaggcattacccacactgtggggagcctgagtaccaaaccagagcgtgatgtcctcatgcaagatttctacgtggttgagagtatcttctttcccagtgaagggagcaacctgacccctgctcatcactacaatgactttcgtttcaagacctatgcacctgttgccttccgctacttccgggagctatttggtatccggcccgatgattacttgtattccctctgcagtgagccgctgattgaactctgtagctctggagctagtggttccctattctatgtgtccagcgacgatgagttcattattaagacagtccaacataaagaggcggaatttctgcagaagctgcttccaggatactacatgaacctcaaccagaaccctcggactttgctgcctaaattctatggactgtactgtgtgcaggcaggtggcaagaacattcggattgtggtgatgaacaatcttttaccaagatcggtaaaaatgcatatcaaatatgacctcaaaggctcaacctacaaacggcgggcttcccagaaagagcgagagaagcctcttcccacatttaaagacctagacttcttacaagacatccctgatggtctttttttggatgctgacatgtacaacgctctctgtaagaccctgcagcgtgactgtttggtgctgcagagcttcaagataatggattacagcctcttgatgtcaatccataatatagatcatgcacaacgagagcccttaagcagtgaaacacagtactcagttgatactcgaagaccggccccccaaaagggctctgtattccacagccatggaatccatccagggagaggctcgacggggtggtaccatggagactgatgaccatatgggtggcatccctgcccggaatagtaaaggggaaaggcttctgctttatattggcatcattgacattctacagtcttacaggtttgttaagaagttggagcactcttggaaagccctggtacatgacggagacactgtctcagtgcatcgcccaggcttctacgctgaacggttccagcgcttcatgtgcaacacagtatttaagaagattcccttgaagccttctccttccaaaaagtttcggtctggctcatctttctctcggcgagcaggctccagtggcaactcctgcattacttaccagccatcggtctctggggaacacaaggcacaagtgacaacaaaggcagaagtggagccaggcgttcaccttggtcgtcctgatgttttacctcagactccacctttggaggaaatcagtgagggctcgcctattcctgaccccagtttctcacctctagttggagagactttgcaaatgctaactacaagtacaaccttggaaaagcttgaagttgcagagtcagagttcacccattaagcgcaaagcctcagaagacctggaacaagattctgccatctctgtgatcccaagatgtcagcccttgccccagcaatgctgaattttcttctacttggtcatcaaaaaaggagtgtaatagaagtgaggggagctgctcctccatcttcttcctgaagaagaaccttctctccttcctcttcctcatgaatgggccttagtgcctcagagagttgaggaccgcagcatcccctccactccagagttgggtggtacggattttcaactggccaaccctttgcctccactattgaatttttttcagacccccattcttcatgctggaaatgggattgctggacttggcagctttctttcccctcgtctttgactaggaaccggactcttaatttcctcaggacagactagctggcacattatccctaccttagttctttctctctgactcctggaagaatactcctgtaatctctgtaaaggtttttgggggataagggtgtttaaccacctcccagctttcttcttcttttttttttctgaaaaaaggaaaaagcacacagcacacaatttcaagccattttcagatcagaactccagaagtgttgacaagatgcctattcgtagagttccctcagaagagccatggtgtttatgaagagaagagtagtgattgctctgccagaagcagctcctctttaaactcctcctctcttgatgaatttcttaaggctgaaggaatgaagagagtgggacatggggtaatctttatcccttttgttaaaacaggaggcagccatgggctgggagatcatagcccttcctaggcagaatcctgttcactgccaggctatagtaattattactattttgcaatttgaaatatattctggttgtttttctaaatgtgaagacttaccaaatgaattttagatcattctccagaggagattttttttgctcttctcatcttttccaacagtgttctcctgtttgtggagctaaggtaaagaggggacacttctgtctgtttaacagacagtccatatctgtgaggccagcaaatattttcttaaactcatggggagacagcagattcttgccttggtgaggtcattgctgtgccatatgtcctacccccctgtcttcatgcagggaagttggaaatgggggctacatatgccctctcctccccgtctacaagagttgtggttttccatctgatccttccactcttgtcaggggaagaagggggcctggtatctcaggcagattgttgaattcctgttctatcccttctctatcccaccctgccttgataatatgttagcccataccccaaataactgtctatattagacacccccagccagtttctggctgcctgtctttgctgccatgttttttacaagaaggaaagaattcttgctatttttttttcataatttactatttatgatgtatttaagtgttttattaaggacagagttctgttaggggtgggagggaatatttgagggagggctgggtcttagggaaaggaatggggaagcaacatttttattaagtgttactatttgcctctactttgtattgttcagaaatggcaaatacaatataaaagtgatatatggttttaatgtaataaactttaatgagttattta

SEQ ID NO: 9791 - DNA, 1015 bp, Homo sapiens
cagaggtgccaggggtaacttagaagtaggagccttttattttcttatttatttatttatttatttatttattttttgagacagagtctcgccctgtcatccaggctggagtacagtggtgcaatctcagctcactgcaacctctgcccaccgggttcaagcaattctccctgccttagccccctgactagctgggattacaggcacccgccaccatgcccggctaatttttgtagttttagtagagatggggtttccccatgttggccaggctggtctcaaactcctgacctcaggtgatctgtccgccttggcctcccaaagtgctgggattacaggcgtgagccaccatggccgacacaaaaaatatttcttaaatgatgatgatgatgtgatagaaatctacacgattactcagacagatcaagagcaggctggagtaccacaacaatgccgcccggggctccaacttaccactagcgtccgggaggaagaccaggcagcggtcgccgcggcggcagctagacgagaaacggactcggctgcaatcgcccagcggagcccgcggcagtcgcatctctgcactaatcgcgtcttctttcttcttcgttggcccctaactaactacactactctaaacggacgaaggccatcacacgagcgccacgacgatcgcgacgactccgacgacaacgatgtacagacagaagaagagttcatatgcaatcggcagggccttgggcccacagccagtcggttgcccagtcgttgtgggggagggaggggtgctgtcaatgcaaggtcaaggcagcaagaggtgaaccacaaaggctctcttttggcaactgctgggatgccgagctgcaaccggtcaggcagagctctaaccggtcaggcagagctctttttcacaggctcccaggcgcaaccgggcaggtgcctgcggtgtcctggcggcagcgcagagaagggtgaacggggcccccttggctcagaggcaccaaaaccaagctga

SEQ ID NO: 9792 - DNA, 1074 bp, Homo sapiens
  SIMILAR (24)..(938): 991254mologous to Homo sapiens 25-NOV-1997 cDNA sequence encoding p110-delta,accession number X15932_cd1,Smith-Waterman Score=1598.
ggaattcccgggtcgacgatttcgtggctgaagtctgcgtggagcagtgcaccttcatggactccaagatgaagcccctgtggatcatgtacagcaacgaggaggcaggcagcggcggcagcgtgggcatcatctttaagaacggggatgacctccggcaggacatgctgaccctgcagatgatccagctcatggacgtcctgtggaagcaggaggggctggacctgaggatgaccccctatggctgcctccccaccggggaccgcacaggcctcattgaggtggtactccgttcagacaccatcgccaacatccaactcaacaagagcaacatggcagccacagccgccttcaacaaggatgccctgctcaactggctgaagtccaagaacccgggggaggccctggatcgagccattgaggagttcaccctctcctgtgctggctattgtgtggccacatatgtgctgggcattggcgatcggcacagcgacaacatcatgatccgagagagtgggcagctgttccacattgattttggccactttctggggaatttcaagaccaagtttggaatcaaccgcgagcgtgtcccattcatcctcacctacgactttgtccatgtgattcagcaggggaagactaataatagtgagaaatttgaacggttccggggctactgtgaaagggcctacaccatcctgcggcgccacgggcttctcttcctccacctctttgccctgatgcgggcggcaggcctgcctgagctcagctgctccaaagacatccagtatctcaaggactccctggcactggggaaaacagaggaggaggcactgaagcacttccgagtgaagtttaacgaagccctccgtgagagctggaaaaccaaagtgaactggctggcccacaacgtgtccaaagacaacaggcagtagtggctcctcccagccctgggcccaagaggaggcggctgcgggtcgtggggaccaagcacattggtcctaaaggggctgaagagcccttgaactgcacctaacgggaaagaaccgacatggctgccttttgtttaca

SEQ ID NO: 9793 - DNA, 1521 bp, Homo sapiens
  SIMILAR (487)..(858): 731254mologous to Mus musculus phosphatidylinositol 3-kinase catalytic subunit p110 delta,accession number U86587,Smith-Waterman Score=481.
ctactgtgtctggtcctcattggctggagtcggactgcatgatctaagctgatcccgattggctacttcaaatggagcagaggtgggggctacagcggcaggaagagcagtttcagaactaagggcaccaaataaagaacagatgtaggatgttacagattgggaatgggtgtggattacagattgagaatggatgtgagttactgattgggaatggctggaaggctgtttactgtaaacctgcagtccccactcaaccccagcaccctgctggctgaagtctgcgtggagcagtgcaccctcatggactccaagatgaagcccctgtggatcatgtacagcaatgaggaggcaggcagtggtggcagggtgagcgtcagccttaagagggatgatgacctctggcaggacatgctgaccatgcagacgatccggctcatggacgtcccagacaccatcgccaacatccaactcaacaaccgcaacatggatggaggcaacgaagagttcaccctctcctgtgctggctactgtgtggccacgtacgtgctgggcatcggtgatcggcacagcgacaacatcatgatccgagcgagtgggcagctgttccacattgatttttgccactttcgtcagcgtgtcccattcatcctcacctatgactttgtccatgtgattgagcaggggaagactaataatatgagaaatttgaaaggttccggggctactgtgaaagggcctaacaccatcctgcggcgccacgggcttctcttcctccacctctttgccctgatgcaggcagcaggcctgcctgagctcagctgctccaaagacatccggtatctcaaggactcccttgtgcatcctctctagactgagttctggcagctccccgagggggccagggtaccctctagattcagggatgcttgctctccacttttcaagtgggtcttgggtacaagaattccctcgcctctgtcctggcttgttccaggaaggctgtctataggtccctgtatgccgcattcctgtgggagaaactccagctgtgtctgcagtggagtgccagagggaaacaaggattccttttccaaggtccttcacgatcacagatactaccttctttttggggtacaggtgcagacttttcctacagcacgaagtactgcaattgtaactctgctgtgagaaacttccgacacattcagtgccagcgttcttgcttctggatccaggataaccaaggcaagtctcatcgctgagtcctggagcagtgtcatagcaagctctgagcagctctgagctagctcttgcagggaaacatcttagatcaggacatgggcaattccgcactattcgagagtgtgatttgtcatccactttaaatatcatggggaactgtgcactctggaggcgtctatgaagagacattcgttgtagctgttttgtgccttgtaggccctgcacgtaacgcagagatcctgcctcccagccccactccatgacagcgcacgccat

SEQ ID NO: 9794 - DNA, 801 bp, Homo sapiens
  SIMILAR (136)..(465): 511254mologous to Caenorhabditis elegans contains similarity to Pfam domain: PF00097 (Zinc finger, C3HC4 type (RING finger)), Score=17.6, E-value=0.00013, N=1,accession number Z46787,Smith- Waterman Score=307.
gtggaagaactgagtaagaaactggctgactctgaccaagccagcaaggtgcagcagcagaagctgaaggtggggcagctgggggaatgggtctggcctctggacaagggagggaagctattctctaagctctggggccgtggggggttggtttataagtggttcctgctaatctataaaatcagctatgccactggcattgttggctacatggctgtcatgtttaccctctttggtcttaacttattattcaagatcaaaccagaagatgccatggactttggcatctcccttctcttctatggcctctactatggagttctggaacgggactttgcagaaatgtgtgcagactacatggcatctaccatagggttctacagcgagtcgggcatgcctaccaaacatctttcagacagtgtgtgtgctgtgtgtgggcagcagatctttgtggacgtcagtgaagaggggatcattgagaacaccggtgctcagcttccacgagttctgcatccgtggctggtgcatcgtgggaaagaagcaaacgtgtccctactgcaaagagaaggtagacctcaagaggatgttcagcaatccgtatcctttattggggtcgttgttgggagtgggctgtgggaagaaagtactggccagtgtgacctgcatttgggtcctcctggggccctcacttctgcccccaaccagaacatgtcaaaccatgaacaacaaaaagattatgaaggtgatgatgaggataaagaggatgatgacagacaccatggcatcatgaacccttactga

SEQ ID NO: 9795 - DNA, 1352 bp, Homo sapiens
  SIMILAR (752)..(1003): 691254mologous to Caenorhabditis elegans contains similarity to Pfam domain: PF00097 (Zinc finger, C3HC4 type (RING finger)), Score=17.6, E-value=0.00013, N=1,accession number Z46787,Smith- Waterman Score=359.
tttcgtgggcgagccgtgaagatggcggcagtggtggaggtggaggttgtaggtggtgctgctggggaacgggagctggatgaggttgatatgtcagatctctctccagaagagcaatggagggtcgagcacgcacgcatgcatgccaagcaccgtggccatgaagctatgcatgctgaaatggtcctcatcctcatcgcaaccttggtggtggcccagctgctcctggtgcagtggaagcagaggcacccacgctcctacaatatggtgaccctctttcagatgtgggttgttcccctctatttcacagtgaagctgcactggtggaggttcctagtgatctggatcttgttctctgctgtcacagcctttgttaccttccgagccacccgaaaacctctagtacagacaaccccaaggttggtttataagtggttcctgctaatctataaaatcagctatgccactggcattgttggctacatggctgtcatgtttaccctctttggtcttaacttattattcaagatcaaaccagaagatgccatggactttggcatctcccttctcttctatggcctctactatggagttctggaacgggactttgcagaaatgtgtgcagactacatggcatctaccatagggttctacagcgagtcgggcatgcctaccaaacatctttcagacagtgtgtgtgctgtgtgtgggcagcagatctttgtggacgtcagtgaagagggggatcattgagaccacgtataggctgtcctgcaatcatgtctcccacgagttctgcatccgtggctggtgcatcgtgggaaagaagcaaacgtgtccctactgcaaagagaaggtagacctcaagaggatgttcagcaatccctgggagaggcctcacgtcatgtatgggcaactgctggactggcttcgatacttggtagcctggcagcctgtcatcattggtgtagtccaaggcatcaactacatcctgggcctggaatagtgatgaagagcatcagtgaaaaccccaccccacacgccatggacctcagggcactctcctccctgcccacaaagacctcctgggtgggaaagactcaaaggggcgcttagtccatttcaggaaccctccggctgtgtcggactggggagtgatttgatggagagccagccagtggggctgtcagcagtggggggctttttaaaagaaaactattttgatgaatatatttaaaaaacctttttttattgtggagcataggaattgcccccctccaggcttcaccctccctgcctaagcagggtgggggcagagccatgacatttttggtttaaaggagccatgtatt

SEQ ID NO: 9796 - DNA, 267 bp, Homo sapiens
  SIMILAR (34)..(165): 791254mologous to Lampetra fluviatilis HMG,accession number X98857,Smith-Waterman Score=196.
actctgtgcctcactggggaaaaataactaaacattggcaaaggagattctaagaagccaagaggcaaaatgtcatcatatgcattttttgtgcaaacttgtcgggaagagcataagaagcagcacccagatgcttcagtcaacttctcagagttttcttacaaaaaggatattgctgcatattgagctaaagggaagcctgatgcagcaaaaaagggatttatcaaggctgaaaaaagcaagaaaaagaaggaagaggaggaagat

SEQ ID NO: 9797 - DNA, 639 bp, Homo sapiens
  SIMILAR (126)..(149): 1001254mologous to Homo sapiens high mobility group protein HMG1,accession number AF255609,Smith-Waterman Score=49.
atgggcaaaggagatcctaagaagctgagaggcaaaatgtcatcatatgcattttttgtgcaaacttgtcaggaagagcataagaagcagcagccagatgcttcagtcaacttctcagagtttttaagaagtgctcagagaggtggaagaccatgtctgctaaagagaaaagtgaagacatggcaaagctataaattcatacaattatcagagtttggttttggtcaagtcataattgtgagtgaagaaccatggaaggagaacatttcttgctcatcaactactttcataaaatcaacaatttgcttaagtactacgctagttcctggggagttcctggggaacaatgagaataatgtttcttcagtctctaaggactcagctccttacatgagctttggtggagcggggtcagagactaactggcaaactgagcctggggtggaggtggagggagagaagacaaccacaccccctttctcacggcaggcttccagtctgccccagggccaagctgcacaggaagaagaatcgcctctaaatcaacttccgaattctgttcaacatcttggactggatattctaattattgaattgagactgtggcttaaagtgaccatagattggcctattaattaa

SEQ ID NO: 9798 - DNA, 1268 bp, Homo sapiens
  SIMILAR (281)..(649): 361254mologous to Homo sapiens HMG-1,accession number L08048,Smith-Waterman Score=126.
aagacgacaagaacggacgcgtgggcccgtgactttactcttttagagcgccctgaatgaccggtcttggcaagttttgattgcttgccatagccccttcaaggaataaaatctctcggccatattcttgtctgtcttttacggaggttgatgtcgctactgtgttaaataaccagtactttggttttcattcccttactaagtactttaaggtcttatatgtcataattttattgctaacatcaaatatttattttattttttagaaaaataactaaacatgggcaaaggagatccctaagaagcccgagaggcaaaatgtcatcatattgcatttttttgtgcaaacttgtcgggaggagcataagaagaggcacccagatgcttcagtcaaccttctcagagttttctaagaagtgcttcagagaggttggaagaccatgtcttgctaaagagaaagggaaattttgaagatatggccaaaagcgggacaaggcccgttatgaaagaggaaatgaaaacctattatccctcccaaagggggagaccaaaaaagaagtttcaaggatcccaatgcaccccaaggagggcctcccttcgggccttctttcctcttcttgctctgagtatcgcccaaaaatcaaaagggaggaccatcctggcctgtccattggtgatgttgcgaagaaactgggagagatgtgggaattaacactgctgcagatgacaagcagccttatgaaaagaaggctgcgaagctgaaggaaaaatacgaaaaggatatagctgcatatcgagctaaaggaaagcctgatgcagcaaaaaagggagttgtcaaggctgaaaaaagcaagaaaaagaaggaagaggaggaagatgaggaagatgaagaggatgaggaggaggaggaagatgaagaagatgaagaagatgaagaagaagatgatgatgatgaataagttggttctagcgcagttttttttttcttgtctataaagcatttaacccccctgtacacaactcactcccttttaaagaaaaaaattgaaatgtaaggctgtgtaagatttgtttttaaactgtacagtgtctttttttgtatagttaacacactaccgaatgtgtctttagatagccctgtcctggtggtattttcaatagccactaaccttgcctggtacagtatgggggttgtaaattggcatggaaatttaaagcaggttcttgttggtgcacagcacaaattagttatatatggggatggtagt

SEQ ID NO: 9799 - DNA, 2909 bp, Homo sapiens
  SIMILAR (2786)..(1347): 1001254mologous to Homo sapiens TGFb inducible early protein,accession number AF050110,Smith-Waterman Score=2551.
tgccaaagggaattctttattgtaaacaagatataaagtacaacaaaagaaatattgtgcaaattgtaagtcacaaggattttttttaattaaaacttttgttttccaagggtccaagttttgatgtcagaaatctacacccaatatacaaaaacaatgttaaatgggaagatatagtgacatttttcactatatattttaagcaatgtacttttgttttgccactgtgtatatcatccactatataacagaataaaagagaaatactgttaacaaaagtgaatgttctaataatttttctacccaactacctccacatccccaaaaaactcctataaattaacaggacgaacatttgtccacctgtgaataatggtcactaattttctaattcaataaagcacacattatatcctcataacataaaggtactttactgatgacataagccatctttttcaagaagttatctaagattcttaatatcccttctttacaatatatatttcatcttcagttttttttctaaacaaagtgcagtgtatcttagagtctacagaaaacacattggtatacaattttcaaatctacacaagaaactgcaggcaaactaaagttcaaagcataatgaaatgcctagatacagtcatttgttaaactttcaaaacaaaaatgcaaaaacaaattgtagctatgcttcaaagcaattaaattaaggaggattccaattctttgggccctcttagcaatatacagtcgttcaattccaaatattcacaatagtgtaaaaatgatagttctagatatatttaatcactacatccacgatgttgactggaaagactaggaataataaagaagataactctagaaaaagatgacaatatttgtaataatacaaactcattttacatctccatgtctgtaccgtaatgtttatttccttccagcctccatattcttgaaaccagtgctttagaagaatcacattgaaaagttggtctcaagtataaacagcaaaagtaaagtaacaaatatgcacacagattcaaaatctgtgctacctgtgttgacctcatctgaaaccttcaaaaaatattcaaaggaataaaagctttctcatctctcttatgtgataagaaatgaaacctgcctttctgtgacctgcctgtggccgaagcccttttagtcacctaacccaggcggggccttcgtgccaggctgtggggcttctgctttaagcccacgttgtggggccacagacttgcagtggaagcatttttacatcaccactggctcccgctgagaccaaagttagttctgactcttcactttccggtctgtcactgtgtgggagcaggggttggaggtagagcaatgtcatttagcttgctcacttccatctgccagtttggtagcttcttggctgatagatggcgccgggcatgcttggtcaaatggtcactcctcatgaaccgccggtcacacatggggcacgcaaatttcttctcacccgtgtgggttcgcctgtgtctggacagttcatcagaacgggcaaacctcctttcacaacctttccagctacagctgaaaggcttttctcctgtgtgcgtcctcgtgtgggccttcagatgggaacttttaaagtatgtcttgccacatcctgggtggctacagatgtgactccttatccttgatgaatcaatctgaggagtgacttttgctgctgaaggggaaaacccaggagcaggggcaatgggagagagtctggtgccattcgggctcaccaccggaggctttgaactctgcacaacgggctggggtaccacaaacatgacagcgcctttggggacttgtgtgcccatgaacacaacaggggggcaaacggctggtggctggctgggaggagtgctgggaacgactgttgtcacaacagggttgttggcaggaaggggaaccatctggcagatgaccggcataggtggcactccccctgcagatactgcaggtggagagaccaacactgacttctgttgtggggacacaggggctggctgagacctgcagatgaccgtctctgaggaaggcacagaaaagtcataaagtgcagcacttgctttctcatcaacatctgccactgtgtttctctcacatttggatctgtttggtgacacagcggcacatggtatgttctttcttgcagcctcaacatttaggtgggttcttcttctaaaagaattgttctgatagttgaggatgctggctgctttcattgggcaggtctggtggttacatagctgggcatcagctgtatgacgaatcacacttgttgcctgagctttggggagtttgggggcagatactgggctcttttcttcctctttgaaaggtgcggcaatgtgaggtttggcagtatctgagagtgacttgaagtgtacagtagatggcgctggtgccatcagatttgacacttgagagggttcaaagtcagaaggactgtaaggtggagtcaaacaaaatgctgggattgtatgaaaatcaggtgttcccggaagcagattctcttcctctgacaaatcagatactggtgtaacaggtctgttttcaacgtatttcttaaaatcagacttccaactgcagctcattgacataagtgcttctacagcttcaaaatcacttttctctgcagttttgttccaggaatacatactctcttttggcctttcagaaatcatttccattctttcctccgcagtctgctggagagaggcaccgaagttgagcatggttggctgcttggccgccggcggcaagctgactggctgctaggctgctggctgcttggccacagacgggcgcacggagacactcgacgccgctcccgccgccgccgcgctcagcgccgtctg

SEQ ID NO: 9800 - DNA, 1755 bp, Homo sapiens
  SIMILAR (43)..(162): 481254mologous to Bombyx mori chorion protein,accession number X66163,Smith-Waterman Score=80.
atgaaaatgcaccatatgtttgaggaacagcaagcggtttgctgtggctgtgggcaagggctgagcggctacctgaatggggagggggcagacggcgctgagcgcggcggcggcgggagcggcgtcgagtgtctccgtgcgcccgtctgtggccaagcagccagcagcctagcagccagtcagcttgccgccggcggccaagcagccaaccatgctcaacttcggtgcctctctccagcagactgcgccctgatgcttttcatccaagttgaagtccttactaattctattgcaatggtgtcagttcatttggagaaacagccactcaagctagttttaggagaactcgggttcaggagcccagcaggggaagaacaagctaccccagttgtgggaggcgagggccttgggtgcattgaagattcagctgccgtggctgaggggggcattgctattggaggcatcgtgggcattaatactgctttacaagaggtcctgaagcctcatactatcaagatgcaaaggaacaatgcacagctcagcagaagaaaggaaccaaaagaggggctgtgtggggaaaggggacaggatagaatgtccagggcaaaaggctcttcctccaaagggaaggagctgccacctggatgccggagggtcacaatgaagcccttgttagtgagagaaacccaagaagggcaagctgctgagagaggagcagaggagcaactccagactcttggcccctttgcggtctatcgggactcaccctccaaaaatttctataaaagggataaaatgctcaagggtttagaggaggctaaggttaattttgtctggagaaccaatgagggcttcctggaggaggatgctggacaagagttcggtatacagaaagctgtcacaccggccctctgcccttccagaaaggcagaggttccactgagctgtttaacactcaagctatccgaggacggcaaggctaaaaaggcaccctataacacaggcccgcttgggctcctgcatttgtctatgtgctcccactcccgtaaggggtttgagcagctgtggcaactgaacagcgggaaacttctgcaggggccacgggacagcgtggagggctctgcgcgcagggcagagactgcagttcactgccctgcggttttgcacttcgccccggccctgctcttggctgcgctccgatgtcagcgtgacctggagtcagctgccgcgccctcccacacccgctcctgccagcacccccgtctgctttccggagctgttcagactgcaggcttttctaatccaccaaaagtggtaattcaaattaaatggaatttccttgtcatgttgctgaattttccgggttccactaaattaattgctaggttaaagcagcaaatgaactacaaggaaatggcaagtcagaggcttacccaatccatgttgcctcatcgtagtaggttaattggtgctggcccttgcaacagatgtgtccacccagaacctgtgattgtgaccttatttggacaaaaggtttttgcacgtataattaagaaaaatcaaacctgccttctgtgcagtcagatctggtgtgcccattaccagcagggttggatatgtgcctggttggctggttttgggaaaatctacattttttccaccattggagtaatagatacactcagcagcggccacatccacctccagccaaactgtacagcacgtgactcagcatcctgggaatctccggcctag

SEQ ID NO: 9801 - DNA, 771 bp, Homo sapiens
  SIMILAR (129)..(689): 291254mologous to Santalum album proline rich protein,accession number AF020261,Smith-Waterman Score=112.
atgtggagactagtcatccaggacgcaaaagatgaaaatggagttttagtgggtaatagggtcttagcacactcctctctagcggttctctcctgtctggcgcttaacaaccgaagaataagtggatggaccccggtggcccctcgggcagccctccaggattcatgggccgcagaggaacgtcaacccccttcccactggctgataatgccccgaggggcagccccccaggtgcccatgtggttgagcgagtggatgcgcgtcttccccggcagagtgcaggatgccggcgacacatttgcctgggaacagtgggagggtcccctttcctccggggccggtgaactactcgcctctccgcctgcaggctccggagcaggtgaccggatcttcccttggcccttctcccgccggttctcggaccactccctctggaaggaagtctctccgcccttcctcttcctccccgcccccgtcccgctggtgtggctgcaggctcgagctggggtcactcggcggccagtgtgcgcaggtctcctggtcgccggccagagggcgaaagcattcacccgaggcccccagcttcgcggctgccttggctgcgagcaacgagggaagaggaggcaggcgctccaaaactgggcgaagattcctatcctaatttctaactcgagcctcccaccgtcagtgcgcttaatggcgctgctggccggatggataatcgagctctctggagggacagacgcggccgccatccctaataaatcgtga

SEQ ID NO: 9802 - DNA, 781 bp, Homo sapiens
  SIMILAR (8)..(493): 301254mologous to Homo sapiens Human PRO1305 (UNQ671) amino acid sequence SEQ ID NO:153,accession number Y99386,Smith-Waterman Score=110.
attcatgggccgcagaggaacgtcaacccccttcccactggctgataatgccccgaggggcagccccccaggtgcccatgtggttggtgggtgggatccagatctccgcagagcccctgttacaggtttctcttgttcggggtcttgtagccagagaggggcggctgactgggagtccttcccgcgttcccctccctgcagagcgagtggatgcgcgtcttccccggcagagtgcaggatgccggcgacacatttgcctgggaacagtgggagggtcccctttcctccggggccggtgaactactcgcctctccgcctgcaggctccggagcaggtgaccggatcttcccttggcccttctcccgccggttctcggaccactccctctggaaggaagtctctccgcccttcctcttcctccccgcccccgtcccgctggtgtggctgcaggctcgagctggggtcactcggcggccagtgtgcgcaggtctcctggtcgccggccagagggcgaaagcattcacccgaggcccccagcttcgcggctgccttggctgcgagcaacgagggaagaggaggcaggcgctccaaaactgggcgaagattcctatcctaatttctaactcgagcctcccaccgtcagtgcgcttaatggcgctgctggccggatggataatcgagctctctggagggacagacgcggccgccatccctaataaatcgtgaataacgaatgagggaaccaaaaaaaaaaaaaaaaaaaaaaaaaaagtcgtatcga

SEQ ID NO: 9803 - DNA, 415 bp, Homo sapiens
  SIMILAR (347)..(267): 741254mologous to Homo sapiens Human secreted protein, SEQ ID NO: 5935,accession number G01854,Smith-Waterman Score=93.
  misc_feature (1)...(415): n = a,t,c or g
ngtgttgtgggacgcactacatcagagaccagactggacgagatagctagagacttgggccggatagctgcggtgccaatcccccctggggggccttgttcaacttttctgcttgcagcctcatcttccccttcggagtccacaataaggacatattcagctttgaagaggtcactttgctgcatcccttgaagtttgtttgcttcgaattccctttcttgtaaaatcgttccactgacctctgaaggacaagtcaatttcgcttggtctctctcttgttggctcccagcattcaaggtcaagtagtcattggatttagacgtcagtttctcctctaaattcttgtttaataagcttcttttttcacgcttttcaagttccatattgaaagagaatgagaaagagagaaagactg

SEQ ID NO: 9804 - DNA, 373 bp, Homo sapiens
  SIMILAR (16)..(312): 311254mologous to Pseudomonas aeruginosa probable phosphodiesterase,accession number AE004724,Smith-Waterman Score= 83.
gcttttgcagcaatccctacaaacacattgcttttggaacagaaggcactagatgaaccagccgagactgaaagtgtctccaaggacaacacattataaccaccagtggagactcctacaactcttccaagagcagctggtcgagaaaccaaatatgcaaatctctcctcaccaacttctacagtatctgagagtcagctgactaagcctggagtaattcgcccagtacctgtaaaatccagaatattactgaaaaaagaggaggaagtctatgaacccaaccctttcagtaaatacttggaagataacagcgacctcttttctgaacaggatgtaacagtccctcccaagcctgtctcgctccatcctttat

SEQ ID NO: 9805 - DNA, 459 bp, Homo sapiens
  SIMILAR (135)..(377): 241254mologous to Neisseria meningitidis MC58 type II restriction enzyme DpnI,accession number AE002539,Smith-Waterman Score=70.
  misc_feature (1)...(459): n = a,t,c or g
agcaaacaaacttcaagggatgcagcaaagtgacctcttcaaagctgaatatgtccttattgtggactccgangggaagatgaggctgcaanagaaaagttgaacaaggccccccaggggacttnggcaccgcagctgtccggcccaagtctctagctatctcgtncagtctggtctctgatgtagtgcgtccaaaacacaggggactgatctcaagacctcatcacatcctgaaatgcttcatgggatggcccctcagcaaaagcatgggcagcaatacaagaccaagtcaagctacaaggcttttgcaagcattccctacaaacacattgcttttggaacagaagactccctacaactcttccaagagcagctggtcgagaaaccaaatatgcaaatctctcctcaccaacttctacagtatctgagagtcaagctgactaagccctggangtaatt

SEQ ID NO: 9806 - DNA, 472 bp, Homo sapiens
  SIMILAR (325)..(83): 871254mologous to Homo sapiens Human secreted protein, SEQ ID NO: 5935,accession number G01854,Smith-Waterman Score=356.
cccttgaagttggtttgcttcgaattccctttcttgtaaaaatcgttcccctgacctctgaaggacaagtcaatttcgcttggtctctctcttgttggctcccagcattcaaggtcaagtagtcattggatttagacctatttacagtttctggactcttatcacttgattcttctggaattttaacaaggaatttagaggtgtcagccaactgagtatgggttggtagtcttctgacagtggggacaaatgtgaagatcagaggtttggcttcagaaccaccagcagagaccgtcagtttctcctctaaattcttgtttaataagcttcttttttcacgcttttcaagttccatattgaaagagaatgagaaagagagaaagaatgagagacacagaggatcaaattctgtatagaaaatgattcgacgtgcttacacggacgcgtgggtcgacccgaaatatacgtgtcg

SEQ ID NO: 9807 - DNA, 1625 bp, Homo sapiens
  SIMILAR (339)..(1142): 291254mologous to Leishmania major proteophosphoglycan,accession number AJ243459,Smith-Waterman Score= 175.
cacagtcaaaactcctacaactcttccaagagcagctggtcgagaaaccaaatatgcaaatctctcctcaccaacttctacagtatctgagagtcagctgactaagcctggagtaattcgcccagtacctgtaaaatccagaatattactgaacaacgaggaggaagtctatgaacccaaccctttcaggtaaatacttggaagataacagcgacctcttttctgaacaggcactagatgaaccagccaagactgaaagtgtctccaaggacaacacattagaaccaccagtggagctctattttcctgcacagctcaggcagcaaactgaagagctctgtgctaccattgataaggtcttacaggattccttgtctatggcgccctccctctctcctacaaaacaggctagtagcagccttgcttacatgaatgtagagagaacaccatcacctactttgaagagcaataccatgctctccctgctacaaaccagtacatccagttctgtgggtcttcctcctgttccaccaagctcttctctttcctctttgaagagtaaacaggatggtgacctcaggggtccagaaaaccccagaaacattcacacgtacccttctacattagcctcctctgcattatcttctctatctcctcctattaatcaaagagctacgttctcttcttcagagaaatgtttccatccttccccagctctttcaagcctgataaacagatctaaaagagcatcatcccaactatctggccaggagctgaatccttcagctcttccttcactccctgtctccagtgctgactttgcctctcttcccaacttgaggtcctcctctctccctcatgccaatctgcccaccctggtgccccagctcagtccctcagctctgcacccacattgcggaagtggtaccttgccttcaagacttgggaaatctgaaagcaccacccccaaccacaggtcacctgtttcaaccccatcactttccatatctctaacaaggacagaggagctgatttcaccttgtgcattgtcaatgtcaacaggcccaaaaaataagaaatcaaagactcctacaactcttccaagagcagctggtcgagaaaccaaatattctaaatccaatgactacttgaccttgaatgctgggagccaacaagagagagaccaagcgaaattgacttgtccttcagaggtcagtggaacgattttacaagaaagggaattcgaagcaaacaaacttcaagggatgcagcaaagtgacctcttcaaagctgaatatgtccttattgtggactccgaaggggaagatgaggctgcaagcagaaaagttgaacaaggccccccaggggggattggcaccgcagctgtccggcccaagtctctagctatctcgtccagtctggtctctgatgtagtgcgtcccaaaacacaggggactgatctcaagacctcatcacatcctgaaatgcttcatgggatggcccctcagcaaaagcatgggcaggcttctgcatacaaaggggaggaatccaatgaagaagattggacgattttgaagagcagtagaatgaccaatcccagaaagcttagtgataataagatctaa

SEQ ID NO: 9808 - DNA, 765 bp, Homo sapiens
  SIMILAR (7)..(291): 671254mologous to multiple sclerosis associated retrovirus polyprotein,accession number AF009668,Smith-Waterman Score=328.
agcgagatagccaggcccctctatactctaatcaaggagacccggagggcaaatactcatctagtagaatgggaaccagaggcagaaacagccttcaaaaccttaaagcaggccctagtacaagctccagctttaagccttcccacaggacaaaacttctttttatacatcacagagagagcagggatagctcttggaatccttactcagactcgtgagacaaccccacaaccagtggcatacctaagtaaagaagttgatgtagtagcaaaagtctggcttcactgtttaagggatggggaaccaatcaagcatgactgccaacaaattatagtccagatttatgccgcccgagatgatctcttagaagtccccttagctaatcctgaccttaacctatatattgatggaagttcatttgtggagaatgggatacgaagggcaggttatgccatagttagtgatgtaactgtacttgaaaactctttggcagcagtgactctccaaaaccgccaaggcctagacctcctcactgctgagaaaggaggactctgcaccttctcagggaaagagtgttgtttttacactaaccagtcagggataagttcccctctggaggacactacaactgcagggccctttcttcaccccatccagcaggaagtagctagagctatcatcggccaattcccaacagcatttggggtgtcctgtttagaggggagattgagaggtgaagccagctggacttcctgggtcgagtag

SEQ ID NO: 9809 - DNA, 540 bp, Homo sapiens
  SIMILAR (373)..(525): 681254mologous to Homo sapiens p33ING1b,accession number AB037387,Smith-Waterman Score=222.
atggccagaccactctatactctaatcaaggagacccagaaggcaaatactcatctagtagaatgggaaccagaggcagaaacagccttcaaaaccttaaagcaggccctagtagaagctccatccttaagccttcccacaggacaaaacttctctttatacgtcacagagagagcaggaatagctcttggagtccttactcaaactcgtgggacaaccccacaaccagtggcatacgagccgggcgatcagaagatccagatcaagagccagagggtggagctggtggagagcctcacgcggcaggtagacagccacgtggagccgttccacccgcagcaggagcagggcgacgcagcgcgacggcggcaagacctccccatcgaccccagcgagccctcctactgggagatgatccgctgcgacaacgaatgccccatcgagtggttccgcttctcgtgtgtgagtctcaaccataaaccaaagcgcaagtggtactgttccagatgccggggaaagaacgatgggcaaagcccttga

SEQ ID NO: 9810 - DNA, 681 bp, Homo sapiens
  SIMILAR (462)..(319): 721254mologous to multiple sclerosis associated retrovirus element gag polyprotein,accession number AF123881,Smith-Waterman Score=175.
tcagattccaggaatacatctcagttgtgacagccaatctctaaacgtcgctaaatgcccctggggctcaaaaatcttgcccagttgagaatcagtgcatttccgtaacctctcgtagtctgacacagttttctgccagatgttacatttatcctgctgattggtccattttagagagagccgattggtctgttttacagagcgctgaatggtctgttttgacagggtgctgactggtgcatttacaatccctgagctagacaaagaggttctccacatccccactagattagctacatagagagtgtcgattggtgtatttacaaatcctgagctatcaggatcatctgaaaacttccccaggtctgccttgatctgctttaaatcagagagggagaaggggacatgcacctgggttgggccaagttctctgccccctacagcttgaaggggacataaccgattgccatcatcacctttactttttaaatgggtttggttttgcttcatgttgggaagcttggttcctcctggctgaggaatggtagccaggaaactgctggtcaaatcatcagccctttgtcctcctggcatgacacaggagctggtgctgccctcgatttctcgccgggccttagctgcctccccgtgcggtagggctccagacgtgcagccccccat

SEQ ID NO: 9811 - DNA, 527 bp, Homo sapiens
  SIMILAR (303)..(521): 371254mologous to Caenorhabditis elegans contains similarity to a BR-C/TTK domain,accession number AF016430,Smith-Waterman Score =132.
tttcgtgctcagaggacggcggccacggaagcggcctttgggtttggtggcgcacagaggggtgcggagcgggcggaagaggcgtctgtgtcgcagcttggtctcagaggagcatcgctggggaatttttctaagcactttaaatttttacttagctgtgtttatgggaagtgattttctatgtgtactcccctcccccaactaactctcattccttctttatatgatagaacaacgactatcgtctattccacaagatgagtaacagccaccctcttcgcccctttactgcagggggggaaattgatcatgtgcacattttgtctgaacatattggtgccttgttgattggggaagaatatggcgacgtcacattcgtggtggaaaagaaacgttttcctgcccacagggtaattttagcagccaggtgccaatattttcgagcattattatatggtggaatgcgagagtctcagcctgaagcagaaattcctctccaagacaccactgcagaagcattcacaatg

SEQ ID NO: 9812 - DNA, 2868 bp, Homo sapiens
  SIMILAR (532)..(1584): 661254mologous to multiple sclerosis associated retrovirus polyprotein,accession number AF009668,Smith-Waterman Score=1166.
atgcttcctgccttcgaacatcagaccccaagttcttcagcttttggactcttgaacctacagcagtggtttgtcaggggctctcgggcctttggccacagactgaaggctgcgctgtcgggttccctacttttgaagttttcagactcggactggcttccttgctcctcagcttgcagagggcctattgtgggacttcaccttgtgatcgtctatgtcaagtctcaccagaacgcttaccgccataaaaacatccaacttaagcagactttgctgagctgtaacaccacaaaggtccgcagcttcattattgaagtcagtgagaccaggaacccaccagcaggaacaaactccggacacatcttggggacttgtccaggatatcgctatgcgaaaggcaaagaaacaggcaaagaaatcatcaagggaccacaaaaccccccaggctatcggttatgtccccttcaagctgtagggggaggggaatttggcccaacccaggtgcatgtccccttttctctctctgatttaaagcagatcagggtagacctggggaagttttcagatgatcctgataggcaatatcccttaaggcctgaagctcatgaaggattacaggatattctcagatatttaaaagttcaagggttagtaagaaaatgcagcagtccctgcaatacccgaattctaggagtacaaaaaccaaaaggtcagtggagactagtgcaagatcttagattcatcaatgaggcagtaattcctctacattcagttgtacccaactcctataccctgctctctcaaataccagaggaagtggaatggttcactgttttggacctgaaggatgccttcttctgcattcccctgcactctgtctgccagtttctctttgcctttgaggatcccacagaccacacgtcccaatttacatggacggttttgcctcaagggtttagggatagccctcatctgtttggtcagatattggcccaagatctaggccacttctcaagtccaggcactctggtccttcagtatgtggatgatttacttttggctaccagtttggaagcctcatgccagcaggctactctagatctcctgaaccttctagctaatcaagggtacaaagcatctaaaccgaaggcccagctctgcctacaacaagtcaaatatctagacctaagcttagccagagtaaccagggccctcagcaaagaacgaatacagcctatactggcttgtcctcgccctaagacattaaaacagttgcgggggttccttgggatcaccaacttttgccaactatggatccctggatacagtgagatggccaggccactctatactctaatcaaggagacccagagggcaaatagtcatctagtagaaagggaacgagaggcagaaacagccttcaaaaccttaaagcaggccctagtacaagctctagccttaagccttcccacaggacaaaacttctctttatatgccagagagagagcaggaatagctcttggaatccttactcagactcacgggacaaccccacaaccagtgacatacctaaggaaattgatatattcatttgtggagaatgggatgcgaagggcaggttatgccatagttagtgatgtaacagtacctgaaagcaagccccttcccccagggaccagcacccagttagcagaactagtggtgcttacccaagccttagaactgagaaagaaaaaaagaataaatgtgaacacagatagcaagtacgcttatctaatcctacatgcccatgctgcaatatggaaagaaagggagttcctaacatctgggggaacccccaataaataccacaaggaaatcatggagttactgcatgctgtacaaaaacccaaggaggtggcagtcataccctgccaaagccatcaaaaaggtgaagagaaaaggcagaaggaaaccgtcgggcagatgctgagggccaaaattgctgccaggcggaacctcccaacagaaatacctatggaaggacccttggtatggaacaaccctgtccaagagattaagccccagtattccctgaccaaaacagaatggggactttcacaggggcatagttttctccccctggggtggttaacgacattagaggggaaggctggtagagccaccccgaatccccgaaacgtctacttcccactacaccttcgtggactgcgaacgggacggctaccgctctcccagagcacccgggcccaagaaatgaccctcgtcaggccccgtcccagctcctccccgcccccggaaaaagcggcggaggggcgggggcggcgatgctcctctgagaccaagctgcgacacagacgcctcttccgcccgctccgcacccctctctgcgccaccgcccccttggccgcttccgtggccgccgtcctcgccgccgccccggctgctgcggcgcgcgtccgctttcacgcactccgccgtggccgcgcacgcgccactgcgcgctggcgtcacttagcaaccgatcgacagcgggctgctgggtccggcgatgcaggcccagaaagtcgcctaaggcagcttccgcggctttttcgcatcggcccgaccctctgcccctccagaacagggggccccagggtgtggctgccctgccggcacctggctccggtcaccacacgtcactgtatggcgtcaccggcgcacgtcactacggatgagaaggtcctgggcgcctgtggagtgacctcgtccagaccgccgcagacccgatcggcaagttcttggaggtgcaggaaggttctccaaggagtaggaccagaaagggatgagagcgcgagcgcggttaatgtcgaggctgctaagtga

SEQ ID NO: 9813 - DNA, 340 bp, Homo sapiens
  SIMILAR (12)..(194): 421254mologous to Mus musculus m33-A isoform,accession number S71403,Smith-Waterman Score=120.
ggcacgagggcaaatcagggcccatgacgggggtggttctggtggctgttggggaggtggctatgaagatcctgcttctctgcctctgcctcatcctcctcagagtgaggtcttgcaggaggaaggcagcaagggcagcattgggcatggaggctgcagacgctgtcacggactaatctccagactccagactgcttccagatgcctcctcatccagttcctccacagtctgagcggccgtgtttcctctgcaggctttgcatggtctgtcccctgctggactctcctgatccctcctttccctgtcacccaacatctccccaaaccctacgggccaagg

SEQ ID NO: 9814 - DNA, 1302 bp, Homo sapiens
  SIMILAR (457)..(1299): 451254mologous to Homo sapiens CD33L1,accession number D86358,Smith-Waterman Score=485.
atgtgcattaatgttggtgctggctgcaatgggctggacaagacagcctttggacccacagttggcacttgcaggaccttcggctcctcagtgctcacgatcaccccatggccccaggaccacagcaccaacctcacctggcaggtgaagttccctggagctggtgtgactacagagagaaccatccagctcagtgtctcctactccagactccgtttccagatgcctcctcatccagttcctccacagtctgagcagccgtgtttcctctctggtgctggagaacaaggggaaaatgccacagcctggaatggaggccttgcacagtctgttcctggccagactctccacccaaagtctctgcaggccaagccctctgtggctctgagactttgcccctcacccagacacctgacatccaagtcccagcaactctggaatctggccatcctgcgaacctgctacgtgtcagcagcctggaaaagcagaaagtcactcatcttttcctggacatggggaactgtcatctccctgggccctaggacccctcacttctcagagatcaccatcatcccacttccctggagccacggctccagtatcaccttccaagtgactttcccaaggtttcatgtgaccacagagatgaccatccaactcaatgtctcctcacctgtagccttggagaatgccacctccctgtcagtcctgaagaaccaatccctgcgttttgtttatgtgactgacagcaacccacctgccaggctgagctggacctgggaaggccaagccctgaatctctcccagtcgtcagaatcagccgtcctggagctgcccccagtggagtcttgtgatggaggggaatttgtctgccaagctcagcaccctttgggctcccagcatgtctccattagcctctctgtgcagagtgactccgttatctctatagaagaaggcgttttacagaccctgggtttcacactgattaggggaatcctcatggggaccagctgcacattcatctgtggattcacctggatctgctgcactagcccagtcattcctaaaccagggacacagtcctgcttcagcaccagggacagcgccactctccctgatgcctgtggctcgccaggaccaaaacgtgtctggatgtgcagcgagagccaccagcctctttgcgcggtccctgatgaagatgagcaggagctccactacgctgtcctacacttccacaaggtgcaacctcaggaaccaaaggtcaccgacactgagtactcagaaatcaagatacacaagtga

SEQ ID NO: 9815 - DNA, 386 bp, Homo sapiens
  SIMILAR (84)..(380): 911254mologous to Homo sapiens peptidase homolog,accession number AF010141,Smith-Waterman Score=456.
  misc_feature (1)...(386): n = a,t,c or g
ccgctcaccaggccctggcgacctgagcatctacgacaactggatccggtacttcaaccgcagcagcccggtgtacggcctggtccccagggcctctggtgactgcagtggagaagtttgaggcagaagctgcagccttgggccaacgcatatcaacactgcagaagggcagccctgaccccctgcaggtccggatgctcaatgaccagttgatgctcttggaacggacctttctgaaccctagagccttcccagaggaacgctactacagccatgtgctctgggcacctcgcacgggctccgtagtcacattcccgggcctatccaatgcctgctccagggccagggacacagcttctggatctgaagcttgggctgagggccan

SEQ ID NO: 9816 - DNA, 825 bp, Homo sapiens
  SIMILAR (333)..(46): 911254mologous to Homo sapiens ANG2,accession number AF024631,Smith-Waterman Score=423.
ctacacagtgtccagtctggaccatggagtgagcaactcgggctccttcaaaggagcacactccagcagcgtcttcaggctgatcttgatgatgccggtcagcaccgacaccttgttgaactccacagggctgaacacatcaatacgttcagagaatagcttctggatattgctcaagaggttggtgtccatcggggcacagccagacttgggggtatagctgggggcgtagcggccctgctgccgagagctgctgtacacggagaaagtcctcttgctggagtcgctgctctgggccttgcgaacaccctcttcgtacaggagccccaccttgccgcaggcttcagcagccatcaggctgtggcccggacagcggggagtgtgattctccggctcagtgacagcttcttcctgcccttcaaagtcagtgactacagtgagacactccgcagcttccttcctccaacagcccttcataagtaatgtttcaagggccactttgatgaagaaagtctttttctctttttcctccattccaactctgtgtcctaatctgaactccagatcgttccctgtcttcatgagctcttcacctttgtgcacagctgcacttttgtccaagtcagaaccctgggagagcagctcaggaggcatcaggacgaccgtgtagtgaaagctcatgtggtcatagtggtaggtgatgcagaagttgtgcacgtctctgatgaagatgcccaggtgtaagaagaagagcatcagcgcagccgtggtgagcatcatgccttttgggaagaagaacgtggcgatgcggtcttgcagccgcat

SEQ ID NO: 9817 - DNA, 433 bp, Homo sapiens
  SIMILAR (206)..(433): 981254mologous to Homo sapiens peptidase homolog,accession number AF010141,Smith-Waterman Score=362.
ctggggcaagcctcgtaaggactggaccacgggtgggcaggagaccggtggagaacccgccctgttgttggggctggggagggccgcgcaccgagactaaattctccttccggccagatccgctcaccaggccctggcgacctgagcatctacgacaactggatccggtacttcaaccgcagcagcccggtgtacggcctggtccccaggcttcagcagccatcaggctgtggcccggacagcggggagtgtgattctccggctcagtgacagcttcttcctgcccctcaaagtcagtgactacagtgagacactccgcagcttcctgcaggcagcccagcaagatcttggggccctgctggagcagcacagcatcagcctggggcctctggtgactgcagtggagaagtttgaggcaaaagctgcagccttg

SEQ ID NO: 9818 - DNA, 999 bp, Homo sapiens
  SIMILAR (151)..(495): 1001254mologous to Homo sapiens NAALADase L protein,accession number AJ012371,Smith-Waterman Score=573.
atggcactttcaaaagagagaagtacagtaacccgaacacagtgggcaagaaagacaatgctacaaggtgagactatacagataagtgagtcagtcagcacatatctgagaccctacagtgtatcaggcactgttctgggcactaatatgagcaagacttcagccaggatctaccccacctaccacacagcctttgacacctttgactatgtggacaagtttttggacccgggcttcagcagccatcaggctgtggcccggacagcggggagtgtgattctccggctcagtgacagcttcttcctgcccctcaaagtcagtgactacagtgagacactccgcagcttcctgcaggcagcccagcaagatcttggggccctgctggagcagcacagcatcagcctggggcctctggtgactgcagtggagaagtttgaggcagaagctgcagccttgggccaacgcatatcaacactgcagaagggcagccctgaccatgtgctctgggcacctcgcacgggctccgtagtcacattcccgggcctatccaatgcctgctccagggccagggacacagcttctggatctgaagcttgggctgaggtccagagacagctcagcattgtggtgacagccctggagggctcggtggaagccctgcatgaggttctacagctgcctgctgccctgcgcgcctgcccgcccctccgcaaggccttggcggtagatgctgccttccgagagggcaatgctgcccgcctgttccgtctgctccagaccctgccctacctgccaagttgcgctgtgcagtgccatgtgggccatgcccgccgggaagccctggcccgcttcgctcgtgcctttagcacccccaagggccagaccttgcctctgggcttcatggtcaacctcttggcctggatggactcagggaagcacgggacctgtgccaggcccacgggctgcccttggacggagaggagagagttgtgttcctga

SEQ ID NO: 9819 - DNA, 747 bp, Homo sapiens
  SIMILAR (196)..(456): 981254mologous to Homo sapiens Human peptidase NAALAD-ase L splice variant (deletion),accession number Y58871,Smith-Waterman Score=435.
atgcctcctgagctgctctcccagggttctgacttggacaaaagtgcagctgtgcacaaaggtgaagagctcatgaagacagggaacgatctggagttcagattaggacacagagttggaatggaggaaaaagagaaaaagactttcttcatcaaagtggcccttgaaacattacttatgaagggctgttggaggaagagcaagacttcagccaggatctaccccacctaccacacagcctttgacacctttgactatgtggacaagtttttggacccgggcttcagcagccatcaggctgtggcccggacagcggggagtgtgattctccggctcagtgacagcttcttcctgcccctcaaagtcagtgactacagtgagacactccgcagcttcctgcaggcagcccagcaagatcttggggccctgctggagcagcacagcatcagcctgggtatgcacagccctgaccctgaggtccggatgctcaatgaccagttgatgctcttggaacggacctttctgaaccctagagccttcccagaggaacgctactacagccatgtgctctgggcacctcgcacgggctccgtagtcacattcccgggcctatccaatgcctgctccagggccagggacacagcttctggatctgaagcttgggctgaggtccagagacagctcagcattgtggtgacagccctggagggtgcggcagccaccctgaggcctgtggctgacctctga

SEQ ID NO: 9820 - DNA, 2689 bp, Homo sapiens
  SIMILAR (17)..(1873): 991254mologous to Homo sapiens Human peptidase NAALAD-ase L splice variant (premature termination),accession number Y58877,Smith-Waterman Score=3227.
gccaagagtccgcaggatgcagtggacgaaggtgttggggctggggctgggggctgctgccctcttggggctggggatcatcctcggccactttgccatccccaaaaaagccaactcactggccccccaggacctggacctggagatcctggagaccgtcatggggcagctggatgcccacaggatccgggagaacctcagagaactctccagggagccacacctggcctccagccctcgggatgaggacctggtgcagctgctgctgcagcgctggaaggacccagagtcaggcctggactcggccgaggcctccacgtacgaagtgctgctgtccttccctagccaggagcagcccaacgtcgtggacatcgtgggccccactgggggcatcatccactcctgccaccggactgaggagaacgtgaccggggagcaaggggggccagatgtggtacaaccctatgctgcctatgctccttctggaaccccacagggcctcctcgtctatgccaaccggggcgcggaagaagactttaaggagctacagactcagggcatcaaacttgaaggcaccattgccctgactcgatatgggggtgtagggcgtggggccaaggctgtgaacgctgccaagcacggggtagctggggtgctggtgtacacagaccctgccgacatcaacgatgggctgagctcacccgacgaaacctttcccaactcctggtacctgcccccctcaggagtggagcgaggctcctactacgagtattttggggaccctctgactccctaccttccagccgtcccctcttccttccgcgtggaccttgccaatgtctccggatttcccccaattcctacacagcccattggcttccaggatgcaagagacctgctctgtaacctcaacggaactttggccccagccacctggcagggagcactgggctgccactacaggttgggtcccggcttccggcctgacggagacttcccagcagacagccaggtgaatgtgagcgtctacaaccgcctggagctgaggaactcttccaacgtcctgggcatcatccgtggggctgtggagcctgatcgctacgtgctgtatgggaaccaccgagacagctgggtgcacggggctgtggaccccagcagtggcaccgccgtcctcctggagctctcccgtgtcctggggaccctgctgaagaagggcacctggcgtcctcgcagatcaatcgtgtttgcgagctggggggctgaggagtttgggctcattggctccacggaattcacagaagagttcttcaacaagctgcaggagcgcacggtggcctacatcaacgtggacatctcggtgtttgccaacgctacccttagggtgcaggggacgccccctgtccagagcgtcgtcttctctgcaaccaaagagatccgctcaccaggccctggcgacctgagcatctacgacaactggatccggtacttcaaccgcagcagcccggtgtacggcctggtccccagcttgggttctctgggtgctggcagcgactatgcacccttcgttcacttcctgggcatctcctccatggacattgcctatacctatgaccggagcaagacttcagccaggatctaccccacctaccacacagcctttgacacctttgactatgtggacaagtttttggacccgggcttcagcagccatcaggctgtggcccggacagcggggagtgtgattctccggctcagtgacagcttcttcctgcccctcaaagtcagtgactacagtgagacactccgcagcttcctgcaggcagcccagcaagatcttggggccctgctggagcagcacagcatcagcctggggcctctggtgactgcagtggagaagtttgaggcagaagctgcagccttgggccaacgcatatcaacactgcagaagggcagccctgaccccctgcaggtccggatgctcaatgaccagttgatgctcttggaacggacctttctgaaccctagagccttcccagaggaacgctactacagccatgtgctctgggcaccttcgcacgggctccgtagtcacattcccgggcctatccaatgcctgctccagggccagggacacagcttctggatctgaagcttgggctgaggtccagagacagctcagcattgtggtgacagccctggagggtgcggcagccaccctgaggcctgtggctgacctctgaccccagccctctttcttcagccctccctttactccaaccctctcctgcctgctttcctgagatgtcctggtcttccttggtgccagaagagggcactaccacaggaccctctcaagcttctcaggcaacagcttgaggtccctgaggggagtggcaagccctaatgcaactcaccctcatcctggtgcttaagtggcaaagggtgggcagcaggggacagggatgggatggcaaaaccaccaactgcccttggtggcaggtgggtggagatgggatgcgtgccaacctcagatgccaactcaggtcatcaaggccaaggaccagtggcgaaagtgagtcttggggtaccttaggccttggctagtctgcgttcctctccctgcatgctgtgtatcctaactccctacaacagcccctcaaataaatcacatctagtgactggtaccaac

SEQ ID NO: 9821 - DNA, 1965 bp, Homo sapiens; identical to SEQ ID NO: 7403
  SIMILAR (676)..(1962): 901254mologous to Homo sapiens putative p150,accession number U93563,Smith-Waterman Score=2117.

SEQ ID NO: 9822 - DNA, 375 bp, Homo sapiens
  SIMILAR (1)..(135): 771254mologous to Homo sapiens Human secreted protein, SEQ ID NO: 6834,accession number G02753,Smith-Waterman Score=191.
atggaatactatgcagccttaaaaaaggatgagttcatgtcctttgtagggacatggatgaagctggaaaccatcattctgagcaaagtgttgccaaggacagaaagtcaaacaccacatgttctcactcacaggagccctcctcgtaaggggaccctgggcctgaactccaaaacctgggtttcactttgcatggggaccagtgtgatggttaattttatgggtcaacttgaccgggccacagagtgcctagatatttggtcaaacattattctggtggttctgtgctggtatccacagctgaaagacctgaagatgtattacatcacaggactctttgccgacacttcccagtaccagtctggagtccagtag

SEQ ID NO: 9823 - DNA, 381 bp, Homo sapiens
  SIMILAR (1)..(132): 841254mologous to Homo sapiens hypothetical protein,accession number AL096744,Smith-Waterman Score=191.
atggaatactatgcagccataaaaaaggatgagttcatgttctttgtagggacatggatgaaggtggaagccatcattctgagcaaacttttgcaaggacagaaaaccaaacacagcattttctcactcatagccctttctgaattcgcctggactcccagtcgcgctcgctggccgacgcggtcgattcaccagacagcgagtgggcgtgagaacgcagctcttcggccgcttccccagtacgtggatcccggagcgcggcttttttacctgggagctgttcttacccggccacgcttagcagatgccaaaagccagaccctgcacgactcagtcatgagacagagggagagacctggcgggtgcccactccacctttag

SEQ ID NO: 9824 - DNA, 684 bp, Homo sapiens
  SIMILAR (102)..(134): 811254mologous to Homo sapiens Human secreted protein, SEQ ID NO: 6833,accession number G02752,Smith-Waterman Score=48.
atggaatactatgcagccataaaaaatgatgagttcatgtcctttgtagggacatggatgaagctggaaaccatcattctcagcaaactgtcgcaaggacaaaaaaccaaacaccacatattctcactcatagaagctcaagcccaggtgtcgccgccacccccttaccctgcaccccaggagctcacccagcccctcctgcagcagccccgcgcccctgaggcccctgcccagcagccccaggcagcctcctcactgccacagtcagactttcagcttctcccggcccagggctcatctttgaccaacttcttcccagatgtgggttttgaccagcagtccatgaggccaggccctgcctttcctcaacagttacctgcggtcaaccaccatctaaaaatagagtctgctggtcagcagcacgcggtggactggatgccccgtagcggctactgcaaggaagcgagggaacgccaaggggtgctcgttacaggtgacagcccctgtccgggtagcattcgcatctcctcggaacaccagccccatgagatgttccagacaaaagattcaggggacagtttgagaagtgctgactaccacgccgacctcttggaaatgggctggcgtttcaaagatttgaagaagtccttcagtgcagacatgtcttcactgtttctccagtag

SEQ ID NO: 9825 - DNA, 3177 bp, Homo sapiens
  SIMILAR (1051)..(2142): 881254mologous to Homo sapiens putative p150,accession number U93567,Smith-Waterman Score=1807.
atggaatactatgcagccataaaaaatgatgagttcatgtccttcgtagggacatggatgaagctggaaaccatcattctcagcaaactactgcaaggacaaaaaaccaaacaccgcatgttctcactcataggttctattattgtcaaggtcccatcttcacttcaagctcatttacagttatcagggaaagaggttgatgtgaactcagaagtccatgttcaggaaatggctgaagctcgtaaagatgatgttgtaacagtgactgatgcagaaaaagcattagacaaaatccagcatctctttatggttaaaactctcagcaaaatcggcatacaagggacatacctcaatgtaataaaagccatctatgacaaacccacagctaacataatactgaatggggaaaagttgaaagcattccctctgagaaatgaaacaagacaaggatgccctctctcaccactcctcttcaacacagtactgaaagtcctagccagagcagtcagacaagagaaggaaataaagggtatccaaattggtaaagaggaagtcatactgtcactgtttgcagatgacatgattgtacatctagaaaaccccattgtctcagcccaaaatctccttaagctgatagacaatttcagcaaagtctcaggatacaaaatcaatgtgcaaaaatcacaagcattcttatacaccaataacagacaaacagagagccaaatcatgagtgaactcccattcacaattgcttcagagagaataaaatacctaggaatacaacttacaagggacgtgaaggacctcttcaaggagaactacaaaccactgctcaatgacataaaagaggatacaaacaaatggaagaacactccacgctcatgggtaggaagaatcaatatcatgaaaatggccatactgcccaaggtaatttatagattcaatgccatccccatcaagctaccaatgactttcttcacagaattggaaaaaactactttaaagttcatatggaaccaaaaaggagcccgcattgccaagtcaatcctaatttatagattcaatgcccaagaattggaaaaaactactttaaagttcatatggaaccaaaaaggagcccgcattgccaagtcaatcctaagccaaaagaacaaagctggaggcatcacgctacctgacttcaaactatactacaaggctacagtaatcaaaacagcatggtactggtaccaaaacagagatatagaccaatggaacagaacagagccctcagaaataatgccacatatctacaaccatctgatctttgacaaacctgacaaaaacaagaaatggggaaatgattccctatttaataaatggtgctgggaaaactggctagccatatgtagaaagctgaaactggatcccttccttataccttatacaaaaattaattcaagatggattaaagacttaaatgttagacctaaaaccataaaaaccctagaagaaaacctaggcaataccattcaggacatagccatgggcaaggactttatgtctaaaacaccaaaagcaatggcaacaaaagccaaaattgacaaatgggatctaattaatctaaagagcttctgcacagcaaaagaaaccaccatcagagtgaacaggcaacctatagaatgggagaaaatttttgcaatctactcatctgacaaagggcgaatatccagaatctacaatgaactcaaacaaatttacaagaaaaaaacaaacaaccccatcaaaaagtgggcaaaggatatgaacagacacttctcaaaagaagacatttatgcagccaaaagacacatgaaaaaatgctcatcatcactggccattagagaaatgcatatcaaaaccacaatgagacaccatctcacatcagttagaatggcgatcattaaaaagttaggaaacgactggtgctggaggggatgtggagaaataggaagacttttacactgttggtgggactgtaaactagttcaaccattgtggaagtcagtgtggcgattcctcagggatctagaactagaaacaccatttgacccagccagcccattactgggtatacacccaaaggattatagatcatgctgctataaagacacatgcaccacacgtgtttattgaggcactattcacaatagcaaagacttggaaccaacccaaatgtccatcaatgagagactggattaagaaaatgtggcacatatacaccatggaatactatgcagccataaaaaaggatgagttcatgtcctttgtaggggacatggatgaagctggaaaccatcattctgagcaaactaaccaaactaaccacaggaacagaaaaccaaacaccgcatgttctcactcatagtattggaagttctggccagggcaatcaggcaagagaaagaaataaagggtattcaattaggaaaagaggaagtcaaattgtccctgtttgcagatgacatgattgtatatttagaaaaccccatcatgtcagccccaaatctccttaagctgataagcaacttcagcaaagtctcaggatacaaaatcaacgtgcaaaaatcacaagcattcctatataccaatatcagacaaatagagagccaaatcatgagtgaactcccattcacaattgctacaaagagaataaaatacctaggaatccaactttcaaggaatgtgaaagagctcttcaaggagaactacaaaccactgctcaaggaaataaaagaggacacaaacgattggaagaacattccatgctcatggataggaagagtcaacattgtgaaaatggccatgctgcccaaagtaatttatagattcagtgctatccccatcaagttaccaatgactttcttcacagaattggaaaaaactactttaaagttcatatggaaccaaaaaagagcctgcattgccaagacaatcctaagcaaaaagaacaaagctggaggcatcacgctacctgacttcaaactatactgcaaggctacagtaaccaaaacagcatggtactgggtaccaaaacagatatatagaccaatggaacagaacagagacctcagaaataataccacacatctacaaccatctgatctttcacaaacccgacaaaaacaagcaacgaggaaaggattccctatttaa

SEQ ID NO: 9826 - DNA, 384 bp, Homo sapiens
  SIMILAR (312)..(353): 781254mologous to Mus musculus 24.6 kda protein,accession number M93980,Smith-Waterman Score=62.
atgtatgttcatgtctttgaccttgcactacgccaatgtaggctccaggcagatattcgaggtgcctttgaaaagctccagggcactgtggccagggttcacattggccaagttatcatgtccatctgcaacaagctgcagaataaggagcatgtgattgaatccctgctcagggccaagttcaagttccctggctgccagaagatccacatttcaaagaagtggggcttcaccaagttcactgcggatgaatttgaagacatggtggctgaaaagcggctcatcgcagatgactgtggggtcaagtacatccccatcatggccctctggacaagtggcgtgccctgccctcgtgagggcttccactgtgctgccccctcttaa

SEQ ID NO: 9827 - DNA, 573 bp, Homo sapiens
  SIMILAR (29)..(100): 621254mologous to Chlamydomonas reinhardtii vegetative cell wall protein gp1,accession number AF309494,Smith-Waterman Score=72.
ttttttttttttttcttccggtggctggtctccggcggccccgtccccgactgggccccgtgcctccccgcccccgcgtccccccgccgcaagaccgagccgccaccatgaagaaattctttcaggagttcaaggccgacatcaagttcaagagcgcgggacccggtcagaagctcaaagagtccgtgggggaaaaggcccacaaagagaagcccaaccagccagcccccaggccgccccgccagggacccaccaatgagggcacagatggcagccgctgctgccctcagcccggctggagcagaagcagtcccgggcctggggcccccacatcgcaggacaccatccgaaaccaggtgagaaaggaacttcaagccgaagccaccgtcagcgggagccccgaggccccagggaccaacgtggtatctgagcccagagaggaaggctctgcccacctggctgtgcctggcgtgtacttcacctgtccgctcactggggccaccctgaggaaggaccagcgggacgcctgcatcaaggaggccattctcttgcacttctccaccgacccagtgg

SEQ ID NO: 9828 - DNA, 1479 bp, Homo sapiens
  SIMILAR (100)..(807): 401254mologous to Homo sapiens cargo selection protein TIP47,accession number AF057140,Smith-Waterman Score=444.
atgaagaaattctttcaggagttcaaggccgacatcaagttcaagagcgcgggacccggtcagaagctcaaagagtccgtgggggtttggggaagaccaaatgggttgatgtcagtcaaggggaactgtgaatgtgggaacctgtggcttctgtacccagaggtggcggcactggcggctgaggctgaaggccctgaagtgggttcggtggaggatcagaggagacagcagggctactttgtgcgcctcggctccctgtcagcacggatccgccacctggcctacgagcactctgtggggaaactgaggcagagcaaacaccgtgcccaggacaccctggcccagctgcaggagacgctggagctggtagaccacatgccgtgtggggtgacccccaccgccccggcccggcctgggaaggtgcacgagctgtggggggaatggcgccagcgccctccggagagccgccgccggagccaggcagagctggagacgctggtgcttgcccgcagcctgacccacgagctgcagggcacggtagaggctctggagttcagcgtgtggggcctgcccgccggcgcccaggagaaggtggctgaggtgcggcgcagtgtggatgccctgcagaccgccttcgctgatgcccgctgcttcagggacgtgccagcggccgcgctggccgagggccggggtcgcgtggcccacgcgcacgcctgcgtggacgagctgctggagctggtggtgcaggccgtgccgctgccctggctggtgggacccttcgcgcccatccttgtggagcgacccgagcccctgcccgacctggcggacctggtggacgaggtcatcgggggccctgacccccgctgggcgcacctggactggccggcccagcagagagcctgggaggcagagcacagggacgggagtgggaatggggatggggacaggatgggtgttgccggggacatctgcgagcaggaacccgagacccccagctgcccggtcaagcacaaccctgatgcccgagctggacttctgacccatgggccagtggaggcggggtaggaaaggccacctgcacacacccgatccctgctgccccctggtggcccccacgtaagctcgaggccttggccttgacccttctttggaatcaggccccaaatccggatactctgaccaccattttggtattggactctcccattttttccttgaacacatggacaaagaggccccgggggagcagggcctcgaaccctattcaggccaacttgagccacaagctgggttcttcacctatgtcctgctccctggctccatgaagcgaatccaaatctttccaagaggctgggcacagtggctcacgcctgtaatcccagcactttgggagtctgaggcaggtggatcatctgaagtcaggagttcgggatcatcctggccaacatgatgaaaccctgtctctacttagaaagaaag

SEQ ID NO: 9829 - DNA, 644 bp, Homo sapiens
  SIMILAR (439)..(570): 901254mologous to Homo sapiens Human secreted protein, SEQ ID NO: 7141,accession number G03060,Smith-Waterman Score=211.
cgggccttagctgccttcccgcggggcagggctggggacctgcagcccgccaagcctgagcctcccacccgctccatgggctcctgtgcggcccgagcctccccgacgagcaccaccccctgctccacggcgcccagtcccatcgaccacccaagggctgaggagtgcaggcgcacggcaccaggactggcaggcagctccacctgcagctctggtgcgggatccactaggtgaagccagctgggctcctgagtctggtggggacgtggagaacctttgtatctagtggggtccccttccgcactgtggaagctttgttccttcgctctttgcaataaatcttgcttctgctcagtctttgggtccacactgcttttatgagctgtaacactcactgtgaagatctgcagcttcactcctgaagccagcgagaccacgagcccaccgggaggaacgaacaactccagacgtgctgccttaagagctgtaacactcaccgtgaaggtctgcagcttcactcctgaaccagcgaggccacgaacccaccagaaggaagaaactccgaacacatgcggtggcacgggggggccccagggcatcctgtggttctctccagctgtccagcagaagcgtttctgccccat

SEQ ID NO: 9830 - DNA, 458 bp, Homo sapiens
  SIMILAR (287)..(349): 1001254mologous to Homo sapiens Human secreted protein, SEQ ID NO: 7678,accession number G03597,Smith-Waterman Score=108.
ttttttttttttgggtttccatgtattttattccattccactcataccaagagacaattctttttgaggtgtgtttagctctctagacttaattactgctgtgtttgtcacattggctgaattgagatcggtgacataaggattcctgggagcctgcgctgggcgcgaatttaagatggctcctccatgatcttcactctctgggtgaaaactgtcggtcagcccatgcccaggattgttgatcagtgctgaaggtcctgaggctgtttttagcatagtctaaaacgcgagggtccgtggcttcattcttgaagtcagtgagaccaagaacccaccaattccggacacattgggaacttagagcagtgcttgggacatggttatcagcgttagctatttccttaaactagcgtgaagtcgactttaaccttccagcagtgtgagtgagggccctgacc

SEQ ID NO: 9831 - DNA, 2665 bp, Homo sapiens
  SIMILAR (1275)..(1928): 1001254mologous to Homo sapiens mitochondrial glycerol-3- phosphate dehydrogenase,accession number U12424,Smith-Waterman Score=1124.
gcggggctggcacccgggccgaggctctgattctggggggaggccgactccaccctggctggaggaactgggtgctcctgcccgctggcccctcgcgcgtgaggatctatctcaggctaagaaatggcatttcaaaaggcagtgaaagggacgattcttgttggaggaggtgctcttgcaactgttttaggactttctcagtttgctcattacagaaggaaacaaatgaacctggcctatgttaaagcagcagactgcatttcagaaccagttaacagggagcctccttccagagaagctcagctactgactttgcaaaacacatctgaatttgatatccttgttattggaggaggagcaacaggaagtggctgtgcgctagatgctgtcaccagaggactaaaaacagcccttgtagaaagagatgatttctcatcagggaccagcagcagaagcactaaattgatccatggtggtgtgagatatctgcagaaggccatcatgaagttggatattgagcagtataggatggtaaaagaagcccttcatgagcgtgccaacctgctagaaattgctccccatttatcagctccattgcctataatgcttccagtttacaagtggtggcagttaccttactactgggtaggaatcaagctgttatgatttggttgccaggaaagcaaattgcctaaaaagcagttatgtcctcagcaaatcaagagcccttgaacatttcccaatgctccagaaggacaaactggtaggagcaattgtctactatgacggacaacataacgatgccacggatgaaccttgccattgctctgactgctgcccaggtatggggctgccacagccaattacatggaggtagtgagcttgcctcaagaagacagaccccccagacagggaaaagtgcatgtgagcggcgcacggtgcaaaggatgtccctcaacagggcaggaatttgacgtgagagccaaatgtgttatcaatgccacgggacctttcacggactctgtgcgcaaaatggatgataaagacgcagcagctatctgaccagccaagtgctggtgtccatattgtgatgcctggttattacagcccagagagcatgggacttcttgacccagcgaccagtgatgggcgagttattttcttcttaccctggcaaaagatgacgatcgctggcactactgatactccaactgatgttacacaccatccaattccttcagaagaagatatcaacttcattttgaatgaagtgccgtaattacctgagttgtgatgttgaagtgagaagaggggatgtcctggcagcatggagtggaatccgtcctcttgttacagaccccaaatctgcagatactcagtctatctcccgaaatcatgttgttgatatcagtgagagtggccttattactatagcaggtggaaagtggacaacttatcggtctatggcagaagataccataaatgctgctgtcaaaactcataatttaaaagcaggaccaagtagaacagttgggcttttccttcaagggggtaaagattggagccccacactctacattaggcttgtgcaggattatggacttgaaagcgaggtggcacagcatcttgccgccacctatggtgataaggcctttgaggtggccaaaatggcaagtgtgactggcaaaaggtggcctattgttggagtacatcttgtgtcagaatttccatatattgaagcagaggtgaaatatgggattaaggagtatgcctgcactgctgtggatatgatttcacgtcgtactcgcctggcctttctaaatgtccaggcagcagaggaagccctacccaggattgttgaactgatgggcagggaactgaattgggatgattataagaagcaggaacaacttgaaacagccaggaaggtttctatattatgaaatgggctataaatctcgatcagaacagttaacagatcgctctgaaattagcctactgccttcagacattgacaggtataagaagagatttcataagtttgatgcagaccagaaaggctttattaccattgttgatgttcagcgtgtattagagagtatcaatgtccaaatggatgaaaatacactccatgaaattctaaatgaagttgatttgaataaaaatggacaggttgaactcaatgaatttttgcagctgatgagtgctattcaaaaaggaagggtatctggaagccggcttgctatactaatgaaaactgcagaagagaacctcgacagaagagttccaattccagtggaccgtagttgtggaggattgtgagtctgggcagtaaatccacagccaacaaacatagaaacgacaaatccccatgtaacaaccagagatgactgaaaccactctgaaataatgaatgtggatagctgcctttttttaacactagaaaacattccaaaactttaaggtgttggtgtatttgccagctttatttgctgtactttatttgtatttgccattcagtctagcttttaagtatatttttttctttttctcattttcaatgcacattagttttgcatctgttttgtgacctgttagatgtgacacattctctttttgtttattcccttattctaaatgagttctaaaaacataatattttggc

SEQ ID NO: 9832 - DNA, 3486 bp, Homo sapiens
  SIMILAR (1055)..(1687): 931254mologous to Homo sapiens glycerol-3-phosphate dehydrogenase,accession number U36310,Smith-Waterman Score=1006.
atgctcaaaccccttatgggagggggagcacacagaagggcagctgcaggagccaggaaatgggatggtactgctatcattgcatctacctctggattagaggttctttgggtcactacctctagatcgaagactgttgagagcgtcggactggcaaagccaggacaacataacgatgcacggatgaaccttgccattgctctgactgctgccaggtatggggctgccacagccaattacatggaggtagtgagcttgctcaagaagacagacccccagacagggaaagtgcgtgtgagcggcgcacggtgcaaggatgtcctcacagggcaggaatttgacgtgagagccaaatgtgttatcaatgccacgggacctttcacggactctgtgcgcaaaatggatgataaagacgcagcagctatcttgccaagcaaagtgctggtgtccatattgtgatgcctggttattacagcccagagagcatgggacttcttgacccagcgaccagtgatgggcgagttattttcttcttaccctggcaaaagatgacgatcgctggcactactgatactccaactgatgttacacaccatccaattccttcagaagaagatatcaacttcattttgaatgaagtgcgtaattacctgagttgtgatgttgaagtgagaagaggggatgtcctggcagcatggagtggaatccgtcctcttgttacagaccccaaatctgcagatactcagtctatctcccgaaatcatgttgttgatatcagtgagagtggccttattactatagcaggtggaaagtggacaacttatcggtctatggcagaagataccataaatgctgctgtcaaaactcataatttaaaagcaggaccaagtagaacagttgggcttttccttcaagggggtaaagattggagccccacactctacattaggcttgtgcaggattatggacttgaaagcgaggtggcacagcatcttgccgccacctatggtgataaggcctttgaggtggccaaaatggcaagtgtgactggcaaaagggtgggcctattgttggagtacgtcttgtgtcagactttccatatattgaagcagaggtgaaatatgggattaaggagtatgcctgcactgctgtggatatgayttcacgtcgtactcgcctggcctttctaaatstccaggsagcagaggaagccctacccaggcttbttgaactgatgggcagggaactgaattgggatgattataagaagcaggaacaacttgaaacagccaggaagtttctatattatgaaatgggctataaatctcgatcagaacagttaacagatcgctctgaaattagcctactgccttcagacattgacaggtataagaggagatgtcataagtttgatgcggaccagagaggctttatgaccgttgttgaggtgcagcgtgtattagagagtatcaatgtccaaatggatgaaaatacactccatgaaattctaaatgaagttgatttgaataaaaatggacaggttgaactcaatgaatttttgcagctgatgagtgctattcaaaaaggaagggtatctggaagccggcttgctatactaatgaaaactgcagaagagaacctcgacagaagagttccaattccagtggaccgtagttgtggaggattgtatttctgtgtccggaattggtgggttcttggtctcactgacttcaagaatgaagccgcggaccctagcggagtgaagctgcagaccttcacggtgagtgttacagctcttaaggtagcacgtctggagttgtttgtttctcccggtgggctcgtggtcttgctgggttcaggagtgaaactgcagatcttcgcgcccaacatggcgatgcacaacaaggcggcgccgccgcagatcccggacacccggcgggagctggcggagctcgtgaagcggaagcaggagctggcggcaacattggcaaaatttggagcgacagatctatgcttttgagggaagctacctggcagacactcagatgtatggcaatattatttcgtggctggattcggtatctgaccaaccaaaaaaaccttccattggcaaaattgatctgaaggaaccggaagtttaaggaagcttgagcgtctcgttcagtaaatcctcggttacctcagcagctctgatcattcagtatatggctgtttacctgtctacctgcaagaataagctgcacccaggggagccagggaagttgggacgggaaagttgacactttctccagattttccacattcagggaaaaatggagcccagccaggaggaccctgaggattctggatggatctgtgcagggaagtgaaaccttcagaaggctgcttcttctacttcctcaggggagtcaccacagcagccataaaaagcgaaagaataaaaaccggcacagccccgtctggcatgtttgattatgactttgagattgatctgaagttaaacaaaaaaccacgagctgactattagaagacacattagtgccagaagccttccaggctgtagagccctggcttcccttctctgacctcacaaagataaacatccttcacctgagttcgtggccatccacctctgctctcccagacccagtgcctgtgactttgagtagtttgttctaaatgtggtgacaaacaagtcatttctgtaagacattgggtcttactttatgtcatttttagtaacagaactgcaggaagatcaagacaatgttgtaatcccggcaagttgctaactgtgcgtttctcccttcttagaatgaatgtctcccccaaaactggctggcaccagcttcatctgtgatacccttcaagaaatgttcctctggttttgttttatgctgaaagtagaacacaagtcacatttcagatgggagggctgtaaatatctgggcattttcttatattgttttatgttttcttgtttttctcttgttgtttttatcttattttctttgggggtttttttgtaatgcctttgtaccagcctccatacctttcccctgcctgaccatatcctggatccatcctcctttccatgccagttgcccaatattccataactggaaaaataatcctggtttatccataagtaaaaatgggaaacttgcctcctgttttttgcaagggggaggtaaagagtgtttagtaattacctcatcttaaatctttctgagttggtagtagactcatgttcaaggaacccaggaaaatggaaaaccataagtttaaatcagttctttttaaataactttttattcttttgtataaataaaatttcacaggcttcaaattctcatgctttacttttaaacccgagattgtttttttcacttatttattcatatcatgcctttatggaaatttctttttctgtattttctctctttgctggtattcacctgattaaatattgctctaaaaatcacc

SEQ ID NO: 9833 - DNA, 593 bp, Homo sapiens
  SIMILAR (350)..(592): 961254mologous to Homo sapiens dJ309K20.2 (acrosomal protein ACR55 (similar to rat sperm antigen 4 (SPAG4))),accession number AL109827,Smith-Waterman Score=384.
tattagcagtgcggtggaattcgagacttcccagctgtctggcttgtggactgagcaatctgcggcccggtctcgaggggaaaatatagtctgtggtccgcaaggccccagaggagcccttgggttcccgcagaaccgactgggtctccagtagtctctgaggagccgctcgaccttctcccgaccctggatctgaggcaggagatgcctcccccgcgggtgttcaagagctttctgagcctgctctttcaggggctgagcgtgttgttatccctggcaggagacgtgctggtcagcatgtacagggaggtctgttccatccgcttcctgttcacggttgtgtcgctgcttgaacctctttctgtcagcattctggctggggcttctgtacctggtctctcctttggagaatgaacctaaggagatgctgactctaagtgagtaccacgagcgcgtgcgctcccaggggcagcagctgcagcagctccaggccgagctggataaactccacaaggaggtgtccactgttcgggcagccaacagcgagagaggggccaagctcgtgttccagaggctgaatgagggatttgtgc

SEQ ID NO: 9834 - DNA, 1151 bp, Homo sapiens
  SIMILAR (756)..(1103): 921254mologous to Homo sapiens dJ309K20.2 (acrosomal protein ACR55 (similar to rat sperm antigen 4 (SPAG4))),accession number AL109827,Smith-Waterman Score=549.
atgcggcgaagctcccgcccgggctcggcctcgtcctcgcgcaagcacacgcccaactttttcagcgagaacagctcaatgagcatcacctcggaggacagcaaagggctccggtcagcggagcccgggcctggggagcccgagggcagaagagcccggggcccgagctgcggcctgctcttccaggggctgagcgtgttgttatccctggcaggagacgtgctggtcagcatgtacagggaggtctgttccatccgcttcctgttcacggctgtgtcgctgctgagcctctttctgtcagcattctggctggggcttctgtacctggtctctcctttggagaatgaacctaaggagatgctgactctaagtgagtaccacgagcgcgtgcgctcccaggggcagcagctgcagcagctccaggccgagctggataaactccacaaggaggtgtccactgttcgggcagccaacagcgagagagtggccaagctcgtgttccagaggctgaatgaggattttgtgcggaagcccgactatgctttgagctctgtgggagcctccatcgacctgcagaagacatcccacgattacgcagacaggaacactgcctacttctggaatcgcttcagcttctggaactacgcacggccgcccacggttatcctggagccccacgtgttccctgggaattgctgggcttttgaaggcgtccaaggccaggtggtgatccaactgccggggccgagtgcacactgagcgacatcactctgcagcatccaccgcccagcgtggagcacaccggaggagccaacagcgccccccgcgatttcgcggtctttttcctcctttcattcttcacccaccagggcctccaggtttatgatgaaactgaagtttccttggggaaattcaccttcgatgttgagaaatcggagattcagactttccacctgcagaatgaccccccagctgcctttcccaaggtgaagatccagattctaagcaactggggccacccccgtttcacgtgcttgtatcgagtccgtgcccacggtgtgcgaacctcagagggggcagagggcagtgcacaggggccccattaaacatgctgatttttggagtagaattgaaaaaaaaaaaaaaaaaaa

SEQ ID NO: 9835 - DNA, 395 bp, Homo sapiens
  SIMILAR (16)..(264): 981254mologous to Homo sapiens dJ1164I10.1 (brefeldin A- inhibited guanine nucleotide-exchange protein 2),accession number AL049537,Smith-Waterman Score=419.
  misc_feature (1)...(395): n = a,t,c or g
cggcaagnggtggagcctgggaagcggctgatcgacagaattgttgaaaccatttgcagttgttttcagggccctcagactgatgaaggggttcagttacaaataattaaggctcttctgactgcagtgacttccccacacattgaaattcatgagggtactatcctgcagacagtgagaacatgttacaatatctatttggccagcaaaaatctcatcaatcaaaccactgccaaggctacccttactcagatgctgaacatgccaggagtgattctggaaaagtaagcacagaaaatggagacgcacccagagaaagaggctcatcactgtcagggactgantgacggagcccaggaggtggtgaaggacatcttggaagatgtagtcacatc

SEQ ID NO: 9836 - DNA, 1701 bp, Homo sapiens
  SIMILAR (352)..(813): 991254mologous to Homo sapiens dJ1164I10.1 (brefeldin A- inhibited guanine nucleotide-exchange protein 2),accession number AL049537,Smith-Waterman Score=790.
atgctgggaacgtcagttgaagacatagcccaattcctgcaccaggaggagcgcctggattccacccaagtaggcgattttctgggagatagcgcaaggttcaacaaggaggtgatgtatgcctacgtggaccaacttgacttctgtgaaaaagaatttgtctcagccctgcggacattcctagaaggtttccgcctacctggagaagcccaaaagattgaccgattaatggagaagtttgccgcaagatacatagaatgcaaccaagggcaaactctgtttgctagtgctgacactgcttatgtcctagcgtattcaattattatgctgactacagacttgcacagtcctcagatcttgaaatgcatcagccagctggagctcgctcagctgataggaaccggtgtgaagacgcgctacctgtctggatctgggcgtgaaagagaagggagcctgaagggccacacattggcaggagaagagttcatgggccttggcctcggtaatttggtgagtggcggagtggataaaagacagatggccagcttccaagaatcggttggtgagaccagctcgcagagtgtggttgtagctgtggacaggatttttactgggtctaccagactggatggaaatgcaatagttgactttgtccgctggctgtgtgctgtgtccatggatgaactggcttccccccaccatcctcgcatgttcagcttgcagaagattgtggagatatcatactacaacatgaatcggatccgactacagtggtctcgaatatggcatgtgattggagatcacttcaataagacaagctgtgaccgtctccgggagctgcatgtgtcagaggttttcaccgtcatcaccgaaacgcgcgagacgaaagggcctcgtgatacgcctatttttatagaaacgctggtgaaagtaaaagatgctgaagatcagttgggtgcacgagtgggttacatcgaactggatctcaacagcggtaagatccttgagagttttcgccccgaagaacgttttccaatgatgagcacttttaaagttctgctatgtggcgcggtattatcccgtattgacgccgggcaagagcaactcggtcgccgcatacactattctcagaatgacttggttgagtactcaccagtcacagaaaagcatcttacggatggcatgacagtaagagaattatgcagtgctgccataaccatgagtgataacactgcggccaacttacttctgacaacgatcggaggaccgaaggagctaaccgcttttttgcacaacatgggggatcatgtaactcgccttgatcgttgggaaccggagctgaatgaagccataccaaacgacgagcgtgacaccacgatgcctgtagcaatggcaacaacgttgcgcaaactattaactggcgaactacttactctagcttcccggcaacaattaatagactggatggaggcggataaagttgcaggaccacttctgcgctcggcccttccggatggctggtttattgctgataaatctggagccggtgagcgtgggtctcgcggtatcattgcagcactggggccagatggtaagccctcccgtatcgtagttatctacacgacggggagtcaggcaactatggatgaacgaaatagacagatcgctgagataggtgcctcactgattaagcattggtaa

SEQ ID NO: 9837 - DNA, 495 bp, Homo sapiens
  SIMILAR (184)..(492): 971254mologous to Homo sapiens dJ1164I10.1 (brefeldin A- inhibited guanine nucleotide-exchange protein 2),accession number AL049537,Smith-Waterman Score=514.
gaatcggatgcacaaggacatcaagtggctgccaggttctcccacgttctgcagaaggatgccttccttgtgttccgctccctgtgcaagctgtccatgaaaccccttggtgaaggccctccagacccaaactccccagtgggccccaccctgccagccgtccccaccaaggccagggtcccgttgctgcccagccaggagctcagcctgaggaagaaaggcctggagtgcctcgtgtccattctcaagtgcatggtggagtggagcaaagacctgtatgtgaatcccaaccaccagaccagcctcggtcaggagaggctcacggatcaggaaataggggatgggaaaggccttgacatggcaagacggtgtagtgtgacgtccatggagtccacagtgtcctcggggacccagacaactgttcaggatgaccctgagcaatttgaggtcatcaagcaacaaaaagaaatcattgaacacggcatcgagctgtga

SEQ ID NO: 9838 - DNA, 3558 bp, Homo sapiens
  SIMILAR (2808)..(2894): 1001254mologous to Homo sapiens cellular apoptosis susceptibility protein,accession number AF053651,Smith-Waterman Score=142.
atgcattatgttttgaattcctcttcaatggaaacctttgtcggggagcaaaactacgaaggttcttcgcggctgtgtgtctgtaagcgcacccgagaagcagacgacccgtcagcgcgcgacagcgtgtgtgagggtgtccgggctcggtttaacatatgcggcatcaaccaaattgtactaaagtgccccatatggggttgtgaaaaccccgcccaaatgggttgtccacctgttggaaaggccgaccggtgcggccttcttgctaattcggccacctgcgaaaaggggatgttctgccacgccgatttagttgggataacgcccacggtttttcccagtcacccacgttgtaaaacgacggccagtgccaagcttgcatgccagcaggatgtggatctggaccgccagtctttaagcagcatagataaaaatccctctgagaggggacagagccagctctctaacccaacagatgacagctggaagggtagaccatacgcaaatcagaaactgtttgccagcctcctcatcaagtgtgtggtccagttggaattgatacagaccattgacaacattgtgttctaccctgcgacgagcaaaaaggaggatgcagagcacatggttgccgcccagcaagacacgctggatgcagatatccacatagagacggaggatcagggcatgtataagtacatgtcttcccagcacctcttcaagctgttggactgtttgcaggaatcccattcattctcaaaggccttcaactccaattacgagcagcggactgtcctgtggcgagcaggttttaagggcaagtctaaacccaatcttctaaaacaagaaaccagcagcctggcctgttgtttgaggatcctgtttcgaatgtatgttgatgagaaccgcagggattcctgggaagaaatacagcagagacttttaactgtttgcagtgaagctcttgcctatttcatcactgtgaattctgagagccatcgggaggcctggacaagtctcttgttgttacttctaactaaaaccctcaaaataaatgatgaaaagttcaaagcacatgcttcaatgtactacccctacttgtgtgaaattatgcagtttgacctgatccctgagctccgagcagttctgcggaagttcttcctacggataggtgttgtgtataagatatggataccagaagagccatcacaggctcgctgtcgcgccattttgccggggtttgaatgtgaggcggagcggcggcaggagcgggtagtgccagctacggtccgcggctggggttccctcctccgtttctgtatccccacgagttcatacaacaaatgcttactaaatatgtactgtgtgccagatcctatagcaatggaactcagcgatgcaaatctgcaaacactaacagaatatttaaagaaaacacttgatcctgatcctgccatccgacgtccagctgagaaatttcttgaatctgttgaaggaaatcagaattatccactgttgcttttgacattactggagaagtcccaggataatgttatcaaagtatgtgcttcagtaacattcaaaaactatattaaaaggaactggagaattgttgaagatgaaccaaacaaaatttgtgaagccgatcgagtggccattaaagccaacatagtgcacttgatgcttagcagcccagagcaaattcagaagcagttaagtgatgcaattagcattattggcagagaagattttccacagaaatggcctgacttgctgacagaaatggtgaatcgctttcagagtggagatttccatgttattaatggagtcctccgtacagcacattcattatttaaaagataccgtcatgaatttaagtcaaacgagttatggactgaaattaagcttgttctggatgcctttgctttgcctttgactaatctttttaagatttgtgataatgccgcactctatgcacaaaagtacgatgaagaattccagcgatacctgcctcgttttgttacagccatctggaatttactagttacaacgggtcaagaggttaaatatgatttgttggtaagtaatgcaattcaatttctggcttcagtttgtgagagacctcattataagaatctatttgaggaccagaacacgctgacaagtatctgtgaaaaggttattgtgcctaacatggaatttagagctgctgatgaagaagcatttgaagataattctgaggagtacataaggagagatttggaaggatctgatattgatactagacgcagggctgcttgtgatctggtacgaggattatgcaagttttttgagggacctgtgacaggaatcttctctggttatgttaattccatgctgcaggaatacgcaaaaaatccatctgtcaactggaaacacaaagatgcagccatctacctagtgacatctttggcatcaaaagcccaaacacagaagcatggaattacacaagcaaatgaacttgtaaacctaactgagttctttgtgaatcacatcctccctgatttaaaatcagctaatgctatcatgagaagtttttctctcctacaagaagccataatcccctacatccctactctcatcactcagcttacacagaagctattagctgttagtaagaacccaagcaaacctcactttaatcactacatgtttgaagcaatatgtttatccataagaataacttgcaaagctaaccctgctgctgttgtaaattttgaggaggctttgtttttggtgtttactgaaatcttacaaaatgatgtgcaagtgaatcagttgaccaatataggaaacaaatcttcattctgctattccagagacttcagaattccaaaacaaccaagtttatcaagagtaagtaaaatcatctggatgttctacagaagtaatgaaagaagaatgtttggaatggttttggaaaaaattattattcctgaaattcagaaggtatctggaaatgtagagaaaaagatctgtgcggttggcataaccaaattactaacagaatgtcccccaatgatggacactgagtataccaaactgtggactccattattacagtctttgattggtctttttgagttacccgaagatgataccattcctgatgaggaacattttattgacatagaagatacaccaggatatcagactgccttctcacagttggcatttgctgggaaaaaagagcatgatcctgtaggtcaaatggtgaataaccccaaaattcacctggcacagtcacttcacaagttgtctaccgcctgtccaggaaggagctgtggcagctctcccgtagaagatggggtttgtattggcgcaccaagatctccaacagccagtgtgtgtttcccatctcttgtaggttccatcaatggcccggccccggccccacccccacccacggtccgaaccacaagttccggctggcactgcggcggagcctgcgctcgcaaggcacgccgggggcccagcgggaggagcgccctgtcccgcctggaccgcagcggcccgtcctga

SEQ ID NO: 9839 - DNA, 4617 bp, Homo sapiens
  SIMILAR (422)..(478): 891254mologous to Homo sapiens dJ155G6.1 (brefeldin A- inhibited guanine nucleotide-exchange protein 2),accession number AL121903,Smith-Waterman Score=93.
atgtttgttttgaaggtaggctgtccatctttgctgttgagagacccacgtcggtcattattacactatacctgtttcacatcagttcctgttcttgttcaggttggctgcaaccctaatgaagatgtggctatctttgctgttgactcattaaggcaactctccatgaagtttcttgagaagggtgaattagccaacttccgtttccagaaagattttctgaggccctttgagcatattatgaagaaaaacaggtctcccaccatccgggacatggcgatccgctgcattgcccagatggtgaactcccaggcggccaacatccgctcagcaactattttccagcaccattttcctgcagccatcgattcctttcaggatgctgtgaagtgcttatcagagttcgcctgcaacgccgcttttccctgacacgagcatggaagcgattcggctcatccgcttctgtggcaattatcttctctgagaggcctcgggtgctactagaatacacaagtgatgacatgaatgtagctcctggtgacagagtctgggtccgaggctggttccccatcttattcgaactctcctgcatcattaatagatgcaagttagatgtacgaacaaggggactcacagtcatgtttgagatcatgaagagctatggccacacctttgaaaagcactggtggcaggacctgttcagaatcgtgtttcggatttttgacaatatgaaactccctgagcaactgtcagagaaatctgagtggatgacaacaacctgcaatcacgcactttatgctatttgtgatggttttacccagttttatgaagctttgaatgaagttcttctttctgatgtatttgcacaattgcagtggtgtgtcaaacaagataatgaacagttggcgcgatcaggtacaaattgcttagaaaacttagtaatatccaatggagagaaattcagtcctgaagtctgggatgaaacctgcaactgtatgttggatattttcaaaacaaccatcccacatgttttgctgacatggagacctgtaggaatggaggaagattcatcagaaaagcatttggatgtggatctggaccgccagtctttaagcagcatagataaaaatccctctgagaggggacagagccagctctctaacccaacagatgacagctggaagggtagaccatacgcaaatcagaaactgtttgccagcctcctcatcaagtgtgtggtccagttggaattgatacagaccattgacaacattgtgttctaccctgcgacgagcaaaaaggaggatgcagagcacatggttgccgcccagcaagacacgctggatgcagatatccacatagagacggaggatcagggcatgtataagtacatgtcttcccagcacctcttcaagctgttggactgtttgcaggaatcccattcattctcaaaggccttcaactccaattacgagcagcggactgtcctgtggcgagcaggttttaagggcaagtctaaacccaatcttctaaaacaagaaaccagcagcctggcctgttgtttgaggatcctgtttcgaatgtatgttgatgagaaccgcagggattcctgggaagaaatacagcagagacttttaactgtttgcagtgaagctcttgcctatttcatcactgtgaattctgagagccatcgggaggcctggacaagtctcttgttgttacttctaactaaaaccctcaaaataaatgatgaaaagttcaaagcacatgcttcaatgtactacccctacttgtgtgaaattatgcagtttgacctgatccctgagctccgagcagttctgcggaagttcttcctacggataggtgttgtgtataagatatggataccagaagagccatcacaggctcgctgtcgcgccattttgccggggtttgaatgtgaggcggagcggcggcaggagcgggtagtgccagctacggtccgcggctggggttccctcctccgtttctgtatccccacgagttcatacaacaaatgcttactaaatatgtactgtgtgccagatcctatagcaatggaactcagcgatgcaaatctgcaaacactaacagaatatttaaagaaaacacttgatcctgatcctgccatccgacgtccagctgagaaatttcttgaatctgttgaaggaaatcagaattatccactgttgcttttgacattactggagaagtcccaggataatgttatcaaagtatgtgcttcagtaacattcaaaaactatattaaaaggaactggagaattgttgaagatgaaccaaacaaaatttgtgaagccgatcgagtggccattaaagccaacatagtgcacttgatgcttagcagcccagagcaaattcagaagcagttaagtgatgcaattagcattattggcagagaagattttccacagaaatggcctgacttgctgacagaaatggtgaatcgctttcagagtggagatttccatgttattaatggagtcctccgtacagcacattcattatttaaaagataccgtcatgaatttaagtcaaacgagttatggactgaaattaagcttgttctggatgcctttgctttgcctttgactaatctttttaagatttgtgataatgccgcactctatgcacaaaagtacgatgaagaattccagcgatacctgcctcgttttgttacagccatctggaatttactagttacaacgggtcaagaggttaaatatgatttgttggtaagtaatgcaattcaatttctggcttcagtttgtgagagacctcattataagaatctatttgaggaccagaacacgctgacaagtatctgtgaaaaggttattgtgcctaacatggaatttagagctgctgatgaagaagcatttgaagataattctgaggagtacataaggagagatttggaaggatctgatattgatactagacgcagggctgcttgtgatctggtacgaggattatgcaagttttttgagggacctgtgacaggaatcttctctggttatgttaattccatgctgcaggaatacgcaaaaaatccatctgtcaactggaaacacaaagatgcagccatctacctagtgacatctttggcatcaaaagcccaaacacagaaggacacaggggagacagagcgggggaaagagaaacggggaaccgcgagaacggagaagcgaaccaacaaaacccaaaacccaccagcccaaaaaggcggacgagacgcaaaacacgcaaacgggggaacgaaaggaagaaaaacagaggcggcaaacaaacgcaaaagaaagccaaacacgaaacaaggcgaggaaaaggtggggggggggaacgacgcgagaggggaacacgaagacgaaaaaagagggagagggacgcgcgcgaagcgaaaacgacggcaggaagaaggggaggcgaggcaaacaaacaacgcaaaacaggagagagaaaggagggggaacaaaacgcaagggggcgaaccgaaccgaaagaaaaagaggaaaacggacgaagcgggaaagcagagggaaagaaggagaggaggacaggcgccggaaatcccaggcgctcaggaggcagagacagaagaacagcttgagcctgacaggctcacggatcaggaaataggggatggcaaaggccttgacatggcaagacggtgtagtgtgacgtccatggagtccacagtgtcctcggggacccagacaactgttcaggatgaccctgagcaatttgaggtcatcaagcaacaaaaagaaatcattgaacacggcatcgagctgcttggcactgctgcaccaccaaaggcaaacttcattgaagctgacaagtattttcttccattcgagctagcttgccagtccaagtccccaagggtagtcagcacatcccttgactgcttgcagaaactcatcgcatacgggcacatcactggcaacgcccctgacagtggagcccctgggaagcggctgatcgacagaattgttgaaaccatttgcagttgttttcagggccctcagactgatgaaggggttcagttacaaataattaaggctcttctgactgcagtgacttccccacacaaaagaaattcatgagggtactatcctgcagacagtgagaacatgttacaatatctatttggccagcaaaaatctcatcaatcaaaccactgccaaggctacccttactcagatgctgaacgtcattttcacccgcatggaaaaccaagtgttgcaggaggccagagaactggaaaaaccaatccagtcaaaaccccagtcccctgtgatccaagctgcagcagtatccccaaagttcgttcgtttgaagcacagtcaggcacaaagcaaaccaacaactcccgaaaaaacagatttaaccaacggtgaacatgccaggagtgattctggaaaagtaagcacagaaaatggagacgcacccagagaaagaggctcatcactgtcagacatgttactttcctgcttactgtgtagtaacaacagtggtccaagtgtgatggcacctcgcatttggccccaagggaagggagtcgattgggagtggtga

SEQ ID NO: 9840 - DNA, 5983 bp, Homo sapiens
  SIMILAR (241)..(5460): 991254mologous to Homo sapiens brefeldin A-inhibited guanine nucleotide-exchange protein 2,accession number AF084521,Smith- Waterman Score=8990.
atgcaggagagccagaccaagagcatgttcgtgtcccgggccctggagaagatcctagccgacaaggaggtgaagcggccccagcactcccagctgcgcagggcctgccaggtggcgctcgcctggaaattgttgctaattgccccattggcagttgggaaggcaacgcctgttaagatgtggagcaataaagtggagcagctaactgtcatgaacatgcattctgcagaacaagaaacagatgaaattaaagcagaaatagaaaagcagaggcttggcactgctgcaccaccaaaggcaaacttcattgaagctgacaagtattttcttccattcgagctagcttgccagtccaagtccccaagggtagtcagcacatcccttgactgcttgcagaaactcatcgcatacgggcacatcactggcaacgcccctgacagtggagcccctgggaagcggctgatcgacagaattgttgaaaccatttgcagttgttttcagggccctcagactgatgaaggggttcagttacaaataattaaggctcttctgactgcagtgacttccccacacattgaaattcatgagggtactatcctgcagacagtgagaacatgttacaatatctatttggccagcaaaaatctcatcaatcaaaccactgccaaggctacccttactcagatgctgaacgtcattttcacccgcatggaaaaccaagtgttgcaggaggccagagaactggaaaaaccaatccagtcaaaaccccagtcccctgtgatccaagctgcagcagtatccccaaagttcgttcgtttgaagcacagtcaggcacaaagcaaaccaacaactcccgaaaaaacagatttaaccaacggtgaacatgccaggagtgattctggaaaagtaagcacagaaaatggagacgcacccagagaaagaggctcatcactgtcagggactgatgacggagcccaggaggtggtgaaggacatcttggaagatgtagtcacatctgccattaaagaagcagcggaaaagcatggtctgacagaacctgagagagttctaggtgaactggagtgccaggaatgtgctattcccccaggagttgatgaaaactcacagaccaacgggatagccgatgacaggcagtccttgtcgtcagcagataatctggaatcggatgcacaaggacatcaagtggctgccaggttctcccacgttctgcagaaggatgccttccttgtgttccgctccctgtgcaagctgtccatgaaaccccttggtgaaggccctccagacccaaaatcccatgagctgcgttccaaggtggtttccctgcagctgctcctctctgtgttgcaaaatgctggccccgtattcaggactcacgagatgttcatcaatgcaatcaagcaatatctctgtgtggccttgtccaaaaacggcgtctcttcagtgcctgatgtctttgagctctctcttgccatttttcttactcttctttcaaactttaaaatgcacttgaaaatgcagatagaggtctttttcaaagagattttcctgaacattttagaaacatcaacaagttcttttgagcacaggtggatggtcattcagactctgacgaggatctgtgcagatgcccagtgtgttgtggatatttatgtcaactacgactgtgatttaaatgctgctaacatttttgagcgccttgtaaatgatttatccaaaattgctcagggaagaagtggacatgagctgggaatgacacctctgcaggagctcagcctgaggaagaaaggcctggagtgcctcgtgtccattctcaagtgcatggtggagtggagcaaagacctgtatgtgaatcccaaccaccagaccagcctcggtcaggagaggctcacggatcaggaaataggggatgggaaaggccttgacatggcaagacggtgtagtgtgacgtccatggagtccacagtgtcctcggggacccagacaactgttcaggatgaccctgagcaatttgaggtcatcaagcaacaaaaagaaatcattgaacacggcatcgagctgttcaacaagaaacccaagagggggatccagtttctccaggagcagggcatgctgggaacgtcagttgaagacatagcccaattcctgcaccaggaggagcgcctggattccacccaagtaggcgattttctgggagatagcgcaaggttcaacaaggaggtgatgtatgcctacgtggaccaacttgacttctgtgaaaaagaatttgtctcagccctgcggacattcctagaaggtttccgcctacctggagaagcccaaaagattgaccgattaatggagaagtttgccgcaagatacatagaatgcaaccaagggcaaactctgtttgctagtgctgacactgcttatgtcctagcgtattcaattattatgctgactacagacttgcacagtcctcaggtaaaaaataaaatgacgaaagagcagtatattaaaatgaatcggggtatcaatgatagtaaagatctgccagaagagtatctctcaagcatctatgaagagatagaaggcaagaaaattgcaatgaaagaaacaaaagagctaacgattgcaaccaaatctactaagcagaatgtagctagtgaaaagcagcggcggctgctgtacaacttagagatggagcaaatggctaaaacagccaaagctctgatggaggctgtgagccatgccaaagccccgtttaccagtgccactcacctggaccatgtccggccaatgttcaaactggtgtggacgccactattggcagcctacagcatcggactccagaactgtgatgacactgaagtggcctccttgtgtttggaaggcatccgatgtgcaatccgaatcgcctgcatctttggaatgcagctggaacgagatgcctatgttcaggctcttgctcgcttctccctactcacagccagctccagcatcacaaaaatgaagcagaaaaacatcgacaccattaagacgcttatcacagtggctcacaccgatggcaactaccttgggaattcctggcatgagatcttgaaatgcatcagccagctggagctcgctcagctgataggaaccggtgtgaagacgcgctacctgtctggatctgggcgtgaaagagaagggagcctgaagggccacacattggcaggagaagagttcatgggccttggcctcggtaatttggtgagtggcggagtgaataaaagacagatggccagcttccaagaatcggttggtgagaccagctcgcagagtgtggttgtagctgtggacaggatttttactgggtctaccagactggatggaaatgcaatagttgactttgtccgctggctgtgtgctgtgtccatggatgaactggcttccccccaccatcctcgcatgttcagcttgcagaagattgtggagatatcatactacaacatgaatcggatccgactacagtggtctcgaatatggcatgtgattggagatcacttcaataaggttggctgcaaccctaatgaagatgtggctatctttgctgttgactcattaaggcaactctccatgaagtttcttgagaagggtgaattagccaacttccgtttccagaaagattttctgaggccctttgagcatattatgaagaaaaacaggtctcccaccatccgggacatggcgatccgctgcattgcccagatggtgaactcccaggcggccaacatccgctcaggctggaagaacatctttgccgtgttccaccaggcagcctctgatcatgatgggaacattgtggagctggccttccagaccacttgccacattgtcacaactattttccagcaccattttcctgcagccatcgattcctttcaggatgctgtgaagtgcttatcagagttcgcctgcaacgccgctttccctgacacgagcatggaagcgattcggctcatccgcttctgtggcaaatacgtctctgagaggcctcgggtgctacaagaatacacaagtgatgacatgaatgtagctcctggtgacagagtctgggtccgaggctggttccccatcttattcgaactctcctgcatcattaatagatgcaagttagatgtacgaacaaggggactcacagtcatgtttgagatcatgaagagctatggccacacctttgaaaagcactggtggcaggacctgttcagaatcgtgtttcggatttttgacaatatgaaactccctgagcaactgtcagagaaatctgagtggatgacaacaacctgcaatcacgcactttatgctatttgtgatgtttttacccagttttatgaagctttgaatgaagttcttctttctgatgtatttgcacaattgcagtggtgtgtcaaacaagataatgaacagttggcgcgatcaggtacaaattgcttagaaaacttagtaatatccaatggagagaaattcagtcctgaagtctgggatgaaacctgcaactgtatgttggatattttcaaaacaaccatcccacatgttttgctgacatggagacctgtaggaatggaggaagattcatcagaaaagcatttggatgtggatctggaccgccagtctttaagcagcatagataaaaatccctctgagaggggacagagccagctctctaacccaacagatgacagctggaagggtagaccatacgcaaatcagaaactgtttgccagcctcctcatcaagtgtgtggtccagttggaattgatacagaccattgacaacattgtgttctaccctgcgacgagcaaaaaggaggatgcagagcacatggttgccgcccagcaagacacgctggatgcagatatccacatagagacggaggatcagggcatgtataagtacatgtcttcccagcacctcttcaagctgttggactgtttgcaggaatcccattcattctcaaaggccttcaactccaattacgagcagcggactgtcctgtggcgagcaggttttaagggcaagtctaaacccaatcttctaaaacaagaaaccagcagcctggcctgttgtttgaggatcctgtttcgaatgtatgttgatgagaaccgcagggattcctgggaagaaatacagcagagacttttaactgtttgcagtgaagctcttgcctatttcatcactgtgaattctgagagccatcgggaggcctggacaagtctcttgttgttacttctaactaaaaccctcaaaataaatgatgaaaagttcaaagcacatgcttcaatgtactacccctacttgtgtgaaattatgcagtttgacctgatccctgagctccgagcagttctgcggaagttcttcctacggataagtgttgtgtataagatatggataccagaagagccatcacaggtacccagcagcactgtcaccagtgtggtagccctggctgcccaggccagtgctgcagctctgcgaaaatgttcagcatgccatttctgactggcacatctcgtgaagtttcatagaaacaaggagttggcatcttggatctcagaatggcctggaaacggatggcctctacgctgttccatcacagtctccaacctaaggcttatggtatttcattaaactgttgcatacccagttagcacagtaggtggggagtctgcttcatttctatcattccatttttctgattaaactgtcaaatctgtcattgcatatgccatcgttttctagcaaaatcccatgattggctataaacgttttgtaagaagtcactctccttgaaaatactgaacatagctgtataggtttgtgattattagagaatatgttaataaaacttcttgtaacggctaactgccacctaaaatatgctgggttttctgttgtttgagtgtgttagagaaatttgaatgtttttgtcagttacgagtcagcc

SEQ ID NO: 9841 - DNA, 782 bp, Homo sapiens
  SIMILAR (332)..(255): 501254mologous to Gallus gallus collagen type III,accession number X00822,Smith-Waterman Score=48.
cactggctgggaaggcagggctgaggccgaggttccccaggacgacaggagggagccaaggcactctaagaggtggaagaagaggaccagaagctggtgagtgcatcactggagcccataggagggctcctgactgtcctcaaaagcctcagacctcagtgtccactttctccatccaagaaatggggctgtgatctctgcttatgacagcacaagcttgcacagaagtggaggcgggaaataagcacaagtgtgccttcccagcccggcctgggtccaggcagaacagctgatactggccccagtctgcccacccacccctgctggccaggaggctggcagaaccccagccccacctgcctggagcgcgtttgatttggactcgactgttgtaaagatggagaaaggctggatctgtagctaaaaatacactcggagccaagccagctgctcagagcttcctcgtaggctgggccgcgctgggcccactgaggaactgggcatgcccacccaggaggtagcgcccttacctgctagaggttgagggcctgagtcactcccccttccagtcgccaggaattccttagtgggaggactgtcagagtcaaactaggcctgcccctgccgttgacagaaggaaagattgtccttccagggggtgaaggtgggtcgccccatgtttgtcccagtccctggattatagaaaggcggacggcggatcagggcgttgtggcagaataatgtaactggccgattgcacaccagcgtgcgtcagctggcgt

SEQ ID NO: 9842 - DNA, 1807 bp, Homo sapiens
  SIMILAR (384)..(1556): 301254mologous to Herpesvirus papio NTR,accession number AF200364,Smith-Waterman Score=266.
  misc_feature (1)...(1807): n = a,t,c or g
atgcccagttcctcagtgggcccagcgcggcccagcctccgaggaagctctgagcagctggcttggctccgaggtatttttagctacagatccagcccccctccatcaccacaacagtcgagtccaaatcaaacgcgctccaggcagcactacgccccatcggtgttcgagaagtacacggccagcgtgaccgttggcagcaaggaggtgaccctgaacctctacgacacggccgccttggcagggccttggccggctcttcactcctggaggccgctcaggggcgctggctgcggggccctagaggccaagccctatacaaagcagtgggctgctcttgggcctcccatggttccaggattgctgcgctacctgctgtggtctctgcagactctggccaccccgggccaacggccaagggaaggcccccacgcgcacacgccccgggcagaggccacggcaggccaagagccagcccgggacccaaagggctcggcaaggaaccccgaaccccaacgcccgcgggggaaaggggtccgggcagcacccaagcagggggtcaggggcatgagcatcccagcacagccccacgcctccacccgggcaggctcggagcggcgttcggaagcagcgccgcctgctgtcctccttcactggcagctgtgacagtgacctgctcaagttcaaccagctcaagttccggaagaaaaagctcaagttctgcaagagccacattcacgactggggcttgttcgccatggagccctcgggggatcctctagagtcagcctggattcatgcacgaaacgcacccacaaccacaccaagccaaactccccacccccccccgcgggaggccggcaacccgaacccgcccccccgggcccccgaggcgcgcggccccgggcacgacaaggcggcacaaaaggcctgcgtccacggaggccccaacacacagcatccccgcccgcagccggagcccgctgtccccccggccgcgctcgctcctcctcccaaacaccagctttcttcacaggcttcgagcccgtcgcggctgggccgggctgcagagagaccccacaaaacacagcaacgtcaaacgccaacacacaccgggccccgcgccgccgccaccgccgaacacgcaccacaagcgctcccccccccggcccccgcgccccactacaaccgcacccgacccgcccagctccgaaacccccccacccccaagaagggcagcgaagagccagcccagccaacgaagcacacccccgcgacgcccgccaagcgggaccccaagggcggaggtgcgcgccgccggccggcgcggcctctgcagccgcacagcggcggggaggaggacgagaaggagtcagngcaggcgtcctcgtcctcatccgcgtcatcatccacggggtcctcaaccacctcaccctcgtcccgcgcctccgacaaggaggaggaacaggagagccccgaggaggaagaggaggcggaggaggaggaggaggaggaagtccccaggagccagctctcctcctcctcaacctcatccacatcagataaggatgacgacgatgacgacagtgatgaccgggacgagtctgagaacgatcacgaggacacagccctgtcagaggcgagtgagaaggacgaaggggactcgggctctgctgtggtcttgggattctgtgggcggtcgctgctgccctctggtggtcagaccgtgccttgcttgcactgtgagaaccttgaccatggaactgccaggttggcggttttcctccacgaagtgaggtttacatga

SEQ ID NO: 9843 - DNA, 2076 bp, Homo sapiens
  SIMILAR (1477)..(1593): 871254mologous to Homo sapiens nonmuscle myosin heavy chain- A,accession number M69180,Smith-Waterman Score=185.
ctacgaggaattatgctgtggcaacgaggcatgaatcaggacagagggatgtcctattttacagacggcccagaagcaaagaagggtcttgcttcctggtccactacaactgcctagttgagccgtgacagcacggattactggttcctcacaacgaccatgggaagcgtagatggacttgctgattccccggctgggtgaactgaggtgccccacctggtcaaacttgcgctgcttcttctccagagtgctcacaagctgccgctgctgctccaggtccatggtggcgtcgtccagctcctgctgcagtcgactctgcctgttggccaccaatctggagcctcccatacaattttctactcctttgaaaagaaaaggctcatccatcttcacaaccaggttctccactttcaacagccatggcacggaagacattgaactaatactctgggcctgggcagtctgcagtgtcacaggccacgcccgttccctggcagctgcctcctcctccagctgctcacgcagcccggctgcctcagcctccatggctcgcacccgggaccccaaggccaatttcgccctggtctcctcctgcagcagctcctgggcatcgtgcagctgggcttctgtgctgctcagctccttgctaagacggatggttttggactcagcctcgttcagcgccccagacacattctccagttcagcctgtgaaagttctgaaagctttgtccctgcttgtaccatttcttccacacgaatgtccaaaggcatgcaccatttgtggcgaacccatttctgttgactcacatccagatttccaccaaacatcctgccatcgtaggaacaacggagctcctgctgtgcgttggtggagtccagcgtgtcctccagctcgccccgcagcgcctccagctcctcgcccaggtcccggcgctgcttctccgccttggtcctggccacacgctcagactccaggtcctcctgggcctcggccagggctgcttgagcctcccgcagggatttcagcagctgggcccgggccccaccctcgtcttctgcccgctgccggaactcctggaagaggatgcggttggggaagccctggcgacagatgcggatgccctccaggaccccgttgcagcgaagctggtccagcaccagccgtggctccagcttcccggccttggtaaacagccgccaccactgccagtgtctcagcttgaggtaggccgcgcagttccgctgcatcaccctcagggcgctctgctgctgctggcgcttctggaaggcctgcagtctctgcttcccagagttcacagcccattcctccatgacacatttcgcaggcaccgtcccgtgcctgcgtccctgcagctgaactccttcgagcagctctgcataactacaccacagaagctgcagcagctcttcaaccacaccatgttcgtgtctccccctgctgtcaatgtccaggccaaccccgctggactcctggccctgctggatgaggagtgctggttcccgaaggccacagacaagtcgtttgtggagaaggtagcccaggagcagggcggccaccccaagttccaagcggccgaggcacctgcgggatcaggccgacttcagtgttctccactacgcgggcaaggtcgactacaaggccaacgagtggctgatgaaaaacatggaccctctgaatgacaacgtcgcagccttgctccaccagagcacagaccggctgacggcagagatctggaaagacgtggagggcatcgtggggctggaacaggtgagcagcctgggcgacggcccaccaggtggccgcccccgtcggggtatgttccggacagtgggacagctctacaaggagtccctgagccgcctcatggccacactcagcaacaccaaccccagttttgtccggtgcattgtccccaaccacgagaagagggccgggaagctggagccacggctggtgctggaccagcttcgctgcaacggggtcctggagggcatccgcatctgtcgccagggcttccccaaccgcatcctcttccaggagttccggcagcg

SEQ ID NO: 9844 - DNA, 536 bp, Homo sapiens
  SIMILAR (89)..(256): 981254mologous to Homo sapiens Q1Z 7F5,accession number M81806,Smith-Waterman Score=282.
tgttggttgtatgggttgctctaagggaccttggagacaggcctttcaggtggatgttcatgtttctgaccttgcactaccccaatgtaggctccaaacaggcatgcgaggtgcctttggaaagccccagggcactgtggccagggttcacattggccaagttatcatgtccatccgcaccaagctgcagaacaaggagcatgtgattgaggccctgcgcagggccaagttcaagtttcctggccgccagaaggtatgtagtgctgcagcccccttctcccacctttgccccaggcctcctgactcagttctttccattgctccttagatccacatctcaaagaagtggggcttcaccaagttcaatgctgatgaatttgaagacatggtggctgaaaagcggctcatcccagatggctgtggggtcaagtacatccccagtcgtggccctctggacaagtggcgggccctgcactcatgagggcttccaatgtgctgcccccctcttaatactcaccaataaattctacttcctg

SEQ ID NO: 9845 - DNA, 544 bp, Homo sapiens
  SIMILAR (1)..(225): 731254mologous to Homo sapiens Q1Z 7F5,accession number M81806,Smith-Waterman Score=293.
tcagatgaatatgatcaactctgctctgaagccctggtgggggcccaaatttgtgccaagaagtacatagtaaaatgctgcggcaaaaatggctttcatatccgagtgcggctgcaccccttccacgtcatctgcatcaacaggatgttggcctgtgctgggactgacaggctccaaacaggtatgggaggtgccattggaaagcccgcaaggcactgtggccaggattctcattggccaagttatcatgtccattcgcaccaagctgcagaacaaggagcatgtgattgaggccctgcgcagggccaagttcaagtttcctggccgccagaagatccacatctcaaagaagtggggcttcaccaagttcaatgctgatgaatttgaagacatggtggctgaaaagcggctcatcccagatggctgtggggtcaagtacatccccagtcgtggccctctggacaagtggcgggccctgcactcatgagggcttccaatgtgctgcccccctcttaatactcaccaataaattctacttcctgtc

SEQ ID NO: 9846 - DNA, 465 bp, Homo sapiens
agtttattcaattagtcatctattgctgaacaattcagttgtgtagtctttagctattataattcgttgctggaccttctttctgtatctttagcggtagcaaatctctgctactgggaggtttgatgaatgattctgcaaattaaggaagtgatcatggtgaacaatatggtttatgagaccttcaagatagtaatcttatacggcccttaagtactgaccctgatttctttttctggctcatatggtgttgagggtaaattacaagagggagctgaaaagttctgagcaaaagatctgatggaggagccctgcagacactgctaatggccttcgtagcatccatctctttcttgctcactgccagaaccctgcctcttgtacagggcagcaacattttcaaccgaaactactcccagcctcccagggatggccaggtaacacagtccgaattccaccgcagtg

SEQ ID NO: 9847 - DNA, 3054 bp, Homo sapiens
  SIMILAR (1419)..(1463): 461254mologous to Homo sapiens dJ620E11.1 (novel Helicase C- terminal domain and SNF2 N-terminal domains containing protein, similar to KIAA0308),accession number AL031667,Smith-Waterman Score =43.
gtcctacttacattgtaaatgggccacaatggaagagctcgaaaaggatcctcgcatcgcacagaagatcaagcgatttaggaataaacaagcccagatgaagcacatttttacggagcctgatgaagacttgttcaatccagactatgtagaagttgatcgcatcttggaggtggcccacaccaaggatgcagaaacaggggaggaggtaacacattacctggtgaagtggtgctcactaccatatgaagaaagcacgtgggagctagaggaagatgtagatcctgcaaaagttaaagaatttgaatctcttcaagttctccctgaaattaagcatgtggagcggcctgcttcagactcctggcagaaacttgagaagtctcgcgagtataagaacagtaaccagctccgggagtaccagctggaagggatgaactggcttctttttaactggtataacagaaaaaactgtattttggctgatgagatgggcctagggaaaaccatccagtccatcacattcctttcagaaatatttctgagaggaatccacggcccttttctcattatcgcccctctctccaccatcactaactgggagcgggagttccggacatggacagagatgaatgccattgtgtaccacggcagccagatcagcaggcagatgatccagcagtatgaaatggtgtacagagacgcccagggaaaccccctttcaggagtcttcaagttccacgtcgtcatcacaacatttgaaatgatcctagcagactgcccagagttgaagaagattcactggagctgtgtgataattgatgaagcccacagactgaagaataggaactgcaaacttctggagggtctaaagcttatggccctggaacataaagtgcttctcactggaacacccttgcagaactctgtggaggagctcttcagtttgttaaattttctggagccatcacagtttccttcagagaccgctttcttggaggaatttggagatctgaaaacagaggagcaggtaaagaaactgcagtctatcctaaaaccaatgatgcttcggcggctgaaagatgatgtggaaaagaaccttgctcccaaacaagagacgatcattgaggtggaactgaccaatatccagaaaaagtactaccgtgccatcctcgagaagaacttttccttcctgaccaagggggcaaatcagcacaacatgcccaatctcatcaacaccatgatggagctgaggaagtgctgtaaccatccctacctgatcaatggtgcagaggagaaaattctagaagatttccgaaaaacccacagccctgatgcccctgactttcagctgcagggtgatgattcaggcaggcaggaaagcttgtgttgattgataaactactccctaagctgattgcaggtggccacaaagtactcatcttctcccagatggtgcgctgcctcgacatcctagaagattacctcatccagagaaggtacacctatgagcgaattgatgggcgagtacggggaaacctgcgccaggcagccatcgaccggttctgtaagccagattcagaccgctttgtctttcttctgtgcaccagagcgggaggcctggggatcaatctcacagctgctgatacctgcatcatatttgattctgactggaacccacaaaatgacttgcaggtccctgaaggcagaattcagaaagtgtgggagcagatgtcctggccaagagcacagccacaagataatgcagctgctgcatgtctgcaggattttggaagtcagttgggagtccagagtgaggagacaggccctttccacaatcgccagaagcaggactcaggaaactcccacactgctccgaggggaagagaatcattcatcaaacctcccagtagcagagatttgctaccgctaaagatacagaaagaaggtccagcaacgaattataatagctaaccgaaagacgctgatgacacatcaatctacatgttttatcaaaaggtcggcgacaactcaatcgacagctggaaaaacgcgggccgtgtctttaaagacagcgataagttcgacgccaacgatccgatcctgaaagatcagacgcaagaatggtccggttctgcaacctttacatctgacggaaaaatccgtttattctacactgactattccggtaaacattacggcaaacaaagcctgacaacagcgcaggtaaatgtgtcaaaatctgatgacacactcaaaatcaacggagtggaagatcacaaaacgatttttgacggagacggaaaaacatatcagaacgttcagcagtttatcgatgaaggcaattatacatccggcgacaaccatacgctgagagaccctcactacgttgaagacaaaggccataaataccttgtattcgaagccaacacgggaacagaaaacggataccaaggcgaagaatctttatttaacaaagcgtactacggcggcggcacgaacttcttccgtaaagaaagccagaagcttcagcagagcgctaaaaaacgcgatgctgagttagcgaacggcgccctcggtatcatagagttaaataatgattacacattgaaaaaagtaatgaagccgctgatcacttcaaacacggtaactgatgaaatcgagcgcgcgaatgttttcaaaatgaacggcaaatggtacttgttcactgattcacgcggttcaaaaatgacgatcgatggtattaactcaaacgatatttacatgcttggttatgtatcaaactctttaaccggcccttacaagccgctgaacaaaacagggcttgtgctgcaaatgggtcttgatccaaacgatgtgacattcacttactctcacttcgcagtgccgcaagccaaaggcaacaatgtggttatcacaagctacatgacaaacagaggcttcttcgaggataaaaaggcaacatttgcgccaagcttcttaatgaacatcaaaggcaataaaacatccgttgtcaaaaacagcatcctggagcaaggacagctgacagtcaactaa

SEQ ID NO: 9848 - DNA, 402 bp, Homo sapiens
  SIMILAR (229)..(369): 361254mologous to Homo sapiens Amino acid sequence of a human secreted protein,accession number Y19467,Smith-Waterman Score=62.
caagtgcagagctctttgctccaggagtgaggagactgggaggtgaaatggggaaatggaagggtttggaggcagagctgaaaacagggttggaaggatttcctgaattagaagacaaacgttagcatacccagtaaggaaaatgagtgcaggggccaggggaacccgtgaggatcactctcaaatgagattaaaaacaaggaagcagagaatggtcagagaatgggattcagattgggaacttgtggggatgagagtgaccaggttgaactgggaagtggaaaaaggagtttgagtcactggcacctagaagcctgcccacgattcctaggaaggctggcagacaccctggaaccctggggagctactggcaaaattttctggaatggggccggatttttg

SEQ ID NO: 9849 - DNA, 1713 bp, Homo sapiens
  SIMILAR (151)..(315): 1001254mologous to Homo sapiens dermatopontin,accession number Z22865,Smith-Waterman Score=312.
atgtttgagaaagctgccagacaggagtggatccaggtcgcaaaaagtgtcaccagagtggctatgagttcctacacctttcagaagaacccagacttaataagcgttggtgaggatgtggagaagaaattggagctctcatacgctgctgtcaccatggcctggggccagtatggcgattatggatacccataccagcagtatcatgactacagcgatgatgggtgggtgaatttgaaccggcaaggcttcagctaccagtgtccccaggggcaggtgatagtggccgtgaggagcatcttcagcaagaaggaagctgactctgtcagcagagccagtgccacaggaccagattcagggcagttcttcctcctggagagggtggggacctgcaagaccacagcagaagcccagccccagagggatgatccctacttggttaccaggactgtggaggggctcagccggactgtagaaggggtggggagaggactcacacaggcagcagcaggtgagggtgccggggctgtggaggctgcttggacagcctttgtgggccattctcatccacccccatggcctctgatgaggaaactgaggctattagagggcacgaaacccgcccagatgatacagctaagaacagtggagccatccagcagcatagccaatgctcttggccactctactatctgctccccacagtgtgaaaaggtaccagacgtgctccaacaatgggctggtggcaggattccagagccgctacttcgagtcagtgctggatcgggagtggcagttttactgttgtcgctacagcaagaggtgcccatattcctgctggtgagtctggcagccgaccaaaccctcatgactcctggggtgggagaggcacctaggaagtgctctagcttcagaaaaggaaacagaaccatagagccggcactgactggcccaaagtcacccacctactctgtgggaatgccaagtcttaagcttaggcctaatgactcccatcccagtgctgttctccttctccccaacttctggctaacaacagaatatccaggtcactatggtgaggaaatggacatgatttcctacaattatgattactatatccgaggagcaacaaccactttctctgcagtggaaaggaaagaagagagaagagaaagaaaagggattggagataagaaacacacagaacctactgtcttagtctgggctgctataccacattaccttagactgggtaacttacgaacaatagaaatttattttcacagttctggaagctggaaagtccaagatcaagtggacccagaagaagagccagccaggcaaaaccacagggatcgcgtaccttgccatacaccccctctaggtggtcaagaaggtgactctcagccagtggtgatgagagcaaaggatcactatgagctggagaaacagaaggcattaggacaggtagaagatgaagaagacttatgccagcagcagagactgcctgagcaaacctatggaagtgaggaggctcctcaagaagccaagaaaaaccttgggtctcctgaacccaattctcaggctggagcccagaagccaatctctatggccaccaacagagctgtctttgatgttacgtgcaacttcagtccacactggcttcagtgccttcagagcaggtctctatctcctgaagatccaggtctttga

SEQ ID NO: 9850 - DNA, 1808 bp, Homo sapiens
  SIMILAR (1460)..(1254): 461254mologous to Homo sapiens dJ797M17.1 (Dermatopontin),accession number AL049798,Smith-Waterman Score=119.
  misc_feature (1)...(1808): n = a,t,c or g
aaaaaatatacgtcgccagcccgcggtagtaaactttgatcctttaaaacggcccccccnnnnnnnnnnnnnncagcatagtgaacgttaatatttttatttcttttgtaatgaagagtacaaatggttgggagcaggacatcacaggaggaggaaagatagcgccatctctgtcagaagaactcctgagccacacacaggaaggaaagttgatccccaggggcagcctttcccaccaaaaaaatcagggcccaatccagggagagtttgccagtagctccccagggttccagggtgtctgccagccttcctaaggaatcgtgggcaggcttctaggtgccagtgacttcaaactccttttttccacttcccaagttcaacctggtcactctcatccccacaagttcccaatcttgaatccccattctcttgaccattgttgggctgcctagtctctcatcacataaaagactgctcgttctaagagatatgtacgtggcctaggcactcatttgtcctcctgaggtatgctagcgtttgtcttctaattcaaggaaatccttccaaccctgttttcaagctctgcctccaaacccttccatttccccatttcaccctcccagtctcctcactcctgggagcaaagcagctctgcacttgggattggctaagcatgcatgggctcaagtgggagcaggggagtgggaagatgtccctcagggcagaaagcttgcttttgggtggggaacctacgtatcattcatacaggcttagctgtagagaaccttcactgcacctctcctccagttctgcctctcccctccactatgcttgaacttgcagttcattctgcagtaaaaagcagtagccaggctgcagctggtgctcccagaagcccggctgtaagcatgcgcactgtatatgtggtgtgcaaggaagccatcatcagtcatataaagcagttgcttatgaaacatgtgaaaagtgagaaacatggtttaattgtggattttattagaagtgtgatactagtcagaaaggcccaggaagttggcattgcagttaccagctcagggagaaggaaagagagcagcagaaacttctataggagatccaactgatgttaacatatgtggacaccctcctgtcccctggcccctttcctttcacccagatttggtatgtggcaaatctaaacatttgcaaattcacagtcgtattcagtcatccggcacattatgaacttccactgggcgatccctttccactgcagagaaagtgggttgttgctcctcggatatagtaatcataattgtaggaaatcatgtccatttcctcaccaaaatgacctgaaatattctggttgttaggccagcaggaatatgggcacctctttgctgtaggcgacaacagtaaaactgccactcccgatccagcactgactcgaagtagcggctctgggaatcctgccaccagcccattgttggagcacgttctggtaccattccatgccagccctgttgatctcctcccaccagcactccgtgggggttccccgaggctctgtggcgtgggcatgcaggcgtagttccattgtctgtcagaaccttccttcttgctgaagatgctcctcacggccactatcacctgcccctggggacactggtagctgaagcccttgccggttcaaattcacccacccatcatcgctgtagtcatgatactgctggtatgggtatccataatcgccactactgcccccaggccatggtgactaggggcagaagtccccaaagaagactgaggtc

SEQ ID NO: 9851 - DNA, 622 bp, Homo sapiens
  SIMILAR (405)..(524): 521254mologous to Cunninghamella bertholletiae translation elongation factor 1-alpha,accession number AF157243,Smith-Waterman Score=103.
aatctttcagataggcacagaggctcacacctggaatcccagcactttcagagactgaagcaggaggatcttttgagcccaagaattcaagaccagcctgggcaacattgggaaaccttgtctcatatcaacattgtcgtcattggacacgtagattcgggcaagtccaccactactggccatctgatctataaatgcggtggcatcgacaaaagaaccattgaaaaatttgagaaggaggctgctgagatgggaaagggctccttcaagtatgcctgggtcttggataaactgaaagctgagcgtgcaacgtggtatcaccattgatatctccttgtggaaatttgagaccagcaagtactatgtgactatcattgatgccccaggacacagagactttatcaaaaacatgattacagggaacatctcaggctgactgtgctgtcctgattgttgctgctggtgttggtgaatttggaagctggtatctccaagaaatgggcagaccccgagagcatgcccttcctggcttagccagaagagatatgaggaaattgttaaggaagtcagcacttacattaagaaaattggctacacccccgacacagtagcatgtgtgcca

SEQ ID NO: 9852 - DNA, 1175 bp, Homo sapiens
  SIMILAR (713)..(760): 811254mologous to Homo sapiens elongation factor 1-alpha (AA 1-462),accession number X16869,Smith-Waterman Score=60.
gtagtgcagacccaaatcagcaaaactgctgatgagctgatttcctactggggaacaagcttcccacctccctttgctgcatccttaaccttgtatgagcttgaatattgtatcaccattgatatctccctgtggaaatttgagaccagcaagtactacgcgactgtcattgatgccccaggacacagagacttcatcaaaaacatgattacagggacatctcaggctgactgtgctgtcctgatttttgctgctggtgttggtgaatttgaagctgtcacctttgctccggtcaatgtcacaactgaagtcaagtctgttgaaatgcaccatgaagttttgagtgaagctcttcctggggacaatgtggacttcgatgtcaagaatgtgtctgtcaaggaggttcatcatggcaacgttgctggccaaatcagtgctggctgtgctcccgtactggattgccacatggctcacattgcatgcaagtttgctaagctgaagaaaaagactggtagcacttctggtaaaaagctggaagatggccctactttcttgaagtctggtgatgctgccatcgttgatatggttcctggcaagcccatgtgtgttgagagcttctcagtctacccacctctgagtcgctttgctgtttgtgatatgagacagacagttgctgtgggtgtcatcgaagcaatggacaagatggctgcgtggagctggcaaggtcaccatgtctgcccagaaagctcataatgctaaatgaatattatccctaatacctgccaccccactcttaatcagtggtggaagaacggtctcagaactgtttgtttcacattggccatttaagtttagctgttaaaagactggtttaatgataccaatgcatcgtaaaaacctttcaaaggaaagggagaatgttttgtgggccccttttgggtttatttttttggcgcggggccgttttaaagttattaagttttttaaaatcccgacttttttaatgggaaccaacttgaccaaaaaatttgtcacaaaaattttgggaacccattaaaaagggtaaatggggaaaaaaaaactgtgggggggcgggccgtttttaaagataccttggggggccccaaagtttaccccggcttagcaaaggaatttcttttttccctataagggag

SEQ ID NO: 9853 - DNA, 618 bp, Homo sapiens
  SIMILAR (1)..(615): 991254mologous to Homo sapiens kappa B and V(D)J recombination signal sequences binding protein,accession number AF278765,Smith-Waterman Score=1101.
atggtgcaggcccggccaggagcccaccccaccctgctgccagggcccaccgcagcctgggtcagtggcttctccgggggtggcagcgacctgacaggggcccgggaggcccaggagcgaggccgctggagtcccactgagagctcgtcagcctccgtgtcgcctgtggctaaggtctccaaattcacactctcctcagagctggagggcggggactaccccaaggagagggagaggaccggcggaggcccgggcaggcctcctgactggacaccccatgggaccggggcacctgcagagcccacacccacgcacagcccctgcaccccacccgacaccttgccccggccgccccagggacgccgggcagcgcagtcctggagcccccgcttggagtccccgcgtgcaccggccaaccccgagccttctgccaccccgccgctggaccgcagcagctctgtgggctgcctggcagaggcctctgcccgcttcccagcccggacgaggaacctctccggggaacccaggaccaggcaggactcccccaagccctcaggaagtggggagcccagggcacatccacatcagcctgaggacagggttccccccaacgcttag

SEQ ID NO: 9854 - DNA, 406 bp, Homo sapiens
  SIMILAR (15)..(68): 441254mologous to Mus sp. type I collagen alpha 1 chain, pro alpha 1(I) {N- and C-propeptide regions},accession number S67482,Smith-Waterman Score=49.
  misc_feature (1)...(406): n = a,t,c or g
caatgaacaagccgtgcagtgagacccccaagaggcccatttcccccaataaaaaagatttgggagtctgnnnnnnnnnnnnnnnnnnnnnnnnnnnnnnnnnnnnnnnnnnnnnnnnnnnnnnnnnnnnnnnnnnnnnnnnnnnnnnnnnnnnnnnnnnncttnnnnnnnnnnntaggggggggcccccaaatacccccgggaagaaaaaaaaannnnnnnnnnnnngaggggggaaaaaaaaaccccccggggggggagnnnnnnnnnnnncttttttnnnnnnnnnnnaaaaacccccacccccccnnnnnnnnnnntaccggggggnnnnnnnnnnnnnntttttagannnnnnnnnnaaaaaaaacatttttttttgtgggnnnnnnnnnnntaaacaaat

SEQ ID NO: 9855 - DNA, 2122 bp, Homo sapiens
  SIMILAR (46)..(777): 481254mologous to Rattus norvegicus prostasin precursor,accession number AB017638,Smith-Waterman Score=643.
atgagaggggtttcctgtctccaggtcctgctccttctggtgctggcctgcgggcagccccgcatgtccagtcggatcgttgggggccgggatggccgggacggagagtggccgtggcaggcgagcatccagcatcgtggggcacacgtgtgcggggggtcgctcatcgccccccagtgggtgctgacagcggcgcactgcttccccaggagggcactgccagctgagtaccgcgtgcgcctgggggcgctgcgtctgggctccacctcgccccgcacgctctcggtgcccgtgcgacgggtgctgctgcccccggactactccgaggacggggcccgcggcgacctggcactgctgcagctgcgtcgcccggtgcccctgagcgctcgcgtccaacccgtctgcctgcccgtgcccggcgcccgcccgccgcccggcacaccatgccgggtcaccggctggggcagcctccgcccaggagagtggcgaccgctacaaggagtaagggtgccgctgctggactcgcgcacctgcgacggcctctaccacgtgggcgcggacgtgccccaggctgagcgcattgtgctgcctgggagtctgtgtgccggctacccccagggccacaaggacgcctgccagggtgattctgggggacctctgacctgcctgcagtctgggagctgggtcctggtgggcgtggtgagctggggcaagggttgtgccctgcccaaccgtccaggggtctacaccagtgtggccacatatagcccctggattcaggctcgcacccacagccgcaaggcactggattctggcagcaccctgaaggagctgggaaagccaggaccacccgttccaatagatagaggtcagtttccacagctgcagaaggaaaagaaacaaaacctggaaaattcaaaacctactctggagctgacaggggctatcagcagaagggaagggaagataagggaaggtggagaacagaccatgctgcagtacagcttggccaccactggtgtggtcatcaggcaccagcccaaggagttcgcccgggccatccctaagcccaacagcagcccccagggctcttcacaggtcataagcccctctgagcggcgacagtcctcgcatccagcccggcacggcggccagaagaccccaaatgcggagcctgcccaagatggcggccacgactacgccgcgacaagacggccccgagctcggtgtgcccgagcttggagcccgccggaccgcaccaacacggggacctcccctctgccagtcccaagacggcgccaccgcctccaaaggccatgcccgccgtcgggatggcggccgcacgcccctcgataccgcccgcttccagatcacttaaaatggcggcggctgcggggcggcacggggcggggctgcgccgggggaagggacgcggcgcggggcatgctgggccacgcgcgggctgccgggaacggggcggagcgcggctgcgccggcgcgtcgaggggagaggcagcagctcgcgatggacgtgttcctcatgatccggcgccacaagaccaccatcttcacggacgccaaggagtccagcacggtgtttcgaaactgaagcgcattcgtcgagggcaatcctcaaagcggcctcctgacgagcagcggctgttacaaggaatgaccaactcttggattgatgggcaagacactgggcgagtgtggctttcaccagtcaaaacaggcaccggccacaggccccagccacagtggggtctggccttccggcgagctctgctgcttcctccacagatgacacctttgaggccctgtgcatcgagccgttttccagcgccgccagagctggcccgatgttgatggaaggccccagggatttggggaaggcagtgcccaattgaacaaggccgtgcaagttgagaccccccaagaagggcccattttcccccaattaaaaggagatttggggagtctgcctggttgctgcctctttttcccgcccctccctgggatgggtcccactccctgtgggctccttttggggcttgtgcttggcagttcctgtgctgtcctgtctcccagatcctgagaccctggctgagaacttggccca

SEQ ID NO: 9856 - DNA, 697 bp, Homo sapiens
  SIMILAR (1)..(432): 991254mologous to Homo sapiens bcl2-beta protein,accession number M13995,Smith-Waterman Score=751.
atggcgcacgctgggagaacggggtacgataaccgggagatagtgatgaagtacatccattataagctgtcgcagaggggctacgagtgggatgcgggagatgtgggcgccgcgcccccgggggccgcccccgcaccgggcatcttctcctcccagcccgggcacacgccccatccagccgcatcccgggacccggtcgccaggacctcgccgctgcagaccccggctgcccccggcgccgccgcggggcctgcgctcagcccggtgccacctgtggtccacctggccctccgccaagccggcgacgacttctcccgccgctaccgcggcgacttcgccgagatgtccagccagctgcacctgacgcccttcaccgcgcggggacgctttgccacggtggtggaggagctcttcagggacgggagcgtcaaccgggagatgtcgcccctgtgtggacaacatcgccctgtggatgactgagtacctgaaccgggacctgcacacctggatccaggataacggaggctggccatgggactttctcataggtgccaccacccctgtgaccatcccctacctgccttatcattccaccgaagaatgccagctaataaatgtgaagggaacagcagaatttaaaataccctttgccaagcccgatgaaatgattcaggcaaagatcattgatggatgttaa

SEQ ID NO: 9857 - DNA, 422 bp, Homo sapiens
  SIMILAR (144)..(422): 1001254mologous to Homo sapiens secretory pathway component Sec31B-1,accession number AF274863,Smith-Waterman Score=498.
cctgtagcctgaagaactggagagaggttctggctttgctactgacatactcaggcacagagaaatttcccgagctctgtggacctgatggagaaggtgatggttcttaacaggagcttggagcaactgcggggtcctcatggggttctgctgtcttgggccaacagtctccccctttccccttcccccggattgttgtgggagctaccctccactctaaagagacatcatcttacagattgggatcccagccttctcaccaggtcccaactccatctccaaggccaagggttttcacccctcagtcatcaccagcgatgcccttggcaccttcccatcctagcccttatcagggtcccaggacacagaatataagtgactacagggcacctgggccccaggccatccagcctttgcctttg

SEQ ID NO: 9858 - DNA, 852 bp, Homo sapiens
  SIMILAR (205)..(666): 941254mologous to Homo sapiens secretory pathway component Sec31B-1,accession number AF274863,Smith-Waterman Score=758.
ggtgatgttcagcggacactcatccaagtggactttggcgatggtatcgcggtgtcttacgtcaatctcagctccatggaagatgggatcaaacacgtctatcagaacgtgggcattttccgtgtgaccgtgcaggcacttgtccggctgcccccccacatctcacagtgtgacgaagtcttccggttcttcgaggctcgacccgaggatgtcaaccctccaaaagaccaggctctcctgcttggggaactgggtccggccgtggagctgtgtctgaaggaggagcgctttgctgatgccattatcctggcccaggctgggggtacagatctgctgaagcaaacacaggagcgctacttggccaagaagaaaaccaaaatctcctcgcttctagcctgtgttgtgcaaaagaattggaaggatgtggtgtgtacctgtagcctgaagaactggagagaggcactggctttgctactgacatactcaggcacagagaaatttcccgagctctgtgacatgctgggaactcgcatggaacaggagggcagcagggcactaacctccgaagccagactctgttatgtgtgctcagggagtgtggagcggctggtggagtgctgggcaaaatgccaccaggctttgtcccccatggctctgcaggacatgcatgttatcagcaccgatgagaatcaggtgttcgcagcggtccaagaatggaaccagaatgacacgtacaacctctacatctcagacacacgtggtgtctacttcaccctggccttggagaatgtccagagcagcagaggccctgagggcaacatcatgatcgacctctatgaggtcaccatctag

SEQ ID NO: 9859 - DNA, 868 bp, Homo sapiens
  SIMILAR (766)..(867): 1001254mologous to Homo sapiens secretory pathway component Sec31B-1,accession number AF274863,Smith-Waterman Score=178.
ggaattcgtctccccctttccccttcccccggattgttgtgggagctaccctccactctaaagagacatcatcttacagattgggatcccagccttctcaccaggtcccaactccatctccaaggccaagggttttcacccctcagtcatcaccagcgatgcccttggcaccttcccatcctagcccttatcagggtcccaggacacagaatataagtgactacagggcacctgggccccaggccatccagcctttgcctttgagccctggggtaaggcctggacctcaagattcctggaaagaagccccagcccccaggggaaacctccagaggaacaagctgccagagacatttatgcccccagcaccaattactggtcccagttaatgagcctcacccctgagctacaagggattcttccctcacagcccccctgtctccagtgtgagtcatgctcccccaggagttccaggagaactcagcctgcaggtgacaaggacaatgtattcccctcccttgggaaacctcccagccctccttgtgtgcaggtcatggtagatgggcctcattcctcaaggcatgtgctgagggagactgggtgcaggtaccaggtgtccttactgcagagaaagggaggctgctcatctccccaactctgctgtaatgggaacagtgtgactgtgagtcactggggactagtccttagggaagccatgagaaggacagcttgcccctctggcctttctccctgcttctttatcagcagcttcagcacctgccacctgagaagatggaaaggaaggagctgcccccagagcatcagtccttgaagagcagctttgaggcgcttctccaacgctgctccc

SEQ ID NO: 9860 - DNA, 2328 bp, Homo sapiens
  SIMILAR (781)..(1860): 991254mologous to Homo sapiens secretory pathway component Sec31B-1,accession number AF274863,Smith-Waterman Score=1844.
atgaagctgaaggaacttgagcggccagctgtccaggcatggagcccagccagccaataccctttgtatctggccacaggaacatctgcccaacagctagattcctccttcagcacaaatggcacattggaaatatttgaggttgatttcagggacccttctctggacttgaaacacagaggagtcctttctgccttgagcaggtttcacaagctggtctgggggagctttggcagtgggcttctggaaagctccggggttattgttggcggcggggacaatggcatgcttattctatacaatgtgacccacatcctgtcttcggggaaggagcctgtgattgctcagaaacagaagcacacgggggctgtcagagccctcgacttgaatcctttccagcctccagaggacatcaaggcactgtcttggaaccggcaagcccaacacattctgtcttctgctcaccccagtggcaaggcagttgtgtgggatctcaggaagaatgaacctatcatcaaagtcagtgatcacagcaacaggatgcactgctcaggcctggcctggcatcctgacatagccacccagttagtgctgtgctcagaggatgatcgacttcccgtgattcagctgtgggacttgcgctttgcctcctcgcccttgaaggtgctggagagccacagcagggggatcttgtcagtgtcatggagccaggctgatgctgagctgctgctcactagtgctaaggacagccagatcttgtgccggaacctggggagcagtgagccttgcccccgcctagtcttcatcagtcaagtcaccacagaatctgaattcctgatgcgatcagctgagctgcaggaggccttgggatcaggaaatctactgaattactgtcagaacaagagccagcaagctttactgcaaagtgaaaagatgctgtggcagttcctgaaggtgaccttagagcaagactccagaatgaaattcctaaagcttttaggatacagtaaagatgagcttcagaagaaggtggccacatggttgaagagtgacgtggggctaggtgagagtcctcagcccaagggaaatgacctcaacagtgacagacaacaggccttctgcagccaggcctccaaacacaccacaaaggaagcctctgcttcctcagccttctttgatgagctggtccctcagaacatgactccttgggagatccccatcacaaaagatattgatggactcctaagccaggctctcctgcttggggaactgggtccggccgtggagctgtgtctgaaggaggagcgctttgctgatgccattatcctggcccaggctgggggtacagatctgctgaagcaaacacaggagcgctacttggccaagaagaaaaccaaaatctcctcgcttctagcctgtgttgtgcaaaagaattggaaggatgtggtgtgtacctgtagcctgaagaactggagagaggcactggctttgctactgacatactcaggcacagagaaatttcccgagctctgtgacatgctgggaactcgcatggaacaggagggcagcagggcactaacctccgaagccagactctgttatgtgtgctcagggagtgtggagcggctggtggagtgctgggcaaaatgccaccaggctttgtcccccatggctctgcaggacctgatggagaaggtgatggttcttaacaggagcttggagcaactgcggggtcctcatggggtgagcccaggccctgccacaacctacagggtcactcagtatgccaacctcctggcagcccagggcagcctggccactgccatgagctttctacccagggactgtgctcagctgccagagacatttatgcccccagcaccaattactgctccagttatgagcctcacccctgagctacaagggattcttccctcacagccccctgtctccagtcagcttcagcacctgccacctgagaagatggaaaggaaggagctgcccccagagcatcagtccttgaagagcagctttgaggcgcttctccaacgctgctccctgtctgcaactgacttaaagacaaaaaggaagctggaagaggcagcccagcgtctggagtatctatatgagaagctctgtgaggggacactctcacctcatgtcgtggctgggctccatgaggttgcccgatgtgtggatgcaggaagctttgagcagggccttgcagtgcatgcccaggtggcgggctgtagcagcttcagcgaggtgtccagcttcatgcctatcctgaaggctgtcctcatcatcgctcataagctgctggtctaa

SEQ ID NO: 9861 - DNA, 3750 bp, Homo sapiens
  SIMILAR (1669)..(2751): 991254mologous to Homo sapiens secretory pathway component Sec31B-1,accession number AF274863,Smith-Waterman Score=1907.
ggtcagtgtcatggagccaggctgatgctgagctgctgctcactagtgctaaggacagccagatcttgtgccggaacctggggagcagtgaggtggtatataagctaccaacacagagcagctggtgctttgatgtgcagtggtgccctcgggacccttcagtgttctctgctgcctccttcaacggctggatcagtttgtactctgtgatgggtaggagctgggaagtccagcatatgagacaggctgacaagatctcctcttccttcagcaaaggccagcctctcccaccactgcaggtgccagagcaagtggcacaagcaccactgatacctcccctgaaaaaaccccccaaatggattagaagaccaacaggtgtttcatttgcttttggagggaagctggttacttttggcctccccagcacccctgcccatctggtgccacagccttgcccccgcctagtcttcatcagtcaagtcaccacagaatctgaattcctgatgcgatcagctgagctgcaggaggccttgggatcaggaaatctactgaattactgtcagaacaagagccagcaagctttactgcaaagtgaaaagatgctgtggcagttcctgaaggtgaccttagagcaagactccagaatgaaattcctaaagcttttaggatacagtaaagatgagcttcagaagaaggtggccacatggttgaagagtgacgtggggctaggtgagagtcctcagcccaagggaaatgacctcaacagtgacagacaacaggccttctgcagccaggcctccaaacacaccacaaaggaagcctctgcttcctcagccttctttgatgagctggtccctcagaacatgactccttgggagatccccatcacaaaagatattgatggactcctaagccaggctctcctgcttggggaactgggtccggccgtggagctgtgtctgaaggaggagcgctttgctgatgccattatcctggcccaggctgggggtacagatctgctgaagcaaacacaggagcgctacttggccaagaagaaaaccaaaatctcctcgcttctagcctgtgttgtgcaaaagaattggaaggatgtggtgtgtacctgtagcctgaagaactggagagaggcactggctttgctactgacatactcaggcacagagaaatttcccgagctctgtgacatgctgggaactcgcatggaacaggagggcagcagggcactaacctccgaagccagactctgttatgtgtgctcagggagtgtggagcggctggtggagtgctgggcaaaatgccaccaggctttgtcccccatggctctgcaggacctgatggagaaggtgatggttcttaacaggagcttggagcaactgcggggtcctcatggggtgagcccaggccctgccacaacctacagggtcactcagtatgccaacctcctggcagcccagggcagcctggccactgccatgagctttctacccagggactgtgctcagccaccagttcagcagctaagagatcggctttttcatgctcaaggttctgctgtcttgggccaacagtctccccctttccccttcccccggattgttgtgggagttaccctccactctaaagagacatcatcttacagattgggatccccagccttctcaccaggtcccaactccatctccaaggccaagggttttcacccctcagtcatcaccagcgatgcccttggcaccttcccatcctagcccttatcagggtcccaggacacagaatataagtgactacagggcacctgggccccaggccatccagcctttgcctttgagccctggggtaaggcctgcttcatctcagccacagctattaggagggcaaagggtgcaagttcctaacccggtgggattccctgggacatggcctcttcctggttcccctctacccatggcatgcccaggcatcatgcgacctggctctacctccctgcctgagactcctagactgttccctctgcttcctctgagaccactaggtcccggccgcatggtctcccacaccccagcccctcctgcaagcttccctgtgccataccttccaggggacccaggtgccccatgctctagtgtcctcccaaccactggcatcttgactcctcacccaggacctcaagattcctggaaagaagccccagcccccaggggaaacctccagaggaacaagctgccagagacatttatgcccccagcaccaattactgctccagttatgagcctcacccctgagctacaagggattcttccctcacagccccctgtctccagtgtgagtcatgctcccccaggagttccaggagaactcagcctgcagcagcttcagcacctgccacctgagaagatggaaaggaaggagctgcccccagagcatcagtccttgaagagcagctttgaggcgcttctccaacgctgctccctgtctgcaactgacttaaagacaaaaaggaagctggaagaggcagcccagcgtctggagtatctatatgagaagctctgtgaggggacactctcacctcatgtcgtggctgggctgcatgaggttgcccgatgtgtggatgcaggaagctttgagcagggccttgcagtgcatgcccaggtggcgggctgtagcagcttcagcgaggtgtccagcttcatgcctatcctgaagtctgtcctcatcatcgctcataagctgctggtctaaaccaagcagcctttctttgctaggaagccacttctgctgttacataactcctccctgcagaagaggggacttctgcaacagattctgtttctttttcccgactcttttccttgctgccaggtatgtgatgctgtatgcttggctccaaaccagctgagtgcctgctttttactcctttatgtctgggccttctagggatctgtccaaggacacttttcagggcggggaagccaggggcataggaatcagttctttcactcttccctaatacttacactctgtaaggacctggggcaggatatcttctcccccagggatcttctatttaagtggcttctgagagggtgaacaggattgttacttttaagcctacctctgctgtgacccatcatgtgggtcttttgtttctcccttctgtggtttatgagcctgcccttaccttttccctgcctctgacttggtatttccaggtccgtatttctctgtagcccagggtctggggtagagctgactgctgttcaccctttgaacaactcatggacgtgagggatgggtgctgagcagaaccaagagaggcaactttggcgctgttaaaatggaatttctcatctgccggcattattaagggtgggctaggttgggatggaaggtgaaagggatgaactgccttttgctggaagctgtcttaggctgtgagacaggagcaggggaaccaccagcctatggggaactgcaccttgactcacacctatgttggagcattaccacaaggccattccttctgtgatgataaagcccagttctggaattggagccatattaaggaatgattctcttccagcgctgctcctcaagggttgggggtccttatccctcacagccaccacatgtctcagggctaccttctccgattggatttgcatttgtggcactgtctttgatgcagtgatgtacttaatggtgcaataaagctgcttcgatttggaaaaaaaaaaa

SEQ ID NO: 9862 - DNA, 543 bp, Homo sapiens
  SIMILAR (390)..(491): 971254mologous to Homo sapiens serologically defined breast cancer antigen NY-BR-73,accession number AF308295,Smith-Waterman Score=187.
ttttttggtcaggtcctacagcagtggttctcaaaatatttatttttcaacatttaggtccctttgataggcatggcaaaaagcccccaaaagtacctctctgctgctttcttcataccaatagagaaacagtctgcccatgttatcatttctgtactgctgtaacccacagcgtgaaatagactttacattcatgctttgtgagactgccttcctgacccgcttgtaggctgcttttgagaaccactaccccagacaacagggcatgtgtgtttaactggaaaatgtggaacacagtgctgagtacagatggcacttcctaagaaatggatggaaacgtctcccttggcactccccactgatgcagggtttgcctcccttcttctccagttgcaggctcctttagctgcaccatgaagtttacagtccgggactgtgaccctaacactggagttccagatgaggatgggtatgatgatgagtatgtggtgagtcttcccagcatagagactttctttgacaccttcacaacactaagtgact

SEQ ID NO: 9863 - DNA, 1173 bp, Homo sapiens
  SIMILAR (420)..(734): 521254mologous to Homo sapiens gamma2-COP,accession number AB047847,Smith-Waterman Score=213.
agaagcagagacagaatattttgttcgatgtatcaagcacatgtttaccaatcacatcgtgttccagcttttccatttactgacttttcagtttgactgcaccaacactctcaatgaccagctgctggaaaaagtgacagtgcagatggagccatcagagtcctatgaagtgctgtcttgtatcccagcccccagccttccttataaccaaccaggaatatgttacactcttgttcgtttgcctgatgatgaccctacagcagttgcaggctcctttagctgcaccatgaagtttacagtccgggactgtgaccctaacactggagttccagatgaggatggtaatgatgatgagtatgtgctggaagatctcgaagtgactgtgtctgaccatattcagaaagtactgaagcctaacttttgctgctgcttgggaagagggtgggagataccctttgagaaagaggaaacctttgccctcagttctaccaaaacccttgaagaggctgtcaacaaatatcatcacatttctgggcatgcagccatgtgagaggtccgtataaagtacctgagaaccaggatttcccattcgctctatctggcaggtatattcagaggtggctatgatttatttggtgagggccaggctggccttagccgatggagtgaccatgcaggtgacggtcagatgtaaacacagaacacctgtagatattatcttagcttctgttggataaatgcttgctggacaagaggaaactgatgcacactacatggtcagtgggcttttaggctagtggcatcagtttcccagaatcagacttttgaagatgaatgactttggagaagcaaattaaacatttggccctgagccagcagatcaagcaaatgtctatctttgcgcatgggttgttttttttttttttctttttattctacttggtcagctttgggacgatagtgcagctttgggtgatcttgaaaatcaaatactatcctatactccagctgcttaacttcattttattctttaatgtgtacctgaaagctcctggcaatgctggaaaatttttatcccagaggggtgggggggaggggggaggggaagccagagtccacttttgtcacaattcatttttattaatagaaaataaacacttattccagtttcaa

SEQ ID NO: 9864 - DNA, 464 bp, Homo sapiens
  SIMILAR (42)..(416): 311254mologous to Rattus norvegicus N-methyl-D-aspartate receptor subunit,accession number D13213,Smith-Waterman Score=100.
agaaagcctgggggtgaacacgccctgaggagtcagggaagccagagccagcggctgaagggcccttgcgtgcggctgcagcacaactgcaggttgtcagagaaaaatctccagctcagacccggttgtgcacaaagctcagaatggagcggccagcagggcatgtggctagaggaagaacatggccacccacccctccctcctcgtgtgccaggtgggcttgctaggggcacaggtgcccagtgtcagggcagggatgccacagagccgcaggcagactgaaggggcccagggcatggtcaggaacgaagaaggagggagcctgaggctctcccaccaccaggcctgcaaagccactcacactcagcagtggacacttgaggtcacggcccaggtgggctgagggaccccaataccacctgccttgaatctcagcccctcgtgccaagcttggcgtaatgatg

SEQ ID NO: 9865 - DNA, 1795 bp, Homo sapiens
  SIMILAR (378)..(1160): 271254mologous to Leishmania major proteophosphoglycan,accession number AJ243460,Smith-Waterman Score= 192.
gtggcagccagatatcgggccatacggaggactgctgaacgtggtggtggacggcctgttcatcatcgggtggatgtacctgcctccccatgacccccacgtcgatgaccctatgagattcaagcctctgttcaggatccacctgatggagaggaaggctgccacagtggagtgcatgtacggccacaaagggccccaccacggccacatccagattgtgaagaaggatgagttctccaccaagtgcaaccagacggaccaccacaggatgtccggcgggaggcaggaggagtttcggacgtggctgagggaggaatgggggcgcacgctggaggacatcttccacgagcacatgcaggagctcatcctgatgaagttcatctacaccagtcagtacgacaactgcctgacctaccgccgcatctacctgccgcccagccgccccgacgacctcatcaagcctggcctcttcaaaggtacctatggcagccacggcctggagattgtgatgctcagcttccacggccggcgtgccaggggcaccaagatcacgggcgaccccaacatccccgctgggcagcagacagtggagatcgacctgaggcatcggatccagctgcccgacctcgagaaccagcgcaacttcaatgagctctcccgcatcgtcctggaggtgcgcgagagggtgcgccaggagcagcaggaaggcgggcacgaggcgggcgagggtcgtggccggcagggcccccgggagtcccagccaagccctgcccagcccagggcagaggcgcccagcaagggcccagatgggacacctggtgaggatggtggcgagcctggggatgccgtagctgcggccgagcagcctgcccagtgtgggcaggggcagccgttcgtgctgcccgtgggcgtgagctccaggaatgaggactacccccgaacctgcaggatgtgtttttatggcacaggcctcatcgcgggccacggcttcaccagccctgaacgcacccccggggtcttcatcctcttcgatgaggaccgcttcgggttcgtctggctggagctgaaatccttcagcctgtacagccgggtccaggccaccttccggaacgcagatgcgccgtccccacaggccttcgatgagatgctcaagaacatatcagtccctcacctcctgaccggacacatacttgccgccacatcccgggtggctctggggctctgaactctgacctgtgaatagaagcagcatgcactttggaaatgcgggcttttgaccagaacgcacacctcgtcggtgggcccagaccagccaccccccagcactttatgtagagagtgtgacgtaaacctgcatatttgtcagcgccatgatggaagaagctgagcatgtcttaccaaaaacagacagaacgagttctttatacagcagatgtaggggacagccgtgggaccgcgtgagaattgaagcggtggggttcccgcaccctgggctgggctggtggttttctcgggaagcaggaccctcctgactggtgctcttcctgtgagcggatagagtgatagactggggtcgtgtgtgagacgcatgtgctccaccccactccttttgggggaagccagggcaacagtggcctctgggagggggttcaggaagaggcgaacagttcaggcagcgcaggtgtgatggggcacattacgcagagcaagctcgggaagttggtaggatctcaggcttggggccgggactctggagtgaatccccatttctctaccggcttgcttggagtttgga

SEQ ID NO: 9866 - DNA, 1701 bp, Homo sapiens
  SIMILAR (977)..(1279): 271254mologous to Zea mays arabinogalactan protein,accession number AF134579,Smith-Waterman Score=42.
ttatgatgatgttgtgttccctccttgttccgcgcgttgtggcggcttttctgcgcccttggtaactcggcatatctcttgtgggctcgctttctgtgccttgaggtttggccttgaacgggttgagtgggacattgccggttcttggtcggtgcgttgtgaagacggttttttctggggccacggcttccagtgccgcgggcccatgccgtgcaggtggctcgtcatagatgaacgaggccctgcaccgagtccgtacccggtagagcggtttaaaggcaaatgaactggaaagtttccctcttgtttctgctcagtttttatggcacaggcctcatcgcgggccacggcttcaccagccctgaacgcacccccggggtcttcatcctcttcgatgaggaccgcttcgggttcgtctggctggagctgaaatccttcagcctgtacagccgggtccaggccaccttccggaacgcagatgcgccgtccccacaggccttcgatgagatgctcaagaacattcagtccctcacctcctgaccggccacatccttgccgccacatcccgggtggctctggggctctgaactctgaccaaaaacagagagaacgagcctgaatacagcagatgtaggggacagccgtgggaccgcgtgagaattgaagcggtggggttcccgcaccctgggctggctggtggttttctcgggaagcaggaccctcctgactggtgctcttcctgaacgtgttctttgtcacttgtttggaaatgatgtgattgaagatttcagagaggtcattggaggcttttctgtgccggcactgaatgttcatttgcatgaggaagttgcaaacgacttctgcaggctgggccgtgacctcaagtgtccactgctgagtgtgagtggctttgcaggcctggtggtgggagagcctcaggctccctccttcttcgttcctgaccatgccctgggccccttcagtctgcctgcggctctgtggcatccctgccctgacactgggcacctgtgcccctagcaagcccacctgtcctgagaataaaactcctggaatcatgatcaagtccagtgttaacgtggcccaacctgtctgtacttctggggagagaccaggaacatcactggactcctcatccccgtaattatttagagaagatgcaagcagcagatagtctccatgcggctggtactttttttgttgttttttgagacagggtcttgctctgtcacctgggccactgccatctccgctggtctcggggttgccacatagcctgccagctgcggctgcttcctgggtgccctccagggagagcaggggatcgtgggtccccggcggtgggtgtttccttctccggggagagcaggggatcgtgggtccccggtggtgggtgtttccttctctaaggtttgctgctgtttccaggcctttctgtggggcctgggtcctgtcctggggccaagccacggggtcatcctcagctgcactgggcgtgccaaccacaaacgagtcacttgctacaagcagcaccatgcagcctcctgtctggacgagaccctgccccccacagactggagacgcaccccgatttcccaggtcacagggggaagtgtggatctgataagggactaaatgtggccgtctttcatatgtttctcttacatattttattttaaaatg

SEQ ID NO: 9867 - DNA, 3654 bp, Homo sapiens
  SIMILAR (1765)..(2178): 511254mologous to Volvox carteri f. nagariensis hydroxyproline-rich glycoprotein DZ-HRGP,accession number AJ242540,Smith-Waterman Score=385.
gtggttatggagcagctgccgggggtgccaccaggccccccccaccccgttcgaccgccacccccgcctccaccacccatgcccctgcagctcgaggcccacctccgcagccatggcctggagcccgcggcccccagcccccgcctgcgacccgaggagagcctggatccgccaggcgccatgcaggaattgctcggggctctggagccgctgcccccggcgcctggggatactggcgtaggcccaccaaactcggagggcaaggatcccgcaggcgcctaccgcagccccagcccgcaaggcaccaaggcgccgcgtttcgtgccgctcacctccatctgcttccctgactccttgctccaagacgaggagcgcagcttcttccccaccatggaggagatgttcggtggaggggccgcggacgactacggcaaggccgggccacctgaggacgagggggaccccaaggctggcgctgggccaccccccggcccccctgcttatgatccctatgggccctactgtcctggccgggcgtcgggagccgggcccgagacaccgggcctgggcctggaccccaacaaaccgcctgaactgccctccacggtcaacgccgagccgctgggcctgatccagagtggcccccaccaggcggcgccaccacccccgcctccgccaccgccgcctcccgcgccggcctccgaacccaagggtggcctcacctcgcccatcttctgctctaccaagccaaagaagctgctcaagacatcctccttccacctgctgcggcgccgcgacccacccttccagacccccaagaagctgtacgcccaggagtacgagttcgaggcggacgaggacaaggccgatgttcccgccgacatccgcctcaacccccggcgcttgcctgacctggtctccagctgccgctcccgtccggccctctcgccactgggggacatcgacttctgcccacccaacccaggacccgatggcccccggcgccgtggccgcaagcccacgaaggcgaaacgtgatgggccaccccggccacgggggaggccccggatccgccccctggaggtcccgaccactgcggggcccgcctcggcctccacgcccaccgatggcgccaagaaaccccggggccggggccgaggccggggtcgaaaggctgaggaggcagggggcacccggttggagcccctgaagccacttaagatcaagctgtctgtgcccaaggctggcgagggtctgggaacctcatcgggtgatgccatatcaggcactgaccacaacagcctggactcgagcctgactcgggagaagatcgaggccaagattaaggaggtggaggagaagcagccggagatgaagtcgggtttcatggcctccttcttggacttcctcaagtcaggcaagcgccacccaccactctaccaggcgggcctgacgcctccgctcagccctcccaagagtgtgccaccctctgtgccagcccgaggcctgcagccccagccccctgccacccctgctgtgccacatcccccaccttccggagcctttgggcttgggggcgccctggaggctgcagagagtgagggtctggggcttggctgcccttcaccctgcaagcggcttgatgaggagctgaagcggaacctcgagacgctgccctccttctcctcggatgaggaagactctgtcgccaagaaccgagacctgcaggagagcatctcctccgccatctctgccctcgatgacccaccccttgctgggccaaaagacacttccaccccagatgggccgcccttggcccccgcggctgcagttccagggccaccccctcttccggggctccccagtgccaacagcaatggcactcccgagcccccgctgctggaggagaaacccccacccactccacctcctgccccgactcctcagcctcagcctccgccaccccctccgccgccacagccagccctgccctcgccacccccgctggtggcccccacgcccagctcaccaccgccaccgccgctgccgccgccacctccaccagccatgccctcgcctccaccaccacccccaccagccgctgccccactggctgctcctcctgaggagcccgccgccccgtctcccgaagaccccgagctgccggacacccggcccctgcatctggccaaaaagcaggagacggcggcagtgtgtggggagacggacgaggaggccggcgagagtggcggagagggcatcttccgggaacgggacgagttcgtcatccgtgctgaggacatcccttccctcaagctggcgttgcagacggggcgtgaacccccacccatctggcgagtccagaaggcccttctgcagaaattcactccggagatcaaggacggccagaggcagttttgtgccaccagtaattatttggggtattttggggatgcaaaaaatcggtaccagcgcctctatgtaaagttcctggaaaatgtcaataagaaggactacgtgagggtctgtgctcggaaaccctggcatcggcccccagtgccagtcagacgctctgggcaggccaagaaccccgtatctgctgggggtagctctgcacctccccctaaggccccagcaccacctcccaagcctgagacccctgaaaagacgacatctgagaagcccccagagcagactcctgagacggccatgcctgagccccctgcccccgagaagccctccctcctgcggcctgttgagaaggaaaaggagaaggagaaggtgacacgtggagagcggccattgcggggtgagcgggccaccagcggacggcagacacggccagagcggagtctcgccacgggacaacctgccacatcccggctgcccaaagcccggcctaccaaggtgaaggctgaaccgccccctaagaagaggaagaaatggctgaaggaggcaggcggcaacgctacagcaggcgggggcccaccaggcagctcctcggactcggagtcctcccctggagcccccagcgaggacgagcgggcagtacctgggcgtctgctcaaaaccagggcgatgcgggagatgtaccggagctacgtggagatgttggtgagcacagcacttgacccagacatgatccaggccctggaggacacgcatgacgagctgtacctgccccccatgcggaagatagacggcctgctgaatgagcacaagaagaaagtcctgaagcggctgtcgctaagcccagccctgcaggatgctctgcacacgttcccacagctgcaagtggagcagagtggggagggctctccggaagagggggctgtgcggctgcggcctgctggggaaccctacaaccgcaagacgctcagcaagctcaagaggagcgtggtcagagcccaggagttcaaggttgagctggaaaagtcgggatactatacactctaccattcgctccaccactataaataccacaccttcctgcgctgccgggaccagaccctggccatcgagggcggcgccgaggacctgggccaggaggaggtggtccagcagtgcatgcggaaccagccgtggctggaacagctctttgactccttcagtgacctgctggcccaagcacaggcccacagccgctgcgggtga

SEQ ID NO: 9868 - DNA, 3720 bp, Homo sapiens
  SIMILAR (1017)..(1142): 331254mologous to Volvox carteri f. nagariensis hydroxyproline-rich glycoprotein DZ-HRGP,accession number AJ242540,Smith-Waterman Score=62.
  misc_feature (1)...(3720): n = a,t,c or g
atggaggagatgttcggtggaggggccgcggacgactacggcaaggccgggccacctgaggacgagggggaccccaaggctggcgctgggccaccccccggcccccctgcttatgatccctatgggccctactgtcctggccgggcgtcgggagccgggcccgagacaccgggcctgggcctggaccccaacaaaccgcctgaactgccctccacggtcaacgccgagccgctgggcctgatccagagtggcccccaccaggcggcgccaccacccccgcctccgccaccgccgcctcccgcgccggcctccgaacccaagggtggcctcacctcgcccatcttctgctctaccaagccaaagaagctgctcaagacatcctccttccacctgctgcggcgccgcgacccacccttccagacccccaagaagctgtacgcccaggagtacgagttcgaggcggacgaggacaaggccgatgttcccgccgacatccgcctcaacccccggcgcttgcctgacctggtctccagctgccgctcccgtccggccctctcgccactgggggacatcgacttctgcccacccaacccaggacccgatggcccccggcgccgtggccgcaagcccacgaaggcgaaacgtgatgggccaccccggccacgggggaggccccggatccgccccctggaggtcccgaccactgcggggcccgcctcggcctccacgcccaccgatggcgccaagaaaccccggggccggggccgaggccggggtcgaaaggctgaggaggcagggggcacccggttggagcccctgaagccacttaagatcaagctgtctgtgcccaaggctggcgagggtctgggaacctcatcgggtgatgccatatcaggcactgaccacaacagcctggactcgagcctgactcgggagaagatcgaggccaagattaaggaggtggaggagaagcagccggagatgaagtcgggtttcatggcctccttcttggacttcctcaagtcaggcaagcgccacccaccactctaccaggcgggcctgacgcctccgctcagccctcccaagagtgtgccaccctctgtgccagcccgaggcctgcagccccagccccctgccacccctgctgtgccacatcccccaccttccggagcctttgggcttgggggcgccctggaggctgcagagagtgagggtctggggcttggctgcccttcaccctgcaagcggcttgatgaggagctgaagcggaacctcgagacgctgccctccttctcctcggatgaggaagactctgtcgccaagaaccgagacctgcaggagagcatctcctccgccatctctgccctcgatgacccaccccttgctgggccaaaagacacttccaccccagatgggccgcccttggcccccgcggctgcagttccagggccaccccctcttccggggctccccagtgccaacagcaatggcactcccgagcccccgctgctggaggagaaacccccacccactccacctcctgccccgactcctcagcctcagcctccgccaccccctccgccgccacagccagccctgccctcgccacccccgctggtggcccccacgcccagctcaccaccgccaccgccgctgccgccgccacctccaccagccatgccctcgcctccaccaccacccccaccagccgctgccccactggctgctcctcctgaggagcccgccgccccgtctcccgaagaccccgagctgccggacacccggcccctgcatctggccaaaaagcaggagacggcggcagtgtgtggggagacggacgaggaggccggcgagagtggcggagagggcatcttccgggaacgggacgagttcgtcatccgtgctgaggacatcccttccctcaagtcctatggggctgatagaggtgtcgaggacctgcgggcctcagaggtgttatttgcgtttgtgtctgtacatgcattacctgtatataagctggcgttgcagacggggcgtgaacccccacccatctggcgagtccagaaggcccttctgcagaaattcactccggagatcaaggacggccagaggcagttttgtgccaccagtaattatttggggtattttggggatgcaaaaaatcggtaccagcgcctctatgtaaagttcctggaaaatgtcaataagaaggcctccgtgagggtctgtgctcggaaaccctggcatcggcccccagtgccagtcagacgctctgggcaggccaagaaccccgtatctgctgggggtagctctgcacctccccctaaggccccagcaccacctcccaagcctgagacccctgaaaagacgacatctgagaagcccccagcagcagactcctgagacggccatgcctgagccccctgcccccgagaagccctccctcctgcggcctgttgagaaggaaaaggagaaggagaaggtgacacgtggagagcggccattgcggggtgagcgggccaccagcggacggcagacacggccagagcggagttttcgccacgggacaacctgccacatcccggctgcccaaagcccgggcttaccaaggtgaaggctgaaccgccccctaagaagaggaagaaatggctgaaggaggcaggcggcaacgctacagcaggcgggggcccaccaggcagctcctcggactcggagtcctcccctggagcccccagcgaggacgagcgggcagtacctgggcgtctgctcaaaaccagggcgatgcgggagatgtaccggagctacgtggagatgttagtgagcacagcacttgacccagacatgatccaggccctggaggacacgcatgacgagctgtacctgccccccatgcggaagatagacggcctgctgaatgagcacaagaagaaagtcctgaagcggctntcgctaagcccagccctgcaggatgctctgcacactttcccacagctgcaagtggagcagagtggggagggctctccggaagagggggctgtgcggctgcggcctgctggggaaccctacaaccgcaagacgctcagcaagctcaagaggagcgtggtcagagcccaggagttcaaggttgagctggaaaagtcgggatactatacactctaccattcgctccaccactataaataccacaccttcctgcgctgccgggaccagaacctggccattgagggcggcgccgaggacctgggccaggaggaggtggtccagcagtgcatgcggaaccagccgtggctggaacagctctttgactccttcagtgacctgctggcccaagcacaggcccacagccgctgcgggctggggcagcacattgaggacgcactgctggatgtggcctccctgttccaggcgggacagcattttaagcgccggttcagagggtcagggaaggagaactccaggcacagggcaggggtagaagaggccctggtccgcatcttctctggccgccacccgatgctgttcagttaccagcgctccctgccacgccagcccgtgccctctgtgcaggacaccgtgcgcaagtacctggagtcggtccggcccatcctctccgacgaggacttcgactggaccgcggtcctggcgcaggaattcctgaggctgcaggcgtcgctgctgcagtggtacctgcggctcaagtcctggtgggcgtccaattat

SEQ ID NO: 9869 - DNA, 1665 bp, Homo sapiens
  SIMILAR (777)..(667): 421254mologous to Lycopersicon esculentum extensin (class II),accession number X55687,Smith-Waterman Score=74.
ctaggctggagctggagggtcctggtctgcgggctctaaagggggtgctggcaccattgctgtcttctgggcacccaggaactcatgacttgctccttccgttggtggcctgaggatgtggtttaattttggatcctctgcctgagaaataaccctgtctactccagcttccaatgtccctgactgaatctcactctgcctctgaccatttcgcaataggcttttgcgcatcataagattccagttctgctcatccaggtgtgtggacaccgaaccctcagctttctgcctctggttttggtaagctggcttggtgtccacaggggccaggcagcatcgacagaagctgccaaacgggcctggctcttgagccactccaggatgagagcaatgagctccgggtcgccggaaggcagagccgggatcatggtgcctgcgttgcctctgtctcagccattgagggagaccaaatatggcttcttctccaggacagaggtggtgacaggggtggaggagaaggaggccaataagtaagatttctgagtcaaggaatatgcaaaattttttacatgcattgtcaaattgcctcccggaaggaggagcgtaggacagatgctcttccaggctggaagagggcaggcaactcccgcccctgctgctggggtcactgcaggtagccaaaaagagcgggggaacgggatggatggtcagatgttcccaatgtctgtttttgggctgagatgaggtcatgcagcgtggctggggcggagtaggatggtcttggtccccagcaagtgtcaccaggctcagaagctcctgcaggtcttttggatggaggaagacacagaggtggctgacttgaggaccaggggccttttgggtccccagagggcaagagcgagagggcttgacagcaggagcttgtgtggctccaacgggggagagttttggtgggggttgtggcataggctcagagggagtgactttactgaagacagcccactgggcactgaccaagccacgaatgatcccagcagcaaatttcaccccccaacagcagcagagcaaacagtaatcaggcaggcatggggcattgcctctgagaccagaggaggcctgagacaacataccactcaggaacccttttatcccggtacagctgtctaaaggattatgccaatgaggagagggccttttgtcagagaccctgtcccatccgaccatttgtaaagctgcctcatgagacagggctggcggaggctctgcaaacattctggtgaccccctcctggacaaagcagaccttcacaaagagactctcagagcgggaggactctgtcccaccttgtgtatagcccctctgcccattcatggctgatctatcagatctctgaacaccaaagaaggcctgcaaaaccttatacattggcctcttcgaggaccaaaccaactgaaaacctgtattggctgcgtgagtcccagctcccatgagggatgtcacccagccacctggtgctgatgctgtgcactgctgcaggggaggcctctgcttcctccaaagctggtcaactctcagtgtaggatttccaccgaggggcacggcagcacagcactttcctaagggtgttgcagaaataacccaagaatcatccccctttcctcccat

SEQ ID NO: 9870 - DNA, 1150 bp, Homo sapiens
  SIMILAR (482)..(655): 481254mologous to Homo sapiens Human secreted protein, SEQ ID NO: 6735,accession number G02654,Smith-Waterman Score=154.
atgggaggaaagggggatgattcttgggttatttctgcaacacccttaggaaagtgctgtgctgccgtgcccctcggtggaaatcctacactgagagttgaccagctttggaggaagcagaggcctcccctgcagcagtgcacagcatcagcaccaggtggctgggtgacatccctcatgggagctgggactcacgcagccaatacaggttttcagttggtttggtcctcgaagaggccaatgtataaggttttgcaggccttctttggtgttcagagatctgatagatcagccatgaatgggcagggtttctcaaaatgtgtgggaatgccaataacacacactcggcagcaggctgaccttgggcgagggccagaggagacagaagacaagaagcaacagagcagaggaagcgatgagctcaggtctgagggagaggaaccagagccttatctgctgcgtacttccaaaggtcaaggacaaagaaaggatcctaaaagcagcaagagaaatgaaacaaataatatacaatggagctccaatacatctggcagcagacttctcagtggaaaccttacaggccaagaaggagtggtgtgacatatttaaagtgctaaagaaaaaaaccttttatcctaaaatggtcctcacggccggcccatcccaccctcaatctgttatcagtgtctctttcacaggcctggccaatgctgccagcctgacaatgagcccggatttgcacggccagcccggatttgcaggtctctccagtgtggccgctgtggactggcagtgggctctcctccgcccctcccctccacagggcaggatgggcttgcttcccatctgccaggcaactcagggtccgcagctctgtgtggcaagcccatcagataaagagggattcctgctcttgtttgggaaagaaatagccagactcacaaacaagggaggggcaaggttatataaatgtgatattgttcaaggagtgtgctgtgaagatcccctagctaccttagactgggaactaagaccagatttggagcaaggagagaggcccaccccagagagacacaagccttttttgcttgggaagagtttctcagcaccactgattaaaatttgccgttatgaatggcaaatgttctag

SEQ ID NO: 9871 - DNA, 1872 bp, Homo sapiens
  SIMILAR (888)..(673): 801254mologous to Takifugu rubripes zinc finger protein,accession number U90880,Smith-Waterman Score=330.
ttatgtttgttctttattttctctttcctccatgataatgtcagttcttatgagggcaaagatgtcattcgtggctcttcctggcgaattattggggcctgatgatatgccatgattgtggtcatgaggctctgtcgtaagtatcgtgtctctaagtccggcgtcacacggttgtccaccgtagggcggctctatataagtaacttgtaggacaagccggacacaccgggggttcgtgtcacaaggccggatccactgcgggtttacgtggtaagcaacaaggaagaggcttttagtaacagagtctaattttgggggattctcaccattaaaattccttcttaacatgcatccttcctcctgtctcaatatgaactgatcttctccagcccagtgctcagtggaaacagctgtccctagcacgcagaaatgttcactcaaccaggctggctggggcgaggcggtgtgctgcttctggccccagcccagtggctgcccactgctatcaccctgtctctggccacagccgacttctccatggctgtcagcatggccactggggttcatggcaagtgcctgaggtgcctccaggctctcccttttctctggccccagtttggaaaagaagacaaacagctctccctgcgatcctgcatcttcctgtggagcactattaccctgagctgtaaaagacttcttgcatttgaaaggcttcacgtcagagtggacgatcatgtgtgccttgagggtctgcttctgcacgaagctcttgtagcagaggtgacactggtaggcgcggatgttggtgtggatcagcacgtgtcgcttcatgttggccagcagggtgaactcccgcccacaaatcccacacttatgctccttcacaccaggatcttcatatgctctaaaatgcacttttgattcctttcccacatataaaggagcccctgaagttagcgaatggtcccctttacggctgaatcccagtctgggtcctttgttgatggttcctgcacttggcaggcgactcccctctggatagtatctacaggtaccttttgtagggcaggagtttagctggggtaagatttcaggaacaccactagggccttgttttagttcagcctgaatgactccagggctatggttgcaaactgggctgaactcagactcttgggcctgtatttccccttgaagacctttggtaggacagccattggcggtgagttcaaacacaggaaaaggcctgtgttccaggaagagctgcagacgggctgaaagaccggccataatgttgctggattgcactattccccactggtgttcagctggcaatcgatgcaagaagttggctgggcctctcttctcatgtcgtctctcattctcaagaaggctatcccagactttttcacataaatgtctcagggttctaggagggtaagagtggatgctacataggctcttgaagcctgcaattaaaacatacagtgtcatttccaccacaaagcaggtcataaggtgtgaggcatccagatgaagaagagttggatgcttttcttcatgctgttttataccttgtccctttattcctggggagttggggatgtgttctggtctcagacacatgatgagctgaactgaacaatgagaacacttggacacaggaaggggaacatcagacactggggcctcttgtgggcttccggtaaggggataggaattacaataggagagatactttagcagctccttgctatcaggtgtaactccacaccccattttatttttcaaaattttgtgaaatgaagacattaattcaaggctgattttcttttgctgccacagatgtccacataattgttggatcctcat

SEQ ID NO: 9872 - DNA, 936 bp, Homo sapiens
  SIMILAR (421)..(687): 341254mologous to Hylobates lar atrophin-1,accession number AJ133273,Smith-Waterman Score=88.
atggatgctggtgaggatgcagagaaaggggaacccctgtgcactgttggctctcctgttcgtcctccaggggcccacgctagcccctcacctcccctgaagccttttctaaccgctgcggcctccgtggtcccccacgcctgtgttcctgtaggacgtttacagttcacacgatgtctcatctctcggtatatgtctcccagattcttcctgctgcagcagctggcatgggcctcacagcttgcaccacctgttcaggcctgcaaggcatctattagggcttctggcactgctgcttctgctaactgcgctttctcaagataccatgttcattgcagcattgccttccaaatcaaagtcttacacaacctaatagttctgactgttattattcctgcagcagagcacatggcctggggtcctggaattgcccaacctaacccaccacatagggcatcagggcactcctcctgggggcctgaggttgggcctaaactctcaaccactgccatcttagttggcacctacccgcaagtgccacctgtaggcctggagactggcccacccagcttatttcagccactgccaatatcaacacacactgcttggaacacagagaattgtcctgccaatgctactgtcattgcccatcccacactagctgcccaggggaccaagaatccacccactctcctagttcaccactgccactatcagcatctaagcctaaaagacgacgggacacggagagagaactcactaaagttgggggaaggcaaggtcattctacagactgaggggatccagaaggggatggatccaacaatggaatatgcaacaaactattggaagaaattacagctttggaaaagaagacaaacagctctccctgcgatcctgcatcttcctgtggagcactattaccctgagctgtaa

SEQ ID NO: 9873 - DNA, 910 bp, Homo sapiens
  SIMILAR (319)..(615): 591254mologous to Homo sapiens Colon cancer associated antigen precursor sequence,accession number Y07104,Smith-Waterman Score=230.
atggaaagtttggacacagagacaagcacatggggagaatgccacaggaagattagaggtatggtgccacaagtcaaagaacttgcagaagaggaagaagcccctccagatggtgctgttgccgaatacagaagagaaaagcaaaagtatgaagctttgaggaagcaacagtcaaagaagggaacttcccgggaagatcagcaaataattattaagaacctgccatgtactaatcactgtatttggcagtcaacacatgaacacatccctgctctctctgatctatcagggaaaagagctaaacaagtaataccagtgaaagggggtgagcattatgaaaggacccttgcactgctgaaccagtttaaatctaaactcactcaagcaattgctgaaacgcctgaaaatgacattcctggaaacagaagtaggaagatgatgaaggatggatgtcacatgtactttcagtttgagggtaaaagcaggaaaagtggaaaggtgccaagcatgcaagactcagatacatttgaaatctatgatcctcggaatccccagtgaataaaagaagggaggggaagaaagcaaaaagcctgatgagagagaaaaaagaaagaagattaaaatgagaataatgataacccagaacttgcctggaaatgtgccctacaatggcccttgtaacagcccattgttccccaacagcatcaccttaggggtgtgaaaagaagtatttttgaacctgttgtctggttttgaaaaacaattatcttgttttgcaaattgtggaatgatgtaagcaaatgcttttggttactggtacatgtgttttttcctagctgaccttttatattgcctaaatctgaaataaaataactttccttccacattacatgttaaaaaaaaaaaaaaa

SEQ ID NO: 9874 - DNA, 478 bp, Homo sapiens
  SIMILAR (1)..(279): 881254mologous to Homo sapiens C361A3.1 (JNK/SAPK-associated protein-1),accession number AL031717,Smith-Waterman Score=408.
  misc_feature (1)...(478): n = a,t,c or g
cccatgcgtccggccttcacgcgggtggagatggcccgtgtgctcatggagcggaaccagtacaaggagcggctgatggagctgcaggaggctgtgcggtggactgagatgatcagagcgtcccgagagcacccatccgtccaggagaagaagaagtcgaccatctggcagttcttcagccgcctcttcagctcttcctccagccccctccggcncaagcgcccctatccctcggtgaacatccactacaagtcacccaccgagggctgcagcgtgcgctgccggcttctccccaccaccctgccacctccactgtgatgtatgtccgctccctcgtctgttcccccaggatctcgaagtgactccgggctgagcagtggggcggctgggggaggggtgacgattctcctcaggctttggccctgcaagcaaacccacatatctgctctgtatgtaataaatgtcttaacgtcaaaaa

SEQ ID NO: 9875 - DNA, 186 bp, Homo sapiens
  SIMILAR (2)..(184): 931254mologous to Mus musculus JNK interacting protein- 3a,accession number AF178636,Smith-Waterman Score=290.
agtgaagtccgaggccatcatcgcccgccgtgaacccaaagaagaggcggaggatgacaaaatccccatggcccagcgccgccgcttcacgcgggtggagatggcccgtgtgctcatggagcggaaccagtacaaggagcggctgatggagctgcaggaggctgtgcggtggactgagatgatcag

SEQ ID NO: 9876 - DNA, 444 bp, Homo sapiens
  SIMILAR (439)..(350): 631254mologous to Homo sapiens Fragment of human secreted protein encoded by gene 3,accession number Y36366,Smith-Waterman Score=107.
  misc_feature (1)...(444): n = a,t,c or g
ctctctgcttccccctccgctcttgaccctgcatatccaggattgaactgccagcctcagaggaggcagcaccgagggggcctgtttgaagcaagcagcatttgggatatgtgcccttcctcagggtctgcttggagcagctcctctgcaggcacagcctggactattcccaggcacagctgtgggcccaggagccagctcaggtgctcccctccaccatgggcaggctgtgcaaaaagccaccggcttttctcagcatttgctgctgggcctctcctgggactaccagtgtggctcttacgtgttttctttgctaaaataaaccctagttcttnnnnnnnnnnnnnnngggcggccgttttaaagaatccctgggggggcccaagtttacccgggcatgcaaggtaatagttttttccttatagggaagcgtattataacctc

SEQ ID NO: 9877 - DNA, 341 bp, Homo sapiens
  SIMILAR (16)..(111): 531254mologous to Homo sapiens Fragment of human secreted protein encoded by gene 3,accession number Y36366,Smith-Waterman Score=100.
  misc_feature (1)...(341): n = a,t,c or g
tcccaaaattcccaggtaggttataattcggccccctataaggaaaaaactattaccttgccagcccgggtaaacttgggcccccccaaggatcctttaaaacggcccccccnnnnnnnnnnnnnnnnnggggttttaccagttttatttctagactttcatgtttgtctttttgtcttctgctggaaacatgccggttacatgttggtgctgggaagcgccgcggtgcaaccagaaatgcacagacccagccgcccgccgcccagaccctcagacttgcgcgtcacaggacagactccgctgtgccccgtgcacttgccaccagcctttggcctctcgat

SEQ ID NO: 9878 - DNA, 439 bp, Homo sapiens
  SIMILAR (42)..(137): 621254mologous to Homo sapiens Fragment of human secreted protein encoded by gene 3,accession number Y36366,Smith-Waterman Score=114.
  misc_feature (1)...(439): n = a,t,c or g
ctctcaccacaaagataaggttccctccccaagatcccaaggtaggttataatacggctccctatagggaaagaactattcccttgcatgcccgggtaaacttgggcccccccaaggatcctttaaaacggcccccccnnnnnnnnnnnnnnnnnnnacgaaaccaggtttattaaaatttctctacaagtcagaaacggccatctcactgttcacatatatacacgtatgtacaggaagaacctagtgtttctagctttcccggcagaaggccctgccagcccagagtccttagtcggataatgtatcacagatacaacagtcgagcaaccacgagagcgttagtgcgacagaggcctctgtcctccctcttctcaaagtcccatgattctgtcaaggtaatattgccaataatcggacgcgtgggcggacgcgtggg

SEQ ID NO: 9879 - DNA, 419 bp, Homo sapiens
  SIMILAR (4)..(111): 611254mologous to Homo sapiens Fragment of human secreted protein encoded by gene 3,accession number Y36366,Smith-Waterman Score=125.
  misc_feature (1)...(419): n = a,t,c or g
nacgacgggcagggcctaggttataattcggccccctataaggaaaaaactattcncttgcatgcccgggtaaacttgggccccccaagggatcctttaaaacggccgccccnnnnnnnnnnnnnncttactaatgccttctcttctccctgcccctgtggcctaggcccaggttctagggcaggtacagtgaggggtgaatggaatgggcagtggtcgccaggatggcctcccacccagctcagagacctggtgaggaccacccagaagggctgtgcagagggttagaggccacacagaggggcactcatgtttttgtgggggatgcacagctcattaaacagtcaccagtcatgggaggaggctggtcaggggctaggggacttgctcacagtagttgccagctctctccaccttgc

SEQ ID NO: 9880 - DNA, 406 bp, Homo sapiens
  SIMILAR (350)..(246): 521254mologous to Homo sapiens Fragment of human secreted protein encoded by gene 3,accession number Y36366,Smith-Waterman Score=106.
  misc_feature (1)...(406): n = a,t,c or g
cggacgcgtgggcgactcttctatataatcagtttgatgatctgaattagaaaatacccctggataatcatgttcttgatacacatcatcaaactgattatatagaagagttggctttaaaatgtttgcaaatgtcnnnnnnnnnnaatactggaagaaaaaatattctgttgggtctcatacagggcttaggatgtctttcacagagcttattaaaaagatgaaacctgnnnnnnnnnnnnnngggggggccgttttaaaggatccctgggggggccaaagtttacccgggcatgcaaggaaatagttttttccctatagggagccgaattaaaacctacctgggaatctttgaaaagaacccttacttttggggggggacataatgggacaacctacctacaga

SEQ ID NO: 9881 - DNA, 374 bp, Homo sapiens
  SIMILAR (374)..(219): 1001254mologous to Homo sapiens pancreatic tumor-related protein,accession number M55409,Smith-Waterman Score=290.
  misc_feature (1)...(374): n = a,t,c or g
gttataatccggctccctataaggaaaaaactattaccttgcatgcccgcgtaaacttgggcccccccagggatcctttaaaacggcccccccnnnnnnnnnnnnnnnnnncaatgttcagtttcctttaatgacccccatctccctgaagggcaggtgcaggcagctaggtgatggcaagagatgttcacttgaagatcttgccctgattgaaggatgcccacatgctggaaggccccctcccaggaaaagtactctcgaaccagcgtctgggtctcctcgctgccaggatccagtttccgccatgtgtatgactcgtagtccacctgccaatctggactcagcggaaaggcaagctcctggcctcggaagac

SEQ ID NO: 9882 - DNA, 427 bp, Homo sapiens
  SIMILAR (375)..(346): 701254mologous to Homo sapiens aspartylglucosaminidase, AGA {C-terminal, alternatively spliced} {EC 3.5.1.26},accession number S77772,Smith-Waterman Score=45.
  misc_feature (1)...(427): n = a,t,c or g
taaattctggagggaggttggcccaatatgtccccccccaaaaataagggttctttccaaaaattcccaagtaggttataattcggctccctataaggaaaaaactaattccttgcaagcccgggtaaagtttggcccccccaaggatcctttaaaacggccgccccnnnnnnnnnnnnnnnnnnnnaataaactttatttttagagcagttttaagttcatagcaaaattgattagaaggtacagagatgtcccatacacctcctactcccacacatgcacagccttccccattatcaatagcccccaacagagggatacatttgttaacaactgacgaacctacatatcattatcacccaaagtccacagtttatattattccttcaggagaattttcaaatacagaaattcctctaccaggaat

SEQ ID NO: 9883 - DNA, 421 bp, Homo sapiens
  SIMILAR (415)..(320): 621254mologous to Homo sapiens Fragment of human secreted protein encoded by gene 3,accession number Y36366,Smith-Waterman Score=116.
  misc_feature (1)...(421): n = a,t,c or g
tgggccctgccgggaccctgctcacaggcaggcttttcctccaacctgtggcgctgcagcagggcaggaaggggaaacacagctgatgaactgtggtgccacatgacccttgtggcacagatgcccacgtatgtgaaacacacatggacatgtgtcccagccacagtgttatgctctgtggctggctcacctttgctgagttccggggtgcaatgggggagggagggagggaaagcttcctcctaaatcaagcatctttctgttactgatgttcaataaaagaatagttgccaaggctgnnnnnnnnnnnnnnnnnnnngggcggccgttttaaaggatccttgggggggcccaagtttacccgggcatgcaaggaaataactctttccttatagggagccgaattataagctagctgggg

SEQ ID NO: 9884 - DNA, 415 bp, Homo sapiens
  SIMILAR (388)..(263): 421254mologous to Homo sapiens Fragment of human secreted protein encoded by gene 3,accession number Y36366,Smith-Waterman Score=107.
  misc_feature (1)...(415): n = a,t,c or g
aaaatgtgttttcagaggaaatcttattttcatattcagactttgtattgcccactcatttgtataagtgcgcttcggtacagcacgggtcctgctcccgcgatgtggaagtgtcacacggcacctgtacaaaaagactggctaacccctcttcctattaccttgatctcttcccccaacttcctaacacttattaatttatgaaactgtttttctcagcgcagttttgttttgtgtgtccattggattacaaactttattaaaaaatataaaacacnnnnnnnnnnnnnnggggcggccgttttaaaggatccttgggggggccaaagtttacgcgggcttgcaaggtaatagttttttccttatagggggccgaattaaaagctacctggggatttttgagaaggacccttag

SEQ ID NO: 9885 - DNA, 497 bp, Homo sapiens
  SIMILAR (387)..(292): 501254mologous to Homo sapiens Fragment of human secreted protein encoded by gene 3,accession number Y36366,Smith-Waterman Score=102.
  misc_feature (1)...(497): n = a,t,c or g
ttagtattagaagcagatcatttcccaaaattctaagagcagcagcatatgttgttgcttgtataaagcctagcgataatttttagactaacttccatggtgccctgttggcattagcactaccattgtaccctgctgtataataaacaatcttagacatttatcaactgttgatacaaatgttagtccctaaccactttttatatatgttttaaatttttgaaattcaagtgtaccttccataacataaaataaacactagactgtatcacnnnnnnnnnnnnnnnnnnggggcggccgttttaaaggatccttgggggggccaaagttaacccgggcatgcaaggtaatagttttttccttatagggagccgaattaaaacctacctgggaatttttggannnnnnnnnnnnnnnnnnnnnnnnnnnnnnnnnnnnnnnnnnnnnnnnnnnnnnnnnnnnnnnnnnnnnnnnnnnnnnnnnnnnnnnnnnnnngg

SEQ ID NO: 9886 - DNA, 372 bp, Homo sapiens
  SIMILAR (9)..(104): 461254mologous to Homo sapiens Fragment of human secreted protein encoded by gene 3,accession number Y36366,Smith-Waterman Score=88.
  misc_feature (1)...(372): n = a,t,c or g
atccccaggtagggtataattcggccccctataaggaaaaaaatatttccttgcaagcccgggtaaacttgggcccccccaaggatcctttaaaacgggcgccccnnnnnnnnnnnnnnnngtgaataagttatacttttatttttcagaaacaaaaatgacaagtggcaacttgcctttgtaaaagattaaagagtatcagagtaataagctatctctcatagagacagaagcccgagaaacactattatacagctttcaaaggaagtcctattaaataaatctcacaataatatactttaactcaacaaaacaaaaaccacaaaaaattatacagaactcataaaatgcggacgcgtgggtcgacccggg

SEQ ID NO: 9887 - DNA, 386 bp, Homo sapiens
  SIMILAR (352)..(257): 501254mologous to Homo sapiens Fragment of human secreted protein encoded by gene 3,accession number Y36366,Smith-Waterman Score=98.
  misc_feature (1)...(386): n = a,t,c or g
aaccaaatacctcaatttttgtttttgagtactgtactatcctgtaaatatatcttaagcaggtttgttttcagcactgatggaaaataccagtgttgggtttttttttagttgccaacagttgtatgtttgctgattatttatgacctgaaataatatatttcttcttctaagaagacattttgttacataaggatgacttttttatacaatggaataaattatggcatttctattgnnnnnnnnnnnnnnnnnggggcggccgttttaaaggatccttgggggggccaaagtttacgcgggcatgcaacgttatagttttttccttatagggagccgaataataacctacttggggatctttgggagggaactttatttctgtg

SEQ ID NO: 9888 - DNA, 646 bp, Homo sapiens
  SIMILAR (416)..(646): 971254mologous to Homo sapiens C361A3.1 (JNK/SAPK-associated protein-1),accession number AL031717,Smith-Waterman Score=407.
cttcagccgcctcttcagctcttcctccagcccccctccggccaagcgcccctatccctcggtgaacatccactacaagtcacccaccactgccggcttcagccagcgccgcaaccatgccatgtgcccgatctcggcaggcagccggcccctggaattcttccctgacgacggggagctgggctgctttggctccacggtatttggttcaggatgtcccttggcagaggctgtgcccaccaacagtcagggggctgtgctgggctccacggtggcctctgcagcaaggagccgtttcaggcgtctgtccagcagggagtcgctggtcatgcctgtgccccggcggcactccaggacaagcctggggcactgtgggggccgctcaccctggacagagacatcacccatcattcttccactcagcgactgcacgtcctccgcccgtcgagagcagaagcgcgagcagtaccgccaggtgcgtgagcacgtgcgtaacgacgacggccgtctgcaggcctgcggctggagcctgcccgccaagtacaagcagctgagtcccaacgggggccaggaggacacgcggatgaagaacgtgccggtgccggtgtactgccgccctctggtggagaaggaccccaccatgaag

SEQ ID NO: 9889 - DNA, 633 bp, Homo sapiens
  SIMILAR (85)..(255): 1001254mologous to Homo sapiens glyoxalase II,accession number X90999,Smith-Waterman Score=299.
atggtcccttgcacaggtccagccctgctgggagttttctgccacacagatttgcggaagaacctgaccgtggacgagggcaccatgaaggtagaggtgctgcctgccctgaccgacaactacatgtacctggtcattgatgatgagaccaaggaggctgccattgtggatccggtgcagccccagaaggtcgtggacgcggcgagaaagcacggggtgaaactgaccacagtgctcaccacccaccaccactggcactgttatgatccccgcctagcagacctaactattcagcgctacccttgcctgcttcagattctgaaagcatctcccagtgttcttgctaaagaggctctggaagggctccatataatgccagtcattcacctgcaagagattggttgggcctatctggcctattcctaccttccaggcccactgcactcctgtctgggaggcccttatgagggcagcccagcccccgcacccacccccaaccagagaagcacagatcttggggagctgccccacaagcccccgctggccaccgagggctgcagccgctgcgctgccggcttctccccaccaccctgccacctccactgtgatgatctcgaagtgactccgggctga

SEQ ID NO: 9890 - DNA, 782 bp, Homo sapiens
  SIMILAR (355)..(768): 311254mologous to Escherichia coli Tail fiber protein GP37,accession number D90774,Smith-Waterman Score=91.
atgagcgtaagatttgtggccgataggggttacccgcatcggcatgaccaacgatcacgttatcagtcatttcaggctggatggctccagcctcgcattagcaaagatgagattatttcgcctgtggtgcagttttgctggtggattgaacacgctgacgggccgtccctctccccagcggccagcgacagcgactaccctcccggggagatgttcctggacagcgacgtgaacccagaggacccgggcgcagatggcgtgctggccggtatcaccctggtgggctgtgccacccgctgcaacgtgccgcggagcaactgctcctcccgaggggacaccccagtgctagacaaggggcagggggaggtggccaccatcgccaacgggaaggtcaacccgtcccagtccacagaggaggccacagaggccacggagcatcccgtggcgctgctcttcgctgctgacgcttgtctggtcgcctcatcttttgaagcagacgccgatgatgccgatgacgccgccgaactggctgacgatgcggcagccgtttttgaggattctgcgcttgtttccgacgctttcgcgttcgtttcggatgtcttcgctgcggaagcagacctcgctgctgcgctggcctgttcagtggcttcgccagccttcgttgtggctgttgaagcagacgatgcggcgctttctgccgattttccggcggcggtggcactggctgaggcctgcccggcacttgttgacgctgcactggcagacgacccacaaacaccgtc

SEQ ID NO: 9891 - DNA, 677 bp, Homo sapiens
  SIMILAR (28)..(462): 971254mologous to Homo sapiens C361A3.1 (JNK/SAPK-associated protein-1),accession number AL031717,Smith-Waterman Score=729.
atgcatggcctgggccgctgggacgcgtgtccacaggatgaaatgtccgagtcaggccagtcctcggcggccgccacacccagcaccacaggcaccaagtccaacacgcccacatcctccgtgccctcggccgccgtcacacccctcaacgagagcctgcagcccctgggggactatggcgtgggctccaagaacagcaagcgtgcccgggagaagcgcgacagccgcaacatggaagtacaggtcacccaggagatgcgcaacgtcagtataggcatgggcagcagtgacgagtggtctgatgttcaagacattattgactccacgccagagctggacatgtgtccagagacccgcctggaccgcacaggaagcagcccaacccagggcatcgtgaacaaagctttcggcatcaacaccgactccctgtaccatgagctgtcgacggcaggggtcttaggtcatcggggatgttgacgaaggggccgacctcctagggaataatgacaggaaaaaagtgtacacgtcagtacagacacggccaccacaggcctgtacattttctgtgaggctggttgaatccacacatgcagaactcgtgggtattgagggtcgactgtatcataaaattcacccgcttcgagtgcacggtgcggtgggttacagcgtactcacag

SEQ ID NO: 9892 - DNA, 444 bp, Homo sapiens
  SIMILAR (403)..(308): 621254mologous to Homo sapiens Fragment of human secreted protein encoded by gene 3,accession number Y36366,Smith-Waterman Score=112.
  misc_feature (1)...(444): n = a,t,c or g
tgaaagcagtcatcttcagcattttccagccctatagccaccccaagagtggttatgcctcctcgattgctccatactctaacatctagctggcttccctgtctattgccttttcctgtatctattttcctctatttcctatcattttattatcaccatgcaatgcctctggaataaaacatacaggagtctgtctctgctatggaatgccccatggggcatctcttgtgtacttattgtttaaggtttcctcaaactgtgatttttctgaacacaataaactattttgaagnnnnnnnnnnnnnnggggcgcccgttttaaaggatccctgggggggcccaagtttacccgggcatgcaaggtaatagctttttccctatagggagccgaattataacctacctggggatctttgggaagagaccttacttttggggggagaa

SEQ ID NO: 9893 - DNA, 2431 bp, Homo sapiens
  SIMILAR (1490)..(2428): 851254mologous to Homo sapiens c371H6.1 (KIAA0516 protein),accession number AL031718,Smith-Waterman Score=1350.
atgaaggagggagggtgggggtgtgatcccgtgggccgtggcgtgacctccggccatgtcctgcagatgaaactgctgcccttccggcagaagaaggcccacatcatggagatccagctgaacggtggcacggtggccgagaaggtggcctgggcccaggcccggctggagaagcaggtgcccgtgcacagcgtgttcagccagagtgaggtcattgatgtcattgctgtcaccaagggtcgaggcgtcaaaggggtcacaagccgctggcataccaagaagctgccgcggaagacccataagggcctgcgcaaggtggcctgcattggcgcctggcaccccgcccgcgtgggctgctccattgctcgggccgggcagaagggctatcaccaccgcacggagctcaacaagaagatcttccgcatcggcaggggcccgcacatggaggacgggaagctggtgaagaacaatgcatccaccagctacgacgtgactgccaagtccatcacaccgctgggtggcttcccccactacggggaagtgaacaacgacttcgtcatgctgaagggttgtattgctggtaccaagaagcgggtcattacgctgagaaagtccctcctggtgcatcacagtcgccaagccgtggagaatattgagctcaagttcattgacaccacctccaagttcggccatggccgcttccagacagcccaagagaagagggccttcatggctgacgggctgtccctctccccagcggccagcgacagcgactaccctcccggggagatgttcctggacagcgacgtgaacccagaggacccgggcgcagatggcgtgctggccggtatcaccctggtgggctgtgccacccgctgcaacgtgccgcggagcaactgctcctcccgaggggacaccccagtgctagacaaggggcagggggaggtggccaccatcgccaacgggaaggtcaacccgtcccagtccacagaggaggccacagaggccacggaggtgccagaccctgggcccagcgagccagagacagccacattgcggcccgggcctctcacagagcacgtcttcactgacccagccccgaccccgtcctctggcccccagcctggcagcgagaacgggccagagcctgacagcagcagcacacggccagagccagagcccagcggggaccccacgggagcaggcagcagtgctgcacccaccatgtggctgggagcccagaacggctggctctatgtgcactcggctgtggccaactggaagaagtgcctgcactccatcaagctgaaggattctgtgctgagcctggtgcatgtcaaaggccgtgtgctggtggctctggcggacgggaccctggccatcttccaccgtggtgaagatggccagtgggatctgagcaactatcacctaatggacctgggccacccgcaccactccatccgctgcatggctgttgtgtacgaccgcgtgtggtgtggctacaagaacaaggtgcacgtcatccagcccaagaccatgcagatagaggcgagtgccggccagggccccggggaggggaagaggctcctgctggccagcagctctcccgcatcttccatacggaagtccacgaggcctacccatgactccacagaagtcatttgacgcccacccgcggcgggagagccaggtgcggcagctggcgtggatcggcgatggcgtatgggtgtccatccgcctggactccaccctgaggctctaccatgcacacacgcaccagcatctacaggacgtggacattgagccctacgtcagcaagatgctaggcactggcaagctgggtttctccttcgtacgcatcacggccctgcttgtcgcgggcagccggctctgggtgggcaccggcaacggagtggtcatctccatccccctgacagagactgtggtcctgcaccgaggccagctcctggggctccgagccaataagacatcccccacctctggggagggcgcccgtcccgggggcatcatccacgtgtatggcgatgacagcagtgacagggcggccagcagcttcatcccctactgctccatggcccaggcccagctatgcttccatgggcaccgcgatgccgtgaagttctttgtctcggtgccagggaacgtgctggccaccctgaatggcagtgtgctggacagcccagccgagggccctgggccagctgcccctgcctcggaggtcgagggccagaagctgcggaacgtgctggtgctgagcggcggggagggctacatcgacttccgcattggagacggagaggacgacgagacggaggagggcgcaggggacatgagccaggtgaagcccgtgctgtccaaggcagagcgcagtcacatcatcgtgtggcaggtgtcctacacccccgagtga

SEQ ID NO: 9894 - DNA, 459 bp, Homo sapiens
  SIMILAR (69)..(179): 701254mologous to Homo sapiens Fragment of human secreted protein encoded by gene 3,accession number Y36366,Smith-Waterman Score=154.
  misc_feature (1)...(459): n = a,t,c or g
tccccnccaaaattaaggtcctttccaaaaattcccaggtaacagattttcccgtcccgacgttgttaaacgacgggcagtgcctaggttataattcgactccctataaggaaaaagctattacgttgcatgcccgcgtaaacttgggcccccccaaggatcctttaaaacggccgccccnnnnnnnnnnnnnnctcatttaacttttttaatgggtctcaaaattctgtgacaaatttttggtcaagttgtttccattaaaaagtactgattttaaaaactaataacttaaaactgccacacgcaaaaaagaaaaccaaagtggtccacaaaacattctcctttccttctgaaggttttacgatgcattgttatcattaaccagtcttttactactaaacttaaatggccaattgaaacaaacagttatgagaccgttcttccaccactgattaagag

SEQ ID NO: 9895 - DNA, 5007 bp, Homo sapiens
  SIMILAR (1295)..(3220): 791254mologous to Mus musculus JNK/SAPK-associated protein 1b,accession number AB043123,Smith-Waterman Score=2635.
  misc_feature (1)...(5007): n = a,t,c or g
gcgaccgccacacccagcaccacaggcaccaagtccaacacgcccacatcctccgtgccctcggccgccgtcacacccctcaacgagagcctgcagcccctgggggactatggcgtggtctccaagaacagcaagcgtgcccgggagaagcgcgacagccgcaagcatggaagtacaggtcacccaggagatgcgcaacgtcagtataggcatgggcagcagtgacgagtggtctgatgttcaagacattattgactccacgccagagctggacatgtgtccagagacccgcctggaccgcacaggaagcagcccaacccagggcatcgtgaacaaagctttcggcatcaacaccgactccctgtacccatgagctgtcgacggcagggtctggaggtcatcggggatgtggacgaaggggccgacctcctaggggagttctcaggaatgggcaaagaagtggggaatctgctactggaaaactcacagcttctggaaaccaaaaacgccttgaatgtggtgaagaatgacctgattgccaaggtcgaccagctgtccggggagcaggaggtgctgaggggcgagttggaggctgctaagcaggccaaagtcaagctggaaaaccgtatcaaggagctggaagaggaactgaaaagagtgaagtccgaggccatcatcgcccgccgtgaacccaaagaagaggcggaggatgtaagcagctatctctgtacagaatcggacaaaatccccatggcccagcgccgccgcttcacgcgggtggagatggcccgtgtgctcatggagcggaaccagtacaaggagcggctgatggagctgcaggaggctgtgcggtggactgagatgatcagagcgtcccgagagcacccatccgtccaggagaagaagaagtcgaccatctggcagttcttcagccgcctcttcagctcttcctccagcccccctccggccaagcgcccctatccctcggtgaacatccactacaagtcacccaccactgccggcttcagccagcgccgcaaccatgccatgtgcccgatctcggcaggcagccggcccctggaattcttccctgacgacgactgcacgtcctccgcccgtcgagagcagaagcgcgagcagtaccgccaggtgcgtgagcacgtgcgtaacgacgacggccgtctgcaggcctgcggctggagcctgcccgccaagtacaagcagctgagtcccaacgggggccaggaggacacgcggatgaagaacgtgccggtgccggtgtactgccgcccttctgtgggaaaagacccccacactgaccttgtgcgtggccccggccgccaacctgagcgggtggaggcccaatgaggacgacgctgggaatggagtcaagccagcgccaggccacggttcccctgacctcggaccgcgaaggagacggcgagcccaagagcgcccacacgtctcccgaaaagaaaaaggccaaggagctccctgaaatggacgccacctccagccggggtgtggatcctgaccagcaccctgaccaccagcaaggtggatgatcatcgacgccaaccagcggggcacggtggtggaccagttcaccgtctgcaacgcgcacgtgctgtgcatctccagcatccccgcggccagcgacagcgactaccctcccggggagatgttcttggacagcgacgtgaacccagaggacccgggcgcagatggcgtgctggccggtatcaccctggtgggctgtgccacccgctgcaacgtgccgcggagcaactgctcctcccgaggggacaccccagtgctagacaaggggcagggggaggtggccaccatcgccaacgggaaggtcaacccgtcccagtccacagaggaggccacagaggccacggaggtgccagaccctgggcccagcgagccagagacagccacattgcggcccgggcctctcacagagcacgtcttcactgacccagccccgaccccgtcctctggcccccagcctggcagcgagaacgggccagagcctgacagcagcagcacacggccagagccagagcccagcggggaccccacgggagcaggcagcagtgctgcacccaccatgtggctgggagcccagaacggctggctctatgtgcactcggctgtggccaactggaagaagtgcctgcactccatcaagctgaaggattctgtgctgagcctggtgcatgtcaaaggccgtgtgctggtggctctggcggacgggaccctggccatcttccaccgtggtgaagatggccagtgggatctgagcaactatcacctaatggacctgggccacccgcaccactccatccgctgcatggctgttgtgtacgaccgcgtgtggtgtggctacaagaacaaggtgcacgtcatccagcccaagaccatgcagatagagaagtcatttgacgcccacacgcggcgggagagccaggtgcggcagctggcgtggatcggcgatggcgtatgggtgtccatccgcctggactccaccctgaggctctaccatgcacacacgcaccagcatctacaggacgtggacattgagccctacgtcagcaagatgctaggcactggcaagctgggtttctccttcgtacgcatcacggccctgcttgtcgcgggcagccggctctgggtgggcaccggcaacggagtggtcatctccatccccctgacaagagactgtggtcctgcaccgaggccaagctcctggggcctccgagccaataagacatcccccacctctggggaagggcgcccgtcccgggggcaatcatccacgtgtatgggcgatgacagcagtgacagggcggccagaagcttcatcccctactgctccatggcccaggcccagctatgcttccatgggcaccgcgatgccgtgaagttctttgtctcggtgccagggaacgtgctggccaccctgaatgggagtgtgctggacagcccagccgagggccctgggccagctgcccctgcctcggaggtcgagggccagaagctgcggaacgtgctggtgctgagcggcggggagggctacatcgacttccgcattggagacggagaggacgacgagacggaggagggcgcaggggacatgagccaggtgaagcccgtgctgtccaaggcagagcgcagtcacatcatcgtgtggcaggtgtcctacacccccgagtgaagctgctgccctgcctggcccgacctgtacataggacccccgaccacctgacccccgcccggcccgcggggtagccagccaggcgccgccgcccctcttctaacctctcaacctgcagctttcacctgagtctggcccctccagcgggcagggagtgcggggatgcggatcaactgggaggaggaggggaggggtgcttccacccgaggggaagatgctctcgggacagtttcccgggcagctcctggccagcttccagcccagagtcctcaagtccagggcaccttgggcccagcgcaggcagaatccgaggtggtcctggctctaccctgggcctcctactccccagcacccctggaggaggcaggggctccccgccgccgaggctgcctgccctgggcccacctctgcatgctgctcatggggccaccctgcctcctgggccctcactctgcctaggggagctgggccaggcactagcctttgcccagggaggtgggcctcaggctgcccaggtgcctgcaccccagccggccttctctggggcctccccgtcgtcaagcctctatcctgtctgtccccaccccagctgtcccctgcccagggagctggcataaaagcacgaggcccggctccctggggcagctgcttgagaacagagactgctaccccatcctgacccatgcaggcaggctcttgccagccccgttctgacccgtgtccccccaggctttgcctgggcagaagactcaccttggaggagtgggccctggagtcctgtccctcccagaagcccccagggtgggatttctcaggctgccagggcaggcccaggcctcaggaagaaggggaggcccctggcctctccgggatcagtcctaggacacaggctcagcctcaggttgatgggggatgatgtgctcccggggcctgcctcctgcacggggctccacggagcccagctcccagacacgctactaagtgcctagggctgcccgctgtggcctgctcccagggagcaacagagaggcccccaagctgatgcccgtggggctgaggatggagccgcccccagccgactccaagcccgcagagggcagacgccaccctggactgctctccctgcccagctgggcctctctggccctaattcctaaccttcccaggcccactgcaactcctgtctgggaggcccttatgaggggcagcccagcccccccggcaccacccccaaccagagaagcacagatcttggggagctgccccacaagcccccgttggccaccgaagggcttgcaatgcgtgcgctgcccggcttctccccgaccaccctgccacctccactgtgatgtatgtccgctccctcgtctgttcccccaggatctcgaagtgactccgggctgagcagtggggcggctgggggaggggtgacgattctcctcaggctttggccctgcaagcaaacccccatatttgctctgtatgtaataaatgttttaacgtcgnnnnnnnnnnnnnnggggcggccgttttaaaggatccttcggggggcccaaagtttacgcgggctgtgcaaggtaatatttttttccttatggggggccgaataaaaacctacctgggaatttttgggaaaggacccttacttctgggggggaacaaaatgggacaacctacctacggagattaaaagctttagggaaaataaaaaattttaaagggaaaaaggggtaaaactacctgcatatgctggctgctggaaagttttgttaactgagaataat

SEQ ID NO: 9896 - DNA, 665 bp, Homo sapiens
  SIMILAR (440)..(312): 361254mologous to Drosophila melanogaster Mst84Dd,accession number X67703,Smith-Waterman Score=46.
ttaatgcccctgaactgctcttgtgtgcgtcgccagctctttcttgacgtgcttgatggaaccaaagcattactccatagtccagcttcagtgaactgctttcgccttggctccatgaagtgcactctgctgcttatcctcctccggcagtggaagagagagttaggttctgtggatgaaatcccttggacccttgacggagatcctggagggagtgctgcaggccgaccagcaactcatggagaagaccaaggccaaggtgttctcagcattcatcacagtgttgcaaatgaaggagatgaaagtaagtgacatcccccagtactcccagctggtgctgaatgtctgtgagaccctccaagaggaagtgattgcactcttcgaccagacccgccacagtctggcattaggcagtgccacagaggacaaggacagcatggagactgacgactgtcctcacgctgcagacgccccctagaggaactttccttcctttccagcattccccacagcactgccggccaggggagaggcggcagcccagcagagggctctatgcacgggtttcaaacctgttttccacactctgtctttgcagttttggtaattctgtggtctatttatacagatattaaaatcttgtttatagaaaaaaaaagaaaaaa

SEQ ID NO: 9897 - DNA, 5957 bp, Homo sapiens
  SIMILAR (899)..(1846): 231254mologous to Arabidopsis thaliana putative protein,accession number AL035656,Smith-Waterman Score=149.
  misc_feature (1)...(5957): n = a,t,c or g
cgccggcgggccgtgtgtgaggagcagtagagaactgtggactattctgcttggaaggtcagctctgagagagctgagtcagattgaggcagaactgaataaacattggcggcgattgttagaggggctttcttactacaaacctcccagtccaagttcagctgaaaaagtgaaagctaataaagatgtagcttcaccattgaaggaactgggtttaagaatcagcaagtttttgggtcttgatgaagaacagagtgtgcagttactccagtgttacctgcaagaggactacaggggtactcgggactcagtaaagacagtactgcaagatgagaggcagagccaggccttaatcctgaagattgcagattattattatgaagaaagaacctgtattcttcgttgtgtcttacaccttctcacttacttccaagatgaaagacacccctatagggttgaatatgcagactgtgttgataaattggagaaggaactagtttcaaaatacagacagcagttcgaagagctttataaaactgaagcaccaacttgggagacacatggaaatctcatgacagagcgccaagtgtctcgctggtttgttcagtgccttcgggaacagtccatgctgctagaaattattttcctttattatgcatactttgagatggcacccagtgacttacttgtattaaccaagatgtttaaagagcaaggatttggtagtaggcagaccaataggcacctggtggatgagactatggatccttttgtagatcggattggctacttcagtgccctcatcctggtggagggcatggatatcgagtccttgcataagtgtgctttggatgacagaagagaactgcatcagtttgcgcaggatgggcttatttgtcaggatatggactgtttaatgttgacctttggggacattccacatcatgccccagtgcttttggcctgggctctcctccgtcacactctgaacccagaagagacaagcagtgtggtccggaagataggtggcacagccatccagctgaatgtgtttcagtacttgacccgattgctccagtcccttgccagtgggggaaatgattgcaccaccagcactgcatgcatgtgtgtctatggactgctctctttcgttctgacctcgttggagctgcacaccctgggcaatcagcaggatataattgatacagcatgtgaagtattggccgacccttctcttccggaactgttctggggaacagagccaacttctggccttgggatcattctggacagtgtgtgtggaatgtttccccaccttctctccccactcctgcaactgctccgagccctggtatcagggaagtccacagccaaaaaggtgtatagcttcttggataagatgtctttctacaatgaactttataaacacaagcctcatgatgtgatctcccatgaagatggaactctttggcggagacaaacacccaaactcctttatccccttgggggtcaaaccaaccttcgcatacctcaaggcactgtgggccaagtaatgttggatgatagggcatacctggtacgctgggaatactcctatagcagctggaccctctttacctgcgagattgaaatgttgcttcatgttgtttcaactgcagatgtgattcagcactgccagcgagtcaaacccatcattgatctcgtccataaggtcatcagtacagacctgtcgatagcagactgtctcctgcccatcacatctcgcatctacatgctgctgcagcggttaacgacagtgatctccccacctgtggatgtcattgcttcttgtgtcaactgcttaactgttttggctgcccgcaatccagcaaaggtctggactgatcttcgtcacacaggttttttaccatttgtggcccatcctgtctccagcctgagtcagatgattagtgcggaagggatgaatgctggagggtacggaaacctcttgatgaacagtgaacagcctcagggcgagtatggggttactattgcctttctgcgcttgatcaccacccttgtcaaggggcaacttggtagtacccagagccaaggacttgtaccctgtgtaatgtttgtgctgaaggagatgcttcccagctaccataagtggcgctacaactctcatggagtgagggaacagattggttgcctgatcttggagctgattcatgcgatactgaacctgtgccacgagacagacctgcacagcagtcatactcccagcctgcagtttctctgcatctgcagcctggcatacacagaagcaggacagacagttatcaatatcatgggcattggcgtggacaccattgacatggtgatggctgctcagcctcgaagtgatggggcagagggccaggggcagggccagctgctgatcaagacagtgaaactggcattctccgtcaccaacaatgttattcggctgaaacctccttctaatgtggtgtcccccctggaacaggctctctcacaacatggtgctcatggaaacaacctcattgctgttctagccaaatacatctaccacaaacatgaccctgctttgccacgtcttgccattcagctgctgaaacgtctggccacggtggccccaatgtcagtgtatgcttgtctgggcaatgatgcggctgccattcgtgatgccttcctgacccgattgcagagcaaaattgaggacatgcgcatcaaagtcatgattctagagttcctcactgttgcagtagagacccagccaggcctcatcgaactgtttctgaacctggaagttaaggatggcagtgatggctcaaaggaattcagccttgggatgtggagctgtctccatgcagtgctggagctgattgattcccaacagcaagatcgatactggtgcccacccctgctgcatcgtgccgccattgcctttttgcatgctctgtggcaggatcggagggacagtgccatgctggtcctccgaaccaaacccaagttttgggaaaatttaaccagtccgctgtttggaaccctttctcctccctctgaaacatcagagcccagcatcctggaaacctgtgccctaatcatgaagataatttgcttggagatatactatgtagtaaagggttcattagaccagtcattaaaggatacactgaagaaattttccatcgagaaacgctttgcctactggtcagggtatgtcaagtcattggcagttcacgtggccgaaacagaaggcagcagctgcacctccttgttagagtaccagatgctggtgtccgcctggaggatgcttctcatcattgccaccactcatgcagatataatgcacctgactgactctgtggtgcgtcgccagctctttcttgacgtgcttgatggaaccaaagcattactcctagttccagcctcagtgaactgccttcgccttggctccatgaagtgcactctgctgcttatcctcctccggcagtggaagagagagttaggttctgtggatgaaatccttggacccttgacggagatcctggagggagtgctgcaggccgaccagcaactcatggagaagaccaaggccaaggtgttctcagcattcatcacagtgttgcaaatgaaggagatgaaagtaagtgacatcccccagtactcccagctggtgctgaatgtctgtgagaccctccaagaggaagtgattgcactcttcgaccagacccgccacagtctggcattaggcagtgccacagaggacaaggacagcatggagactgacgactgttctcggtcccggcacagggaccagcgtgatggggtgtgtgtcctgggcctgcacctggccaaggagctgtgtgaggtagacgaggatggtgactcctggctgcaggtaacccgcaggctccccatcctacccaccctcctcaccactctagaggtgagccttcgcatgaagcagaacctgcatttcactgaggccacattgcatctgctcctcaccctggctcgcactcagcagggagccacagcagtggctggagctggcatcacccagagcatttgtttgccccttctgagtgtgtaccagctgagcaccaacggcacagcacagacacctagtgcctctcggaagtccctggatgccccctcttggccaggagtctaccgcctgtccatgtccctgatggagcagctgctcaaaactctgcgctacaacttcctgcctgaggccctggacttcgtgggtgtccaccaggagcggaccttacagtgcctcaacgcagtgaggacagtgcagagtctggcctgcctggaggaggcggaccacaccgtgggttttattctgcagctctctaacttcatgaaggagtggcacttccacctgcctcagctcatgcgtgatatccaggtcaacctgggttacttgtgccaggcatgtacctctctcctgcacagtcgaaagatgctgcagcattacttacagaacaaaaatggggatggcctcccctcagctgttgcccagcgagtccagaggccaccgtctgctgcttctgctgccccctcctcctcaaagcagcccgctgctgacacagaggcatcagagcagcaggccttgcacacagtccagtatggccttctcaagatcctcagcaagacgctggcagccctgcgccacttcaccccagatgtctgccagattctgctggatcagtccctggaccttgctgaatacaacttcctgtttgccctgagctttaccactcccacctttgactccgaagtggccccctccttcgggacccttctggccacagtgaatgtggccctcaacatgcttggagagctggacaagaaaaaggagcccctcacccaggcagtggggctcagcacacaggcagaagggaccaggacgttaaagtccctcctgatgtttaccatggaaaactgcttctacctgctcatctctcaggcgatgcggtaccttagggacccggctgtgcacccccgggacaaacagcggatgaagcaggagcntcagctctgagttgagcacgctgctgtccagcctctcgcgctacttccgcctggggagcccccagctccccgtgccacttggtgtcctcccctccgccggcagggcaaagtccacctctcctctccaaaagccaagcccttggagagtcaggagcctctgaatccagttggtgcaggcgtttgtcgggcatatgcaaaagatagggcagtgctgttctgcccaacctacccctctccaccagcctacactgcacccctggctggcaggggtgcctgcctggctgctagggccctatacaaatggagggcaccctccctgtcaaccccccctcccggaagtagcccacgactcccagcccacccaccccactgacgttatttttatactaaatgaaaaggtcccaccacagccatgggaacccgagtcttctgtgctcaggtcctcacgctgcagacgccccctagaggaactttccttcctttccagcattccccacatgcactgccggccaggggagaggcggcagcccagcagagggctctatgcacgggtttcaaacctgttttccacactctgtctttgcagttttggtaattctgtggtctatttatacagatattaaaatcttgtttatagacagcctgtgtgatgtttaacttcaaagcccagggatgacaacgtggctctcagaacctaggaaaactcccctgggccaggcgcctgggagtggggctgcagccttcgggggaagggcaggtactgatggatgggctagttcaccagcatctcctcattcctgtccttgggctgagggtttggctgggtgggcgctgtcagatattcccttccttgggcctgcgctggtcctgtccttgaccctgctttcattggcccagtgggctgagct

SEQ ID NO: 9898 - DNA, 783 bp, Homo sapiens
  SIMILAR (273)..(401): 581254mologous to Homo sapiens calcium channel alpha2-delta3 subunit,accession number AJ272268,Smith-Waterman Score=89.
atggtggatcaagaggcaatatttgggtgcaaaaacaggaataactgttcccatttagagccaccagtttccaggcttgaaggtggggcctttgtcagggacctgctgtctcctacgcagtatttacttgcctcctgtccatatcagtatgatgggtcctttgtcatccagcaaatcccaagcagcaacctgttcatggtggtggtggacagcagctgcctctgtgaatctgtggcccccatcaccatggcacccattgaaatcaggtatatccttttgtgtgcaggtccactcactaccacggaaaccagagaatgcaagggagtgtgggggtgcgccgagtctcccaagcccagacagtcctccttctgctccctctgcttttgatgctcttctcaaggtgacactgactgagatgttctcttactgactgagatgttctcttggcatgctaaatcatggataaactgtgaaccccaaaatatggtgcaaacatacgagacatgaatatagtcccaacccatcagcatcctcatccatgattttaaaactgtgcgtgatataaactctttaaagatatgttgacaaaaagttatctatcatctttttactttgccagtcatgcaaatgtgagtttgccacatgataatcacccttcatcagaaatgggaccgcaagtggtaggcagtgtcccttctgcttgaaacctattgaaaccaatttaaaactgtgtactttttaaataaataaagtatattaaaatcataaaaaaaaaaaaaaaaa

SEQ ID NO: 9899 - DNA, 1377 bp, Homo sapiens
  SIMILAR (748)..(1173): 741254mologous to Homo sapiens DNA helicase recQ5 beta,accession number AB042824,Smith-Waterman Score=494.
atggtggtgcatgtctgtgatcccagccaggccactgccatcaccgcctgctggtcctcacaggcgtcggggccccaggcagtgagaaggcggctgctgactcctctttcctccccagctgccagggacctggtgagcaaagagggcttccggcgggcccggcacgtggtgggggagattcggcgcacggcccaggcagcggccgccctgagacgtggcgactacagacctttggccgcctcatgggagagccaccgctcactcaggagcactacggcgggactgccaccttctacctctctcaagcagccgatggagccaaggtgctgtgcttgtgaggcacccccaggacagcacacggtgagggtgcgggctgcaggccagtcccacggctctgtgcccggtgccatcttccatatccgggtgctcaataaacttgtgcctccaatgtggtacctgcctcctctagaggaccaagtggaccacttgctaaccctaaaggtacgagtaagttccctgaactcgaagctctctgcacaggaaaggaaggagctgcttgctgacctggagcgagaaaagccccagaccaagattctgtacatcaccccagagatggcagcttcatcctccttccagcccaccctgaactccctggtgtcccgccacctgctgtcttacttggtggtggatgaagctcattgtgtttcccaatgggggcatgactttcgtcctgactacttgcgtctggccaccccacaggtccaagaggacgtgtttgctgccctgcacctgaagaaaccagttgccatcttcaagactccctgcttccgggccaacctcttctatgatgtgcaattcaaggaactgatttctgatcctatgaacctgaaggacttctccttaaggctcttggacaggaggctgataaaggggactagagaggcttgtgaacagctggccatagagctcagctgcaggggtgtgaacgccaaggcttaccatgcagatcctggttatcaggtgacccaccatcttattgcagatactcaggcagagctaaaggctgaaggctctgaaagaacgctggtgcagaacgactggatggaggagaaggtccctgtaattgttgcaaccattagttttgggatgggagtggataaagccaatgtcagggtggattgcctagtgctgtgcccaaaggaccaggtgcatgtgctccttcgagggctagaggggaaggaagtccggagagagtccttagaatacagcctgaatgctgacagctcctgtgcggcctgctcccaggagttgtttaaagctttgccgccacctctcacacttgctgactcagaagacctctcctggaaggagcggtga

SEQ ID NO: 9900 - DNA, 205 bp, Homo sapiens
  SIMILAR (26)..(145): 341254mologous to Homo sapiens Human secreted protein encoded by gene No. 36,accession number Y27741,Smith-Waterman Score=50.
ggtggattgcctagtgctgtgcccaaaggaccaggtgcatgtgctccttcgagggctagaggggaaggaagtccggagagagtccttagaatacagcctgaatgctgacagctcctgtgcggcctgctcccaggagttgtttaaagctttgccgccacctctcacacttgctgactcagaagacctctcctggaaggagcggtga

SEQ ID NO: 9901 - DNA, 2456 bp, Homo sapiens
  SIMILAR (112)..(606): 991254mologous to Homo sapiens DNA helicase recQ5 beta,accession number AB042824,Smith-Waterman Score=888.
  misc_feature (1)...(2456): n = a,t,c or g
atggtgccggacgcggcagtgctcgctcagctagcgattcgggctcgggtgaacagacgctggccgactgggctctccgcccctcacctctgcggtgctgcctgctccaggtgccgccatgccgccattgccaagtacttcggggatgcgctgcctgcctgcgccaaaggctgcgaccactgccagaaccccacggccgtgcggaggcggctggaggccttggagcgcagcagcagctggagcaagacctgcatcgggccctcccaggggaacggctttgaccccgagctgtacgagggaggccgcaagggctacgggggcttcagcaggtatgacgaaggttctggaggcagcggggatgaaggcagagatgaggcccacaagcgggagtggaacctcttctatcagaagcagatgcagctgcgcaagggcaaagaccccaagatagaagaatttgtacccccagatgagaactgtcccctgaaagaggcttctagcaggaggatccccaggctgactgtgaaggcacgggagcactgcctgcggcttctggaggaggcgctgagcagcaaccgccagtcaacacgtaccgctgatgaagctgactctccgtgccaaggccgtggagctggaacatgagacattccggaacgccaaggtggccaacctctacaaggccagcgtgctgaagaaggtggccgatatccacagagcctccaaggatgggcagccctatgacatgggaggcagtgccaagagctgcagtgcccaagctgagcccccggagcccaatgagtatgacattccaccagcctcccatgtgtactcgctcaaacccaagcgggtgggagctggtttccccaaaggctcctgcccgttccagacggccacggaactgatggagacgactcggatcagggagcaagccccccagcccgagcggggaggcgagcacgagcccccgagccggccctgtggcctcctggatgaggatgggagtgagcccctccctgggcccagaggggaggtccctggaggcagcgctcactatggggggccctcccctgagaagaaggcaaaaagttcctctgggggcagttcccttgccaagggccgggctagcaagaaacagcagctcctagccacagcggcccacaaggattctcagagcatcgcccgcttcttctgccgaagggtggaaagcccagctctgctggcatcagccccagaggcagaaggtgcctgcccctcctgtgagggggtttcagggacccccgattggccccagagaagtacacaggggaggaagatggagccgggggacattcgcctgcccctccccagactgaggagtgcctcagggagaggccaagcacctgcccgcccagagaccagggcacccctgaagtccagcccacccctgcaaaggacacatggaaagggaaagcggcctcgattcccagcaaggagaacccagagagccagcctcagaagaggccacgcccctcagccaatccctccgtcgtagctgaggtcaagggcagcgtctcggccagcgaacagggcaccttgaatcccacggctcaagaccccttccagctctccgctcctggcgtctccttgaaggaggcagcaaatgttgtggtcaagtgcctcacccctttctacaaggagggcaagtttgcttccaaggagttgtttaaaggctttgcccgccacctctcacacttgctgactcagaagacctctcctggaaggagcgtgaaagaagaggcccagaacctcatcagggcacttcttccatgggccgggcccggtgcgagagcgaagctgactgggcatggccgtgtgtggcccccagaagatgaccaactgctggctgggcagggccgcagtcctcccccagattctagcatggggtcatcctggggcctcacctgcttgatgccaggggccatcgtcttttctcagtcctttctccttttccaaaccatacttggctttggggatgaccccagacaccccttgaatccaggtcagaggtcaaccccacctttctttctgcttgcaaaagcttatagaccccttcttcaagagccggtcctcatggcttgggttttctggggacacatgtcgaggacaagaaggtggagggtggtggagctgctgctggaagaaggggaaggaagagtggcccctccccgagttctaagtcaggatgaggcccacctgtccaaggtatcggaacctacccaggggaccctcagatcctcccacccccctcccccatccattacgatgccgagttcccagccttgncccaggtcagagctgtggcagaggagaggcagccaggccctgttacctgctcagctcctgctcaggaaggccaggcctgacagatgtttgggagaggaataaagttgtgttgttgtggggcaaaaaaaaaaaaaaaa

SEQ ID NO: 9902 - DNA, 371 bp, Homo sapiens
  SIMILAR (2)..(85): 781254mologous to Homo sapiens dJ167A19.4 (novel protein),accession number AL031427,Smith-Waterman Score=105.
ggaattcgagcgtgtgactgcggaagctgtgaagccacgggagacctcggagcctatagcatcagctcagcgcttctgtgagaaattccctttcctttgaagttttttgccctttatttgcatccttaaagcagttcgcttgttttccctccttggaaaaattaattatgatagtattggcttatttatgatcaccaagacttgtattcccttagcatagcttacagtataagttcacacttagctttgagcaccagcaccaggaagacagctttttaaaattacttacttacgtaccatcttgttccaaaaaagatttgtggtggtacaaaagctatatagaatacagaagatgaaaaaggaattgagtg

SEQ ID NO: 9903 - DNA, 1430 bp, Homo sapiens
  SIMILAR (1158)..(1358): 1001254mologous to Homo sapiens dJ167A19.4 (novel protein),accession number AL031427,Smith-Waterman Score=357.
gcagtgctagtgctgccgctcgctgccccgggcaggggcacaggtaggtggcggccgcgggccgggccgctcgcggggccccgggttgcgtgtgggagcgggggcggggtgtgagaaaatgggcagctgcacatggtcaatctggctctggatggtgtcaggagtagcctgcagaagccaaggcctttcagactgttccccaaaggcttttctgtggagctttgcatgaacagggaagacgacactgcacggaaagagaagactgatcatttcatcttcacatacacccgagaggggaatcttcggtactccgccaaatccctcttcagccttgtcctgggtttcatctccgacaatgtggatcacattgattcccttattggctttcctgagcagattgctgaaaagctgttctctgctgctgaagccagacagaaattcactgagccagggtgcagggctggagggctttacagaaattcactggaggcctatgggaagtttgggtgctttgctccctgtgtttcttgctgtggaaacttccagacatctgttgcaagcttggagatgagcatgaacttctagaacatctcaccaatgaagccctgtctaggtactgacctgtcaccacttgcagatgaattgtttcagtattgttttaaaggctgatccaacaggattatcgagtgatgaaaagaggccttgagaatctaacattattagacttatcatgtaagttttcttcgaaattatagattattttaatgttggaagaatggccttagagatcatgtagttctttctctgggacagggctcaaggtaagacttttggttccttctctcatttttctagactcaacaatttgatattttgcctgtgctaattgggaatttgatcatagtaactgcaagacagagggctgggctgaccaggtactccagatttttcttccttgcggttgatgcagcttttcatcttaattccaagtgtcttatccaacaagcagggagactgctgagtcgtgtttcagaagcacactgagcttggtccagaacatgcatgatgaagcagctcagcgcttctgtgagaaattccctttcctttgaagttttttgccctttatttgcatccttaaagcagttcgcttgttttagaaactccagttctataaagagaaagccccagattgccatgggccagtgttgaaacacgaagctatctcaagccaggagtcaaagaagagcaagaagagaccttttgaggagtcagagacagaacagaataactcttcacaaccttcaaagcagaaatatgtatgtcttgctgtggaagactgggacttgttaaattcctattgattagtagatacaagttgacctttctctggcccccagctctagtgtttgagtaaaggagactgaggatga

SEQ ID NO: 9904 - DNA, 1276 bp, Homo sapiens
  SIMILAR (3)..(539): 831254mologous to Homo sapiens dJ167A19.4 (novel protein),accession number AL031427,Smith-Waterman Score=708.
  misc_feature (1)...(1276): n = a,t,c or g
ccgacaatgtggatcacattgattcccttattggctttcctgagcagattgctgaaaagctgttctttgctgctgaagccagacagaaattcactgagccaggtgcagggctgagggctttacaaaaattcactgaggcctatggaagtttggtgctttgctccctgtgtttgcgaaacaggtatctcgtgatttcagaaaagcttgaggagattaagtctttccgggagctgacctgcctggatctttcctgttgcaagcttggagatgagcatgaacttctagaacatctcaccaatgaagccctgtctagtgtaactcagctccacctgaaggataattgtttatctgatgctggggtgcggaagatgacagcaccagttcgagtgatgaaaagaggccttgaggaatctaacattattaggacttatcatgtaaccctggagatcacaggtggcagggcattgggataccntctttttctttttagggggaacttaaacttgctttagggatatctctggggacaggggctcaagggacatcaaaacccttcaagcacaagctccagacccacataggccttgttcactccaaagtgcctttgaaggaatttgatcatagtaactgcaagacagagggctgggctgaccagatcgttctgcagtgggagcgtgtgactgcggaagctgtgaagccacgggagacctcggagcctatagcagcagctcagcgcttctatgggaagcggtctcgagcagaagccccactgaaagtgtcccctggcagacacccacaatgaactcttcccgagaaactccaagttctataaagagaaagccccaagattgccatgggccaagtgttgaaacacgaagctatctcaaagcccaggagtccaaagaagagcaagaagagaccttttgaggagtcagagacagaacagaataactcttcacaaccttcaaagcagaaatatgtatgtcttgctgtggaagactgggacttgtttaaattcctattgattagtagatacaagttgacctttctctggcccccagctctagtgtttgagtaaaggagactgaggattatttatctttttgtttgaatttacctatggcattagcatagtaagcagatatttctacttttgtggtctgggaggggaatgctatggcactacgtcataatttctaatgcacattctcaatacatagtaatctcttccaaataaacatttttgctgtccttaaaagaaaagaagaaaaagtcg

SEQ ID NO: 9905 - DNA, 391 bp, Homo sapiens
  SIMILAR (291)..(350): 451254mologous to Homo sapiens A secreted protein encoded by clone fy243_8,accession number W80416,Smith-Waterman Score=42.
gtaaagcactgcctccatagaccaattctctgggatccctggaaaacatctggcatccagcaagtcttgacccctctttagaaagccatggagaaactggaagcaattctgttaattatttgctctctagaggcaattgggttaattaccctcccttccctatccatgacacaatttctccagttacatgtagaatgctgttatgtgtctcctgaccagaccccttatttcatagatgtggaaactgaggccatgaaggatgaggtgactgttcacaatccacatggctagttagtgtccagagcctggcctggacttctctcttgttctggggccttgagttctctccctcttctttagtacatatggccacaggtaacgtaatatgcgt

SEQ ID NO: 9906 - DNA, 1416 bp, Homo sapiens
  SIMILAR (4)..(501): 811254mologous to Homo sapiens homologous to mouse Rsu-1; putative,accession number L12535,Smith-Waterman Score=654.
atggtggtaccaccaaacatagcagaactgaagaatttggaagtgctcaactttttaaataaccagatcgagaagctgccaacacagatcagcaggcttcaaaaactcaaacacctgaaccttggatttttgtccccctgcaacagcatgaacaggctgaacatttcgccacaaggctttggctccctgccagctcttgaggttctggacttgacttacaacaacttgaatgaaaattatcttcctggaaacttcttctacctgaccaccctgtgtgcactctatctaagtgacaacgattttgaaatcctgccgccagatattgggaagctcacaaagttgcagatactcagcaatagggataacaacctgatctcactgcctaaggaaatcagggtgcttacccagcttaaagagctccacattcaggggaaccgcctcactgttctacccccagaattagggagcagaggcggctctggaagtcggtttagtgcggagaccgcgaccggaggagcgcagaacgctcctcccagcgtcctgggctccgcaggcacaatttttaaaccagaggcgaaatccgagtcccgccgccctccggggagggagcgtggccgcctagccgagccccttctctggctccgcccgcttttgcgccgcgaggccgcctgcgcctgcctttctcgcggccggaccgcgccggagtcccaggccccaggcagcccgggccgcagctgtcatggagaagcccggcgcgtacttggggtgcccggcaggagccccggccgcctcgcgcccttcttctcacccacgactgtggccggcggcggcctctgcttcccggacaaagctggagatgctgctgcggagtcggccctgggacctgcttcttctcttggctccggggcccgcagccgtcggggcccggaagggctccccggggcgttccctcaggagcggtggccagggctgatggggcgtgtacgacgcgggaccccgagcccggcagcagccaagtatggcaaggaccagcgcgagcatctccccactgcggccggggacggcgtggggtgggagccgacccgggacatccaggtgggatcggccaccgctcaggcgctgtcccaggcgaacgccgccaggggcaggctcagcaccgcccaggccgccggctcgttacatgtagaatgctgttatgtgtctcctggccagaccctttatttcacagatgtggaaattgaggccatgaaggatgagagcaggggcatctccatcttgtacaagcaccgccatcttaaagttccccttgatcaaaaactgcctaaatctaaaggtcatcagcctgatggctacggtcagcatgaccataaaccacaaatgacatctctgaccagaaacattgcaaccctaagataa

SEQ ID NO: 9907 - DNA, 2283 bp, Homo sapiens
  SIMILAR (1)..(336): 851254mologous to Homo sapiens homologous to mouse Rsu-1; putative,accession number L12535,Smith-Waterman Score=476.
atgaacaggctgaacatttcgccacaaggctttggctccctgccagctcttgaggttctggacttgacttacaacaacttgaatgaaaattatcttcctggaaacttcttctacctgaccaccctgtgtgcactctatctaagtgacaacgattttgaaatcctgccgccagatattgggaagctcacaaagttgcagatactcagcaatagggataacaacctgatctcactgcctaaggaaatcagggtgcttacccagcttaaagagctccacattcaggggaaccgcctcactgttctacccccagaattagcttcctcatcacggtgtggtcctctttcccacccatatgctggtaaaaggattcctagaaatgcagttttcaagtttgaacaaaacacaaccctggcacacccccccaaaaaaagcaggcagagagatgttgctggatgtaaccggatttccggaagccgcgacctcgaagcccccagcgtttctccaccgacggcggggccggggctcctggaatcctcggagccgcagctccagcctgcagcgcacgccttggcccccagggagcagagaggcagagtacccccctgcatccggagcatagcaagcatgccccaggctgaggacctgcgacttgggagcagaggcggctctggaagtcggtttagtgcggagaccgcgaccggaggagcgcagaacgctcctcccagcgtcctgggctccgcaggcacaatttttaaaccagaggcgaaatccgagtcccgccgccctccggggagggagcgtggccgcatagccgagccccttctctggctccgcccgcttttgcgccgcgaggccgcctgcgcctgcctttctcgcggccggaccgcgccggagtcccaggccccaggcagcccgggccgcagctgtcatggagaagcccggcgcgtacttggggtgcccggcaggagccccggccgcctcgcgcccttcttctcacccacgactgtggccggcggcggcctctgcttcccggacaaagctggagatgctgctgcggagtcggccctgggacctgcttcttctcttggctccggggcccgcagccgtcggggcccggaagggctccccggggcgttccctcaggagcggtggccagggctgatggggcgtgtacgacgcgggaccccgagcccggcagcagccaagtatggcaaggaccagcgcgagcatctccccactgcggccggggacggcgtggggtgggagccgacccgggacatccaggtgggatcggccaccgctcaggcgctgtcccaggcgaacgccgccaggggcaggctcagcaccgcccaggccgccggctcgttacatgtagaatgctgttatgtgtctcctggccagaccctttatttcacagatgtggaaattgaggccatgaaggatgaggaaagtcgcgtcctggtcaggaggactgccgactggtctgcgccagctgcagcgtcctgggtctctttggcccagccagtcgtgaggactgtggcccaggatgctgccgaacaattggctgtgagggacaatagaagcctaggtttcaggacaagccagtcctccaagcctcaggaaagctgtccagagtggatggactctcatctgtttgctccacttgtaccacaactaagagaccctgcagagcagctggcgctgggtgttatactcaagggtagtgggaattgctgggctaaagcattggagaacactctgtttctagagggaacaagaacagagcctgggctgttttggagtggctcttatcggctcttggtcatggtctgtgtcatgcagcaggatttggtgagccacagttataggcaaaagccatgtctccaggatgaaccacatgggtaccatgttcatagcagccaggacactggaaaccaggaacttgtagacctcttattgatggcagtggtggcctgtctgaagtggctgctgccatcacactggctgtggcaaggaggtgcagccagggctgcacattctgtggaaccagcagcagctggagacaaatgggagccccactcattcagagttggtggggtgggagctccctggatgcagccgcagccacccaactcttggctatggacccagccctcctgctccatggagcaagaaggagccacacccactctgggcacagctgtagctgcccaagttgtggctgcagacccaggcatccttgcacccttgggggccagggaaggcccccccttgcgggcttga

SEQ ID NO: 9908 - DNA, 1821 bp, Homo sapiens
  SIMILAR (1421)..(1669): 911254mologous to Homo sapiens homologous to mouse Rsu-1; putative,accession number L12535,Smith-Waterman Score=397.
gaattccgttttttttttttgacgtgacatctctttattggttcagtctatgcctggcccagcggcacgcccaggtccagggggggtctggttggaggtctctggacagtcaggggcagcatcagcagaaaccctgggtgtcggggggctgtgggagtagcagcactggtccccgcgttgacaggtgccctccttaaacctcttgcaaggaaatgtcttgagccgggcagcccgctggcaacatcttccggcggctccttccgcttgttctgaagcagcctgcgtctctcctccatagcttcgtcggccgccttgcccctgtgcgaggggaggagtaggtgggaccccatctgccctttaccccttctttccctggctgagccccacccccaccttaccaccactcaccctggccgggcacgaggccggggaccccagttggcctccgggttagcctggaagcgcttgagtcctcgctgtcgggagctggggttggcatcttcccggatggtgaagttggcctgcagcctgggctccacactgagaatgcggaacgctgggctagtctctgatagtcgctcccgtttcaccggacattccttctcccagcaacgcatgatgtcccagagggcagaggcaggggcatccgtcttcacagcgttcttacaggcgtgggagagtgagacccggaagtcagcgtggaggagggccgaccgcaactgcaggaggcttggtgtgttgcagtggatggtgctgctcagctggtgtgcgttctgccgaagcttgtggttgcacgcccatcgtcttaggggctaccttccgtgaccatgtccaagtctctgaagaagttggtggaggagagccgggagaagaaccagcccgaggtggacatgagtgaccggggcatctccaacatgctggatgtcaacggcctctttaccttatcccatatcacacaactggtcctcagccataacaagctaacaatggtgccaccgaacatcgcagaactgaagaatttggaggtgctcaacttttttaataaccaaatcgaggagctgcccacacagatcagtagccttcagaaactcaaacacctgaaccttggcatgaacaggctgaacactttgccacgaggcttcggctccctgccagctcttgaggttctggacttgacgtacaacaacttgagcgaaaattctcttcctgggaaacttcttctacctggaccaccctggcgtgcactctatctaagtgacaacgagttttgaaatcctgccgccagatattggggaagcttcacaaagttgcagatactcagccttagggataacgacctgatctcgctgcctaaggaaatcggggagcttacccagcttaaagagctccacattcaggggaaccgccttcaccgttgtgcccccagaacttaggaaacttgggattttaactgggccagaagcaggtattcaaagcagagaacaatccctgggtgacccccattgcagaccagttccagcttggcgtgtcccatgtttttgagtatatccgttctgagacatacaaatacctctacggcagacacatgcaggccaacccagaaccaccgaagaagaataatgacaaatctaaaaagatcagccggaaacccctggcagccaataacagataaagaaagggattggcatcggctggccttccagcaccttctctctccaacacttcattctctcttgccctgtctctcaaataaacccaatgctgcgtgtgaggccttttttatttttcttttcactctctttctaatgcttcccaccttac

SEQ ID NO: 9909 - DNA, 445 bp, Homo sapiens
  SIMILAR (4)..(99): 711254mologous to Homo sapiens kendrin,accession number U52962,Smith-Waterman Score=119.
  misc_feature (1)...(445): n = a,t,c or g
nttttggttaagaaatggcaagaagtagatcggaaaggagctctggcacaaggcaaagcccctcgcccagattctacttcaaagaaatcctgccacccgatgattaaacagtgaatanaatgtcatggctctttcctgcgacaattctatttgaggaaaagatttgtttttcccttttcccaaggaagctcgtgggacagcatgggcactactcttcatgtgcggtgacaccagcccccagatgccttgaattaagtgtcctcacctttatgcatgactgcaaagccagctggagcattttctatggagcctccgtatgttttaggcccatgaccttcgtgaggtgacgggcactcactcccatgagccctggctgtgtgctgttgtgtgcctatcggcagatccatccttcctgcctccaaggaggatacacagagaatgtatt

SEQ ID NO: 9910 - DNA, 10438 bp, Homo sapiens
  SIMILAR (53)..(3187): 991254mologous to Homo sapiens kendrin,accession number U52962,Smith-Waterman Score=5314.
gctctgtgtcagccccgtcaccgccgggcggcccgcgcggagtctgagggagatggaagttgagcaagagcagcggcgcagaaaggtggaggccgggaggacgaagcttgctcacttccgacagagaaaaacaaaaggtgacagttcgcattcggagaaaaagacggcgaagaggaagggctcggctgtcgatgcgtctgtccaggaggagagtccggtaaccaaggaggacagcgcactctgtggaggaggggacatttgcaaaagcacatcatgtgacgacacccctgatggggcaggaggggcctttgcagctcagccggaggactgtgatggagagaagagagaggacttggaacagctgcagcagaagcaagtcaatgaccatcctccagagcagtgtgggatgttcacagtcagtgaccacccaccagaacagcatgggatgttcacagtcggtgaccacccaccagaacagcgtgggatgttcacagtcagtgaccacccaccagaacagcatgggatgttcacagtcagtgaccacccaccagaacagcgtgggatgttcacaatcagtgaccaccaaccggaacagcgtgggatgttcacagtcagtgaccacacaccagaacagcgtgggatcttcacaatcagtgaccacccagcagaacagcgtgggatgttcacaaaggagtgtgaacaagaatgtgaacttgccattactgacctggagagcggccgtgaagatgaggctggcctgcatcagagtcaggccgtgcatggccttgagctggaggcgctgcgcctgagtctgagcaacatgcacacggcgcagctggagctgacacaggccaacctccagaaggagaaggagacggcattgacggagctgcgggagatgctcaacagccggcgtgcccaggagctggccctgctacagagcaggcagcagcacgagctggagctcctcagggagcagcacgcacgggagaaggaggaggtggtgctcaggtgtggacaggaagcagctgagctgaaggagaagttacaatcagaaatggagaaaaacgcccagatagtaaagaccctgaaggaagattgggaatctgaaaaagatttatgtttagaaaatctacgcaaagaactgtctgcaaagcatcaatcagaaatggaggatttacaaaaccagtttcagaaagaattggcagaacagagagctgagttggagaagatttttcaagacaaaaaccaggctgaacgggcccttaggaacctggagagtcatcatcaagcagccattgagaagttacgtgaagacctgcagtccgagcacggccggtgtttagaagacttggagttcaagttcaaagagagcgagaaagaaaaacagctggagttagagaatcttcaagcatcatatgaagacctgaaggcacaatcacaagaagagatcaggcgcttgtggtcccagcttgattctgccaggaccagtagacaggaattgagtgagctacatgagcaactcctggcgcgcacctctcgtgtggaagatttagaacagctgaagcagcgagaaaaaacccagcatgagtccgaactggagcaactgaggatttattttgaaaagaagttaagggatgctgagaaaacttaccaagaagacctaaccctgttacagcagaggctgcagggggcgagggaagatgctcttctggactctgtggaagttgggttgtcctgtgtgggtttagaagagaaacctgagaaaggaagaaaagatcacgttgatgaactcgagcctgagcgacataaggagagcctgccacgcttccaggcggagttagaagaaagccacaggcaccagctggaagcgctggagtctcccctctgcatccagcacgaggggcatgtctcagacagatgctgcgtagagacttcagcattgggacacgagtggcgtctggaaccctctgaagggcacagccaagagcttccctgggtgcatctccagggtgtgcaggacggggacttggaggccgacacagagcgggcagccagagtcttgggtctggaaactgagcacaaggtgcaactttcgcttcttcagactgagctcaaagaagaaattgaactcctaaaaatagaaaatagaaatttgtttgagaagttgcagcatgaaactcgtctgaaggacgatttggagaaggtaaaacacaatctaattgaagaccaccagaaggaactaaataatgctaagcaaaagactgagctgatgaaacaggaattccaaagaaaagaaacggactggaaagttatgaaggaggagctacagcgggaagctgaggagaagttaacattgatgctacttgaactgagagaaaaggctgaatccgagaaacagaccatcataaacaagttggagcttcgagaagctgaaatgaggcagcttcaggaccaacaggcagcgcagatcctggatctggagaggtccttgacggagcagcaggcccgcctgcagcagctggaacaggacctcacttcagacgacgccctgcattgcagccagtgtgggcgggagccgcccacagcccaggacggggagcttgccgcgctccacgtgaaggaagactgcgccctgcagctgatgctggcccggagcaggtttttagaggaacgtaaagagatcgccgagaaattcagtgcggaacaagatgccttcctgcagctcctccaggagagacaccagcagcagctcctgtcagtgacggcggagctcgaggccagacaccaggccgcgttgggcgagctgacagcctccttagagagcaagcagggggctctgctggctgcacgtgtggccgaactgcagaccaaacacgctgccgacctcggcgctctggagaccagacatctgtccacccttgattctttggaatcctgttacctgtctgaatttcagaccatccgtgaggagcacaggcaggccctagagctcttacgagcagactttgaggaacaactgtggaaaaaggactctcttcaccaaacgattttgactcaagagttggagaaactgaagcggaaacacaaaggggagctacagtctgtgcgggaccacctgcgaaccgaagcgagcacagagctcgccggaaccgtggctcacgagctgcaggggagtgcaccagggtgaatttggaagtgaaaagaaaactgctttgcatgaaaaagaggagacacttcggcttcagagtgcacaggcacagccttttcaccaagaggagaaagagtctttgtctctgcagcttcaaaagaagaatcaccaagtccagcagctgaaagaccaggttttatccttaagtcacgagatagaagagtgccgctccgagttggaggtgctgcagcagaggcgggagcgggagaaccgggaaggcgcaaacctcctctccatgctcaaggccgacgtcaacctgtcccacagcgaaagaggggccctccaggacgccctgcgcaggctgctgggtttgtttggagagacgctgagggcagccgtcaccctgaggagccggatcggggagcgcgtggggctctgcctggatgacgcgggcgcaggcctggccctgtcgacagctccggcgctggaggagacatggtctgatgtggccctcccggagttggacagaactttgtctgaatgtgcagagatgtcttccgtggctgaaattagcagccacatgcgtgaaagctttctcatgagcccagaaagtgtgcgggagtgtgagcagcccatccggagggtcttccagagcctcagcctggccgtggacggcctcatggagatggccctggactccagcaggcagctggaagaagcacgccaacttcattctcgttttgaaaaagaatttagttttaagaatgaggagacagcacaggttgtcaggaagcaccaggagctgctggagtgtttgacggaggagagcgcagcaaaggcagagctggcgctggagctgcacaagactcagggtacccttgagggattcaaggtggagacagcagatctgaaggaggtgctggccgggaaggaggattccgagcaccgtctggtgctggagctggagagcctgagacggcagctgcagcaggcggcccaggagcaggcggcgctgagggaggagtgcacccgtctgtggagtcggggggaggccacagccacggatgccgagggccagagaagctgctctcggaaaggaagtggaggatctgaccaaagaacagtcggagaccaggaagcaggctgagaaggaccgctcagccctgctctcccagatgaagattttggagtctgagttagaagaacagctgtctcagcatcgcgggtgtgccaagcaggcggaggccgtcactgccctggaacagcaggtggcatctctggacaagcatttgcgcaaccagcggcaattcatggatgagcaggcagccgagcgggagcacgagcgcgaggagttccagcaggagattcagaggctggaggggcagctccgccaggcggccaagccgcagccctggggccctcgcgacagccagcaggcgccgctggatggagaggttgagttgttacaacacaagttgagagaaaagttggatgaatttaatgaattggctatacagaaagagtcggcagatagacaagtgttaatgcaggaagaagaaattaaacgtctggaggagatgaacatcaacatcaggaaaaaagtggcccagctccaggaagaagtggaaaaacagaaaaacatcgtgaaagggctggaacaggataaagaggtgttaaagaaacagcagatgagtagcttgcttctggcgtccacgttgcagtctacactagatgcaggcagatgtcccgagcctccttcgggcagccctcctgagggtccagaaatacagttagaggtgacacagagagcactcctgcggcgcgagagcgaggttttggacttaaaagaacagctagaaaagatgaaaggtgacttagaaagtaaaaatgaagaaatactacatctgaacttaaaattggacatgcagaacagccagactgctgtcagcctcagagaacttgaggaagagaacacgagcttgaaggtcatatataccagaagttctgagattgaagagctgaaagccactattgaaaatctgcaagagaatcagaaacgattacaaaaggagaaagcagaggaaattgaacaactccatgaagtcattgagaagctgcagcacgagctgtccctcatggggcctgtggtgcacgaagtcagcgacagtcaggctggcagtctgcagagcgagctgctctgctcccaggccgggggccctcgtgggcaggccctacagggcgagctcgaggctgcgctggaagccaaggaggccctgagccggctgctggctgaccaggagcgcaggcacagccaggccctggaggccctgcagcagcgcctccagggcgcagaggaggctgcggagctacagctggctgagctggagcgcaatgtagccctcagggaggctgaggtcgaagacatggcctcccggatccaggagttcgaagcggccctgaaagcaaaggaagcgacgattgccgagagaaatttagaaatcgacgctctgaaccagcggaaggcggcccactctgccgagctggaggccgtcctgttggccttggcccgcatccgccgcgccctggagcagcagcccctggcagccggggcggcgcctcccgagctgcagtggctccgagcgcagtgtgcccgcctcagccgccagctgcaggtgctgcaccagcggttcctgaggtgccaggtggagctggacaggcggcaggcccgcagagccacagctcacacacgggtgcccggggcccacccacagcctcgcatggatggtggcgccaaggcccaggtcaccggcgacgtggaggcctcccatgatgctgctttggagccggttgtccctgacccacagggtgatctgcagcctgtcctggtgacgttgaaggatgcacctctctgcaagcaagaaggcgtgatgtcagtgctcaccgtctgccagaggcagctgcagtcggagctgctcttggtgaaaaatgaaatgcgcctgagtctggaggacggcggcaagggtaaagaaaaagtactggaagattgtcagctgccgaaggtcgatctcgtagctcaggtgaaacagcttcaggaaaaactgaaccgtttgctgtattccatgaccttccagaatgtggatgctgccgacaccaaatctctgtggcccatggcctcagcacacctgttggagagcagctggagtgatgattcctgtgacggagaagagcctgacatatcaccccacatagacacatgtgatgccaatacagccacggggggtgtaactgatgttatcaaaaatcaggccatagacgcgtgtgatgccaatacaaccccagggggtgtaactgatgttatcaaaaattgggattccttgataccagatgaaatgccagattctcccattcaagaaaaatcagaatgtcaggacaggtctctttcttcaccgaccagcgtacttggtggctcccgccaccagagccacactgcagaggctgggccccggaagagcccggtcgggatgctggacctgtcttcctggagctcccctgaggtcctcaggaaggactggaccctggagccctggcccagcctccccgtgacaccccactcaggagccctgagcctgtgcagtgccgacacatccctgggggacagggcggacacctcgctgccacagacccaggggccggggctgctttgttccccaggcgtgtctgcagcagcgctggcactgcagtgggccgagtctccgccggctgacgaccaccatgtgcagaggacggctgtggagaaagatgtcgaagattttatcacaacatcctttgattctcaagaaacattaagttcacctcctcctggattagaaggaaaagctgatagaagtgagaaaagtgacggctcgggttttggagcaagactgagcccggggtcaggaggccctgaggctcaaactgctggtcctgtgacccctgcttccatctctggaaggtttcagccgctgccggaagccatgaaggagaaggaagtgcgtccgaagcacgtgaaggctttactgcagatggtgcgtgacgagagccaccagatcctggcgctgtcagaaggccttgcacccccaagcggcgagccacacccaccccggaaggaagacgagatacaggacatctcgctccatgggggaaagacgcaggaagtgcccaccgcgtgccccgattggagaggggaccttctgcaggttgtgcaagaggcctttgaaaaagagcaggagatgcagggggttgagctgcagccccgactcagtggctcagatctggggggtcacagctccctgctcgaaaggctggagaagatcatccgtgagcagggagacctgcaggaaaagtccctggagcatcttcgcttgccggaccggagcagcctgctgtccgagatccaggcgctgcgtgcccagctgcgcatgacgcacctgcagaaccaggagaagctgcagcacttgcgcacggcgctgacaagcacagaggcgcgcgggagccagcaggagcaccagctgcgcaggcaggttgaactgctggcttataaagtagagcaggagaagtgcattgctggtgacttgcagaagacgctgagtgaagagcaagagaaggcaaacagcgtgcagaagctcctggcggcggagcagactgtagtgcgagatttgaagtccgacctctgtgagagcaggcagaagagcgaacagctgtcccggtccctctgcgaggtgcagcaggaggtcctccagctgagatccatgctgagcagtaaggagaacgagctgaaggccgcgcttcaggagctggagagtgagcaggggaaggggcgtgccctgcagagccagctggaggaggagcagctgcggcacctgcagagggagagccagagtgccaaggccctggaggagctgcgggcgtctttggagacacagcgtgctcagagcagtcgactctgcgtggcactgaaacacgagcagacggccaaggacaacctgcagaaggagctgcgtatcgagcactcacgctgcgaggccttgctggctcaggagcggagccagctctctgagctccagaaggaccttgcggctgagaagagccgcaccctggagctgtcagaggccttgcggcacgagcggctcctgaccgagcagctgagccagaggacacaggaggcttgcgtgcaccaggacacacaggcccatcacgctctgctgcagaagctgaaggaggagaagtcccgggtggtggacttgcaagcgatgcttgaaaaggtgcagcagcaagccctgcattctcagcagcagcttgaggctgaggctcagaagcactgtgaggcgctcaggagagagaaggaggtaagtgccacactgaagtcgacggtggaagccctgcacacccaaaaacgagagctgagatgctctctggagagagagagggagaaaccagcgtggttgcaggcagaattagagcagtcacacccacggttgaaagagcaagaaggacgcaaggctgcgaggaggagcgcggaggccaggcagagcccagcggctgcggagcagtggaggaagtggcagagagacaaggagaagctgcgagaattagaactgcagcgtcagcgtgacttgcataagatcaagcagcttcagcagacagtgagagacctggagtcgaaggacgaggtgcctggcagccgcctccacctaggttctgcccgcagggctgccggctcggatgcggaccacctccgggaacagcagcgagagctggaggcgatgaggcagcggctgctctctgccgcccggcttctcaccagcttcaccagccaggccgtggacaggacagttaatgattggacgtcatccaatgagaaagcagtgatgtctttactgcacacgttggaggagctgaagtctgacttgagcaggcccacctcctcccagaaaaaaatggcagcagagctgcagttccagtttgtggacgtcctgctgaaagacaatgtttccctcacaaaagcgctcagcacggtgacccaggagaagctggagctgagcagagccgtgtctaagcttgagaagttgctgaagcaccatctgcagaagggctgcagcccaagcaggtcggaaaggtctgcttggaagccagacgaaacggctccacagagttccctgaggcgcccagaccccggccggcttccaccagctgccagcgaggaagcacacaccagcaatgtcaagatggaaaaattgtccctgcattacttgagagcagagagctttagaaaagctctgatttatcaaaagaagtatcttttgctgttgattggtggattccaggattctgaacaagaaacactctccatgattgcccatttgggggtatttccttccaaagcagaacggaaaatcacatctcgtcctttcaccaggttccgcacggccgtcagggtggtcattgcaatattaagattacgttttttggttaagaaatggcaagaagtagatcggaaaggagctctggcacaaggaaaagcccctcgcccagggccccgagcacgacagccgcagtctccacccagaaccagagagtcccccccaacccgggatgtaccctctggccacaccagggaccctgccagaggccgcagactggcagcagcagcctccccacacagtgggggaagagccactccatccccaaattcaagattagaaagatccctgactgcttctcaagatccaggacattccttgacagagtatattcaccatttagaagtgatccagcaaagattgggagggtactaccagattctacttcaaagaaatcctgccacccgatgattaaacagtgaataaaatgtcatggctctttcctgcgacaattctatttgaggaaaagatttgtttttcccttttcccaaggaagctcgtgggacagcatgggcactactcttcatgtgcggtgacaccagcccccagatgccttgaattaagtgtcctcacctttatgcatgactgcaaagccagctggagcattttctatggagcctccgtatgttttaggcccatgaccttcgtgaggtgacgggcactcactcccatgagccctggctgtgtgctgttgtgtgcctatcggcagatccatccttcctgcctccaaggaggatacacagagaatggcttcctgttgttttgtttattttcttaacgtgtacagatggaaacttcatttaaaaataaaaacaaaacaactcaaaaa

SEQ ID NO: 9911 - DNA, 5619 bp, Homo sapiens
  SIMILAR (3111)..(5156): 681254mologous to Homo sapiens kendrin,accession number U52962,Smith-Waterman Score=2141.
ggcgccgctggatggagaggttgagttgttacaacaaaagttgagagaaaagttggatgaatttaatgaattggctatacagaaagagtcggcagatagacaagtgttaatgcaggaagaagaaattaaacgtctggaggagatgaacatcaacatcaggaaaaaagtggcccagctccaggaagaagtggaaaaacagaaaaacatcgtgaaagggctggaacaggataaagaggtgttaaagaaacagcagatgagtagcttgcttctggcgtccacgttgcagtctacactagatgcaggcagatgtcccgagcctccttcgggcagccctcctgagggtccagaaatacagttagaggtgacacagagagcactcctgcggcgcgagagcgaggttttggacttaaaagaacagctagaaaagatgaaaggtgacttagaaagtaaaaatgaagaaatactacatctgaacttaaaattggacatgcagaacagccagactgctgtcagcctcagagaacttgaggaagagaacacgagcttgaaggtcatatataccagaagttctgagattgaagagctgaaagccactattgaaaatctgcaagagaatcagaaacgattacaaaaggagaaagcagaggaaattgaacaactccatgaagtcattgagaagctgcagcacgagctgtccctcatggggcctgtggtgcacgaagtcagcgacagtcaggctggcagtctgcagagcgagctgctctgctcccaggccgggggccctcgtgggcaggccctacagggcgagctcgaggctgcgctggaagccaaggaggccctgagccggctgctggctgaccaggagcgcaggcacagccaggccctggaggccctgcagcagcgcctccagggcgcagaggaggctgcggagctacagctggctgagctggagcgcaatgtagccctcagggaggctgaggtcgaagacatggcctcccggatccaggagttcgaagcggccctgaaagcaaaggaagcgacgattgccgagagaaatttagaaatcgacgctctgaaccagcggaaggcggcccactctgccgagctggaggccgtcctgttggccttggcccgcatccgccgcgccctggagcagcagcccctggcagccggggcggcgcctcccgagctgcagtggctccgagcgcagtgtgcccgcctcagccgccagctgcaggtgctgcaccagcggttcctgaggtgccaggtggagctggacaggcggcaggcccgcagagccacagctcacacacgggtgcccggggcccacccacagcctcgcatggatggtggcgccaaggcccaggtcaccggcgacgtggaggcctcccatgatgctgctttggagccggttgtccctgacccacagggtgatctgcagcctgtcctggtgacgttgaaggatgcacctctctgcaagcaagaaggcgtgatgtcagtgctcaccgtctgccagaggcagctgcagtcggagctgctcttggtgaaaaatgaaatgcgcctgagtctggaggacggcggcaagggtaaagaaaaagtactggaagattgtcagctgccgaaggtcgatctcgtagctcaggtgaaacagcttcaggaaaaactgaaccgtttgctgtattccatgaccttccagaatgtggatgctgccgacaccaaatctctgtggcccatggcctcagcacacctgttggagagcagctggagtgatgattcctgtgacggagaagagcctgacatatcaccccacatagacacatgtgatgccaatacagccacggggggtgtaactgatgttatcaaaaatcaggccatagacgcgtgtgatgccaatacaaccccagggggtgtaactgatgttatcaaaaattgggattccttgataccagatgaaatgccagattctcccattcaagaaaaatcagaatgtcaggacatgtctctttcttcaccgaccagcgtacttggtggctcccgccaccagagccacactgcagaggctgggccccggaagagcccggtcgggatgctggacctgtcttcctggagctcccctgaggtcctcaggaaggactggaccctggagccctggcccagcctccccgtgacaccccactcaggagccctgagcctgtgcagtgccgacacatccctgggggacagggcggacacctcgctgccacagacccaggggccggggctgctttgttccccaggcgtgtctgcagcagcgctggcactgcagtgggccgagtctccgccggctgacgaccaccatgtgcagaggacggctgtggagaaagatgtcgaagattttatcacaacatcctttgattctcaagaaacattaagttcacctcctcctggattagaaggaaaagctgatagaagtgagaaaagtgacggctcgggttttggagcaagactgagcccggggtcaggaggccctgaggctcaaactgctggtcctgtgacccctgcttccatctctggaaggtttcagccgctgccggaagccatgaaggagaaggaagtgcgtccgaagcacgtgaaggctttactgcagatggtgcgtgacgagagccaccagatcctggcgctgtcagaaggccttgcacccccaagcggcgagccacacccaccccggaaggaagacgagatacaggacatctcgctccatgggggaaagacgcaggaagtgcccaccgcgtgccccgattggagaggggaccttctgcaggttgtgcaagaggcctttgaaaaagagcaggagatgcagggggttgagctgcagccccgactcagtggctcagatctggggggtcacagctccctgctcgaaaggctggagaagatcatccgtgagcagggagacctgcaggaaaagtccctggagcatcttcgcttgccggaccggagcagcctgctgtccgagatccaggcgctgcgtgcccagcatgcgcatgacgcacctgttgaattaggagaagctgcagcacttgcgcacggggctgagaagcgcagaggcgcgcgggagccatcatgagcaccagctgcgcaggcaggttgaactggtggcttataaagtagagcaggagaagtgcattgctggggacttgcagaagacgctgagtgaagagcaagagaaggcaaacagcgtgcagaagctcctggcggcggagcagactgtagtgcgagatttgaagtccgacctctgtgagagcaggcagaagagcgaacagctgtcccggtccctctgcgaggtgcagcaggaggtcctccagctgagatccatgctgagcagtaaggagaacgagctgaaggccgcgcttcaggagctggagagtgagcaggggaaggggcgtgccctgcagagccagctggaggaggagcagctgcggcacctgcagagggagagccagagtgccaaggccctggaggagctgcgggcgtctttggagacacagcgtgctcagagcagtcgactctgcgtggcactgaaacacgagcagacggccaaggacaacctgcagaaggagctgcgtatcgagcactcacgctgcgaggccttgctggctcaggagcggagccagctctctgagctccagaaggaccttgcggctgagaagagccgcaccctggagctgtcagaggccttgcggcacgagcggctcctgaccgagcagctgagccagaggacacaggaggcttgcgtgcaccaggacacacaggcccatcacgctctgctgcagaagctgaaggaggagaagtcccgggtggtggacttgcaagcgatgcttgaaaaggtgcagcagcaagccctgcattctcagcagcagcttgaggctgaggctcagaagcactgtgaggcgctcaggagagagaaggagcgagaattagaactgcagcgtcagcgtgacttgcataagatcaagcagcttcagcagacagtgagagacctggagtcgaaggacgaggtgcctggcagccgcctccacctaggttctgcccgcagggctgccggctcggatgcggaccacctccgggaacagcagcgagagctggaggcgatgaggcagcggctgctctctgccgcccggcttctcaccagcttcaccagccaggccgtggacaggacagttaatgattggacgtcatccaatgagaaagcagtgatgtctttactgcacacgttggaggagctggagtctgacttgagcaggcccacctcctcccagaaaaaaatggcagcagagctgcagttccagtttgtggacgtcctgctgaaagacaatgtttccctcacaaaagcgctcagcacggtgacccaggagaagctggagctgagcagagccgtgtctaagcttgagaagttgctgaagcaccatctgcagaagggctgcagcccaagcaggtcggaaaggtctgcttggaagccagacgaaacggctccacagagttccctgaggcgcccagaccccggccggcttccaccagctgccagcgaggaagcacacaccagcaatgtcaagatggaaaaattgtacctgcattacttgagagcagagagctttagaaaagctctgatttatcaaaagaagtatcttttgctgttgattggtggattccaggattctgaacaagaaacactctccatgattgcccatttgggggtatttccttccaaagcagaacggaaaatcacatctcgtcctttcaccaggttccgcacggccgtcagggtggtcattgcaatattaagattacgttttttggttaagaaatggcaagaagtagatcggaaaggagctctggcacaaggcaaagcccctcgcccagggccccgagcacgacagccgcagtctccacccagaaccagagagtcccccccaacccgggatgtaccctctggccacaccagggaccctgccagaggccgcagactggcagcagcagcctccccacacagtgggggaagagccactccatccccaaattcaagattagaaagatccctgactgcttctcaagatccagaacattccttgacagagtatattcaccatttagaagtgatccagcaaagattgggaggggtactaccagattctacttcaaagaaatcctgccacccgatgattaaacagtgaataaaatgtcatggctctttcctgcgacaattctatttgaggaaaagatttgtttttcccttttcccaaggaagctcgtgggacagcatgggcactactcttcatgtgcggtgacaccagcccccagatgccttgaattaagtgtcctcacctttatgcatgactgcaaagccagctggagcattttctatggagcctccgtatgttttaggcccatgaccttcgtgaggtgacgggcactcactcccatgagccctggctgtgtgctgttgtgtgcctatcggcagatccatccttcctgcctccaaggaggatacacagagaatggcttcctgttgttttgtttattttcttaacgtgtacagatggaaacttcatttaaaaataaaaacaaaacaactcaaaaagg

SEQ ID NO: 9912 - DNA, 8280 bp, Homo sapiens
  SIMILAR (1663)..(6324): 611254mologous to Homo sapiens kendrin,accession number U52962,Smith-Waterman Score=4144.
ggtgaatttggaagtgaaaagaaaactgctttgcatgaaaaagaggagacacttcggcttcagagtgcacaggcacagccttttcaccaagaggagaaagagtctttgtctctgcagcttcaaaagaagaatcaccaagtccagcagctgaaagaccaggttttatccttaagtcacgagatagaagagtgccgctccgagttggaggtgctgcagcagaggcgggagcgggagaaccgggaaggcgcaaacctcctctccatgctcaaggccgacgtcaacctgtcccacagcgaaagaggggccctccaggacgccctgcgcaggctgctgggtttgtttggagagacgctgagggcagccgtcaccctgaggagccggatcggggagcgcgtggggctctgcctggatgacgcgggcgcaggcctggccctgtcgacagctccggcgctggaggagacatggtctgatgtggccctcccggagttggacagaactttgtctgaatgtgcagagatgtcttccgtggctgaaattagcagccacatgcgtgaaagctttctcatgagcccagaaagtgtgcgggagtgtgagcagcccatccggagggtcttccagagcctcagcctggccgtggacggcctcatggagatggccctggactccagcaggcagctggaagaagcacgccaaattcattctcgttttgaaaaagaatttagttttaagaatgaggagacagcacaggttgtcaggaagcaccaggagctgctggagtgtttgaaggaggagagcgcagcaaaggcagagctggcgctggagctgcacaagactcagggtacccttgagggattcaaggtggagacagcagatctgaaggaggtgctggccgggaaggaggattccgagcaccgtctggtgctggagctggagagcctgagacggcagctgcagcaggcggcccaggagcaggcggcgctgagggaggagtgcacccgtctgtggagtcggggggaggccacagccacggacgccgaggccagagaagctggatttttcagggtgttttcaggaacgtctctgacgtcctgcatcgctctcagcatctttgccctggcggtgctgttgcatctgggcgtccgttgtcgctgtttctccgatgctttctctgcttgtcctctgctgtccgggggcagcctcatgtgtcttcgcgcccagccagccggcgctgggccacaccccgccgggggagaccacctggtgtttcatcacctcgagcccttggacttcagccagtcacttcgtttgtcaggcctccgggcagataaaggggtgtgtggcctgcattctgttgaacggcccgctctccggaaggaagtggaggatctgaccaaagaacagtcggagaccaggaagcaggctgagaaggaccgctcagccctgctctcccagatgaagattttggagtctgagttagaagaacagctgtctcagcatcgcgggtgtgccaagcaggcggaggccgtcactgccctggaacagcaggtggcatctctggacaagcatttgcgcaaccagcggcaattcatggatgtaagaattctgaataatacatttttttgcatcactaaaagttgccgttacagcatgaacttctttccagatcgttacgagcaggcagccgagcgggagcacgagcgcgaggagttccagcaggagattcagaggctggaggggcagctccgccaggcggccaagccgcagccctggggccctcgcgacagccaggttgagttgttacaacaaaagttgagagaaaagttggatgaatttaatgaattggctatacagaaagagtcggcagatagacaagtgttaatgcaggaagaagaaattaaacgtctggaggagatgaacatcaacatcaggaaaaaagtggcccagctccaggaagaagtggaaaaacagaaaaacatcgtgaaagggctggaacagggaggaccgctgagcatcacctgcacttggagcggagttgtccccctggccggccactgcacacatttcagtgacagctgctccagggcggcttcaccccttctgccttcactcagcgaacgtttactgagcttagtagatgccagggataaagaggtgttaaagaaacagcagatgagtagcttgcttctggcgtccacgttgcagtctacactagatgcaggcagatgtcccgagcctccttcgggcagccctcctgagggtccagaaatacagttagaggtgacacagagagcactcctgcggcgcgagagcgaggttttggacttaaaagaacagctagaaaagatgaaaggtgacttagaaagtaaaaatgaagaaatactacatctgaacttaaaattggacatgcagaacagccagactgctgtcagcctcagagaacttgaggaagagaacacgagcttgaaggtcatatataccagaagttctgagattgaagagctgaaagccactattgaaaatctgcaagagaatcagaaacgattacaaaaggagaaagcagaggaaattgaacaactccatgaagtcattgagaagctgcagcacgagctgtccctcatggggcctgtggtgcacgaagtcagcgacagtcaggctggcagtctgcagagcgagctgctctgctcccaggccgggggccctcgtgggcaggccctacagggcgagctcgaggctgcgctggaagccaaggaggccctgagccggctgctggctgaccaggagcgcaggcacagccaggccctggaggccctgcagcagcgcctccagggcgcagaggaggctgcggagctacagctggctgagctggagcgcaatgtagccctcagggaggctgaggtcgaagacatggcctcccggatccaggagttcgaagcggccctgaaagcaaaggaagcgacgattgccgagagaaatttagaaatcgacgctctgaaccagcggaaggcggcccactctgccgagctggaggccgtcctgttggccttggcccgcatccgccgcgccctggagcagcagcccctggcagccggggcggcgcctcccgagctgcagtggctccgagcgcagtgtgcccgcctcagccgccagctgcaggtgctgcaccagcggttcctgaggtgccaggtggagctggacaggcggcaggcccgcagagccacagctcacacacgggtgcccggggcccacccacagcctcgcatggatggtggcgccaaggcccaggtcaccggcgacgtggaggcctcccatgatgctgctttggagccggttgtccctgacccacagggtgatctgcagcctgtcctggtgacgttgaaggatgcacctctctgcaagcaagaaggcgtgatgtcagtgctcaccgtctgccagaggcagctgcagtcggagctgctcttggtgaaaaatgaaatgcgcctgagtctggaggacggcggcaagggtaaagaaaaagtactggaagattgtcagctgccgaaggtcgatctcgtagctcaggtgaaacagcttcaggaaaaactgaaccgtttgctgtattccatgaccttccagaatgtggatgctgccgacaccaaatctctgtggcccatggcctcagcacacctgttggagagcagctggagtgatgattcctgtgacggagaagagcctgacatatcaccccacatagacacatgtgatgccaatacagccacggggggtgtaactgatgttatcaaaaatcaggccatagacgcgtgtgatgccaatacaaccccagggggtgtaactgatgttatcaaaaattgggattccttgataccagatgaaatgccagattctcccattcaagaaaaatcagaatgtcaggacatgtctctttcttcaccgaccagcgtacttggtggctcccgccaccagagccacactgcagaggctgggccccggaagagcccggtcgggatgctggacctgtcttcctggagctcccctgaggtcctcaggaaggactggaccctggagccctggcccagcctccccgtgacaccccactcaggagccctgagcctgtgcagtgccgacacatccctgggggacagggcggacacctcgctgccacagacccaggggccggggctgctttgttccccaggcgtgtctgcagcagcgctggcactgcagtgggccgagtctccgccggctgacgaccaccatgtgcagaggacggctgtggagaaagatgtcgaagattttatcacaacatcctttgattctcaagaaacattaagttcacctcctcctggattagaaggaaaagctgatagaagtgagaaaagtgacggctcgggttttggagcaagactgagcccggggtcaggaggccctgaggctcaaactgctggtcctgtgacccctgcttccatctctggaaggtttcagccgctgccggaagccatgaaggagaaggaagtgcgtccgaagcacgtgaagtttagcagatcattttatggcaaaaccattgacaaaaacttggctaaacaagctttactgcagatggtgcgtgacgagagccaccagatcctggcgctgtcagaaggccttgcacccccaagcggcgagccacacccaccccggaaggaagacgagatacaggacatctcgctccatgggggaaagacgcagcaggccctggttgtgtgcgagcggcagcctggctggcattcaggaggctcattggtgctgcacgctgcccctggggaccagcgggaagtgcccaccgcgtgccccgattggagaggggaccttctgcaggttgtgcaagaggcctttgaaaaagagcaggagatgcagggggttgagctgcagccccgactcagtggctcagatctggggggtcacagctccctgctcgaaaggctggagaagatcatccgtgagcagggagacctgcaggaaaagtccctggagcatcttcgcttgccggaccggagcagcctgctgtccgagatccaggcgctgcgtgcccagctgcgcatgacgcacctgcagaaccaggagaagctgcagcacttgcgcacggcgctgacaagcgcagaggcgcgcgggagccagcaggagcaccagctgcgcaggcaggttttggattccgtcaaggggaacggccttgcagttcagcccacggcccttgtcccggcgcccatgccctttgtgctctctggggctgggggccggcgctgtgcacatgctcttgaactgctggcttataaagtagagcaggagaagtgcattgctggtgacttgcagaagacgctgagtgaagagcaagagaaggcaaacagcgtgcagaagctcctggcggcggagcagactgtagtgcgagatttgaagtccgacctctgtgagagcaggcagaagagcgaacagctgtcccggtccctctgcgaggtgcagcaggaggtcctccagctgagatccatgctgagcagtaaggagaacgagctgaaggccgcgcttcaggagctggagagtgagcaggggaaggggcgtgccctgcagagccagctggaggaggagcagctgcggcacctgcagagggagagccagagtgccaaggccctggaggagctgcgggcgtctttggagacacagcgtgctcagagcagtcgactctgcgtggcactgaaacacgagcagacggccaaggacaacctgcagaaggagctgcgtatcgagcactcacgctgcgaggccttgctggctcaggagcggagccagctctctgagctccagaaggaccttgcggctgagaagagccgcaccctggagctgtcagaggccttgcggcacgagcggctcctgaccgagcagctgagccagaggacacaggaggcttgcgtgcaccaggacacacaggcccatcacgctctgctgcagaagctgaaggaggagaagtcccgggtggtggacttgcaagcgatgcttgaaaaggtgcagcagcaagccctgcattctcagcagcagcttgaggctgaggctcagaagcactgtgaggcgctcaggagagagaaggaggtaagtgccacactgaagtcgacggtggaagccctgcacacccaaaaacgagagctgagatgctctctggagagagagagggagaaaccagcgtggttgcaggcagaattagagcagtcacacccacggttgaaagagcaagaaggacgcaaggctgcgaggaggagcgcggaggccaggcagagcccagcggctgcggagcagtggaggaagtggcagagagacaaggagaagctgcgagaattagaactgcagcgtcagcgtgacttgcataagatcaagcagcttcagcagacagtgagagacctggagtcgaaggacgatggtgcctggcagccgcctccacctaggttctgcccgcagggctgccggctcggatgcggaccacctccgggaacagcagcgagagctggaggcgatgaggcagcggctgctcttctgccgcccggcttgctcaccagcttcaccagccaggccgtggacaggacagttaatgattggacgtcatccaatgagaaagcagtgatgtctttactgcacacgtttggaggagcttgaagtctgactttgagcaggcccacctcctcccagaaaaaaatggcagcagagctgcagttccagtttgtggacgtcctgctgaaagacaatgtttccctcacaaaagcgctcagcacggtgacccaggagaagctggagctgagcagagccgtgtctaagcttgagaagttgctgaagcaccatctgcagaagggctgcagcccaagcaggtcggaaaggtctgcttggaagccagacgaaacggctccacagagttccctgaggcgcccagaccccggccggcttccaccagctgccagcgaggaagcacacaccagcaatgtcaagatggaaaaattgtacctgcattacttgagagcagagagctttagaaaagctctgatttatcaaaagaagtatcttttgctgttgattggtggattccaggattctgaacaagaaacactctccatgattgcccatttgggggtatttccttccaaagcagaacggaaaatcacatctcgtcctttcaccaggttccgcacggccgtcagggtggtcattgcaatattaagattacgttttttggttaagaaatggcaagaagtagatcggaaaggagctctggcacaaggcaaagcccctcgcccaggtgggactccagctgctgttgaccgctggactcacaaacctttctttctactcttgtttttcattcactttgggtcatttttcagtgttgatggggacgtaataaagcacgtctacatctgtggtttcacgggacgctccctaggaccagttgacagaagacgaaaaaatacaggtttgttctaccaacggatccatacggcccttaaccagttacccaggccctctagcattgcccatggctccatgtatattctcaccttgggctacttcttccacaaaaaagtggacgaccaggagctctgcctgaaattctgcctattgagaggatatgcccttatcaccatttttcaagaatggtttctccagaagcagacgctgcgactgagtttggggtacgaggatgttgacatggtatcaacacccgtgaaaggaaggggaaggaagcaggactgggcggaggaagaagggtatgcgcctcgggccgcaactaagcagcctgcccgcctcaagcccgccaccctcaagcaggcccagcgcagagcctgtcgggagcggcgctctcccgcctctcccaatgggagcccggagcggcatcgacgcgtcttcggggccaatggaagcgaggctctggtgttgctgggcggggccgggagggctgcgcgggcccgagacccactgcgcacgcgcgctcgctacccgcccttcccgccgcgcacgcgctcccgtggccggccgggcgctcaggagcgcgcggggcagcggcggcgcggcggagccatccgcgctcgtgcccgcgcggcctctgcccggacgctagccggcctggccatggctgaccgcgggtgcccgctggaggcggcgccgctgcctgccgaggtgcgggagagcctggctgagctggagctggagctgtcggaaggttggaagaagaagcttaacagtgacaaagatgctgtcttcaacagaaactggtaa

SEQ ID NO: 9913 - DNA, 396 bp, Homo sapiens
  SIMILAR (1)..(111): 1001254mologous to Homo sapiens leucine zipper protein FKSG14,accession number AY009151,Smith-Waterman Score=200.
atgaatcaggaggatctagatccggatagtactacagatgtgggagatgttacaaatactgaagaagaacttattagagaatgtgaagaaatgtggaaagatatggaagaacattaccaaggcgaggaaatcaggatacgtgaaccagtatgtcgatcaaagtggaaggcggacacaatcggcgtaagctctctctcaggcgtcccggcccggggccgctccgagccaagtctcatgggagaaagttcatcatctgaaagtacagtacaattcatgggacgtacaatcaattatgcaggcgtacacaaaacaggcgttaaaggagcatcaattgacagccatgaacatattacgccccgctgtgaatatccagtggctcataacaagcaacattaa

SEQ ID NO: 9914 - DNA, 153 bp, Homo sapiens
  SIMILAR (2)..(151): 921254mologous to Homo sapiens leucine zipper protein FKSG14,accession number AY009151,Smith-Waterman Score=226.
agaaatgtggaaagatatggaagaatgtcagaataaattatcacttattggaactgaaacactcaccgattcaaatgctcagctatcattgttaattatgcaagtaaaatgtttaaccgctgaactcagtcaatggcagaaaaaaacacctga

SEQ ID NO: 9915 - DNA, 790 bp, Homo sapiens
  SIMILAR (509)..(790): 1001254mologous to Homo sapiens leucine zipper protein FKSG14,accession number AY009151,Smith-Waterman Score=473.
catatcgtggcaagcgcttcctgcgcagcgcctaggcgacctggagtttgtgacgctgtgatggtctagaggctggagattcaagatctgggtgccatcattttctggttctgttgatgaccctcttccaggttacatacagcttacatcttgcatcctcaagcgtttttcttataaggctaaaaattcacaaagcatatatcaatgaatcaggaggatctagatccggatagtactacagatgtgggagatgttacaaatactgaagaagaacttattagagaatgtgaagaaatgtggaaagatatggaagaatgtcagaataaattatcacttattggaactgaaacactcaccgattcaaatgctcagctatcattgttaattatgcaagtaaaatgtttaaccgctgaactcagtcaatggcagaaaaaaacacctgaaacaattcccttgactgaagacgttctcataacattaggaaaagaagagttccaaaagctgaggacaagatcttgaaatggtactgtccactaaggagtcaaagaatgaaaagttaaaggaagacttagaaagggaacaacggtggttggatgaacagcaacagataatggaatctcttaatgtactacacagtgaattgaaaaataaggttgaaacattttctgaatcaagaatctttaatgaactgaaaactaaaatgcttaatataaaagaatataaggagaaactcttgagtaccttgggcgagtttctagaagaccattttcctctgcctgatagaagtgtt

SEQ ID NO: 9916 - DNA, 332 bp, Homo sapiens
  SIMILAR (231)..(166): 461254mologous to Homo sapiens Polymeric immunoglobulin receptor binding domain peptide SEQ ID NO:12,accession number B20696,Smith-Waterman Score=59.
caaaagcatcagtcagcatcagatgggaaatttagaaaactcgtctttcacccaggtcagtggagaagctccgctcctacatcttggccacaaagtcagatatttatggaggcaggtagcaaagatgagtgcaggggccacggctggaaagtgtgaaactggcacgcacagcccgggccagagagcccaaagggaccagcccacactgttgctgtaggtagatgccgtctgtgcgcttcctgaccttctatgttttaaagatatttttttaatgtgaaataacctaacttacaaacactggctccaatatttaaaaaaatattttatataag

SEQ ID NO: 9917 - DNA, 400 bp, Homo sapiens
  SIMILAR (27)..(176): 401254mologous to Pyrococcus horikoshii 125aa long hypothetical protein,accession number AP000002,Smith-Waterman Score =77.
ccagccagtcagtttgtgggctagagttgtcccacaaaaatcaggcatgttcccctcccctctgggcccctacagctgggactgatcatagcctcagattagaagaaatactgacttctaactctataagccagcactcctgggtaaggagtgaagctctgttggccatgccgctttagactgctgggcagagctgagcctacagttttgtactggggtgcacggatgacacgctgggaagatggaaaggcagcttgaggatttatagcagctaaagggtaaatgctgttatgcaaaaggtccccatatgaacttcctacaggtgtagccgcagccaagtgtctgtacagctgctgagaatttgtcggtgataaaaaaattactctttcccacgcgtccg

SEQ ID NO: 9918 - DNA, 2853 bp, Homo sapiens
  SIMILAR (484)..(636): 1001254mologous to Homo sapiens modulator recognition factor 2,accession number M73837,Smith-Waterman Score=267.
atgcagcccagaggtttggagctttgtcttggaagctccttccatcaatcagaataccaaatttacattgttaggttccctggaggtgttggagctctggattcagcaattattgtgaataagaaccttgcagctagggctatgggaggattatatgatgtcatggatgcgaaaatcctttataaaatagacagtgtacacaggagacacaaggatgatcagagtgatggtttcttaagtgattacagggccacacacaggctgttttctaaccctgttgtcacccccagggcccacaggtctcatctgagtgaggggaatctggagataacagcccgccgtcagtggaaacatatttatgatgaattaggcggtaatcctgggagcaccagcgctgccacttgtacccgcagacattatgaaaggtcagtggagaaggtccgctcctacatcttggccacaaactcagatatttatggaggcagattaatcctaccatatgaaagatttattaaaggagaagaagataagcccctgcctccaatcaaacctcggaaacaggagaacagttcacaggaaaatgagaacaaaacaaaagtatctggaaccaaacgcatcaaacatgaaatacctaaaagcaagaaagaaaaagaaaatgccccaaagccccaggatgcagcagaggtttcatcagagcaagaaaaagaacaagagactttaataagccagaaaagcatccctgagcctctcccagcagcagacatgaagaaaaaaatagaagggtatcaggaattttcagcgaagcccctggcatccagagtagacccagagaaggacaacgaaacagaccaaggttccaacagtgagaaggtggcagaggaggcgggagagaaggggcccacacctccactcccaagtgctcctctggccccagaaaaagattcagccttggtccctggggccagcaaacagccactcacctctcctagtgccctggtggactcaaaacaagaatccaaactgtgctgttttacagagagccctgaaagtgaaccccaagaagcatccttccccagcttccccaccacacagccaccgctggcaaaccagaatgagacggaggatgacaaactgcccgccatggcagattacattgccaactgcaccgtgaaggtggaccagctgggcagtgacgacatccacaatgcgctcaagcagaccccaaaggtccttgtggtccagtcgtttgacatgttcaaagacaaagacctgactgggcccatgaacgagaaccatggacttaattacacgcccctgctctactctaggggcaacccaggcatcatgtccccactggccaagaaaaagcttttgtcccaagtgagtggggccagcctctccagcagctacccttatggctccccaccccctttgatcagcaaaaagaaactgattgctagggatgacttgtgttccagtttgtcccagacccaccatggccaaagcactgaccatatggcggtcagccggccatcagtgattcagcacgtccagagtttcagaagcaagccctcggaagagagaaagaccatcaatgacatctttaagcatgagaaactgagtcgatcagatccccaccgctgcagcttctccaagcatcaccttaacccccttgctgactcctacgtcctgaagcaagaaattcaggagggcaaggataaactcttagagaaaagggccctcccccattcccacatgcctagcttcctggctgacttctactcgtcccctcatctccatagcctctacagacacaccgagcaccatcttcataatgaacagacatccaaatacccttccagggacatgtacagggaatcggaaaacagttcttttccttcccacagacaccaagaaaagctccatgtaaattatctcacgtccctgcacctgcaagacaaaaagtcggcggcagcagaagcccctacggatgatcagcctacagatctgagccttcccaagaacccgcacaaacctaccggcaaggtcctgggcctggctcattccaccacagggccccaggagagcaaaggcatctcccagttccaggtcttaggcagccagagtcgagactgtcaccccaaagcctgtcgggtatcacccatgaccatgtcaggccctaaaaaataccctgaatcgctttcaagatcaggaaaacctcaccatgtgagactggagaatttcaggaagatggaaggcatggtccacccaatcctgcaccggaaaatgagcccgcagaacattggggcggcgcggccgatcaagcgcagcctggaggatttggaccttgtgattgcagggaaaaaggcccgggcagtgtctcccttagacccatccaaggaggtctctgggaaggagaaggcctctgagcaggagagtgaaggcagcaaagcagcgcacgtacttgaaaaaccagactgtgctttctccactcatgcagcccctggctttccactcgcttgtgatgcaaagaggaatttttacatcaccgacaaattctcagcagctgtacagacacttggctgcggctacacctctgtcatccgtgcaccccagtacaaaactgtaggctcagctctgcccagcagtccaaagcggcatggcccaccaagcttcactccttacccaggaggtgctgggcttatagagttagaagtcagtttttcttctaatctgagggttggtacaaaagtaattgcggtttttgctattgaaagtaatggaaaaaaccgcgattacttttgcactaacctaacacttcgcgttcctgacacctggcatttaggccgctag

SEQ ID NO: 9919 - DNA, 1132 bp, Homo sapiens
  SIMILAR (484)..(774): 851254mologous to Homo sapiens modulator recognition factor 2,accession number M73837,Smith-Waterman Score=442.
tcggtgctagtcactgctgtgtgtttacatgagtaatggagctgccgggggaggggagttgtaagcagagcgctgagcctcgcagctcgcattcggagggaagctgacatccacaccaagtcgagacttccagggatgtggccggggagcagtcacatgctgtagctttcatgagcacaggcatcagtcaggcagatgtttgtcgactggaatggttttcagcgccaaatcttaaaggcagaccacgcaaaaagaaaccatgcccacaaagaagagattcattcagtggtgttaaggattccaacaacaattccgatggcaaagccgttgccaaggtgaaatgtgaggccaggtcagccttgaccaagccgaagaataaccataactgtaaaaaagtctcaaatgaagaaaaaccaaaggttgccattggtgaagagtgcagggcagatgaacaagccttcttggtggcactttataaatactatgaaagaaaggaaaacgcggatagaacgaataccctatttaggttttaaccagattaacctttggactatgtttcaagctgctcaaaaactgggaggatatgaaacaataacagcccgccgtcagtggaaacatatttatgatgaattaggcggtaatcctgggagcaccagcgctgccacttgtacccgcagacattatgaaagattaatcctaccatatgaaagatttattaaaggagaagaagataagtcccctgcctccaatcaaacctcggaaacaggagaacagttcacaggaaaatgagaacaaaacaaaagtatttggaaccaaacgcatcaaacatgaaatacctaaaagcaagaaagaaaaagaaaatgccccaaagccccaggatgcagcagaggtttcatcagagcaagaaaaagaacaagagactttaataagccagaaaagcatccctgagcctctcccagcagcagacatgaagaaaaaaatagaagggtatcaggaattttcagcgaagcccctggcatccagagtagacccagagaaggacaacgaaacagaccaaggttccaacagtgagaaggtggcagaggaggcgggagagaaggggcccacacctccactcccaagtgctcctctt

SEQ ID NO: 9920 - DNA, 3543 bp, Homo sapiens
  SIMILAR (235)..(1215): 671254mologous to Mus musculus DNA binding protein DESRT,accession number AF169968,Smith-Waterman Score=1061.
ataacagcccgccgtcagtggaaacatatttatgatgaattaggcggtaatcctgggagcaccagcgctgccacttgtacccgcagacattatgaaagaaattcatttttatggttgtttacaaaagcatcagtcagcatcagatgggaaatttataaaactcgtcttttacccaggtcagtggagaaggtccgctcctacatcttggccacaaactcagatatttatggaggcagattaatcctaccatatgaaagatttattaaaggagaagaagataagcccctgcctccaatcaaacctcggaaacaggagaacagttcacaggaaaatgagaacaaaacaaaagtatctggaaccaaacgcatcaaacatgaaatacctaaaagcaagaaagaaaaagaaaatgccccaaagccccaggatgcagcagaggtttcctcagagcaagaaaaagaccaagagtctttaataagccagaaaagcatccctgagcctctcccagcagcagacatgaagaaaaaaatagaagggtatcaggaattttcagcgaagcccctggcatccagagtagacccagagaagggcaacgaaacagaccaaggttccaacactgcagaagctggcagaggaggcgggagagaaggggcccacacctccactcccaagtgctcctctggccccagaaaaagattcagccttggtccctggggccagcaaacagccactcacctctcctagtgccctggtggactcaaaacaagaatccaaactgtgctgttttacagagagccctgaaagtgaaccccaagaagcatccttccccaggcttccccaccacacaggccaccgctggcaaaccagaatgagacggaggatgacaaactgcccgccatggcagattacattgccaactgcaccgtgaaggtggaccagctgggcagtgacgacatccacaatgcgctcaagcagaccccaaaggtccttgtggtccagtcgtttgacatgttcaaagacaaagacctgactgggcccatgaacgagaaccatggacttaattacacgcccctgctctactctaggggcaacccaggcatcatgtccccactggccaagaaaaagcttttgtcccaagtgagtggggccagcctctccagcagctacccttatggctccccaccccctttgatcagcaaaaagaaactgattgctagggatgacttgtgttccagtttgtcccagacccaccatggccaaagcactgaccatatggcggtcagccggccatcagtgattcagcacgtccagagtttcagaagcaagccctcggaagagagaaagaccatcaatgacatctttaagcatgagaaactgagtcgatcagatccccaccgctgcagcttctccaagcatcaccttaacccccttgctgactcctacgtcctgaagcaagaaattcaggagggcaaggataaactcttagagaaaagggccctcccccattcccacatgcctagcttcctggctgacttctactcgtcccctcatctccatagcctctacagacacaccgagcaccatcttcataatgaacagacatccaaatacccttccagggacatgtacagggaatcggaaaacagttcttttccttcccacagacaccaagaaaagctccatgtaaattatctcacgtccctgcacctgcaagacaaaaagtcggcggcagcagaagcccctacggatgatcagcctacagatctgagccttcccaagaacccgcacaaacctaccggcaaggtcctgggcctggctcattccaccacagggccccaggagagcaaaggcatctcccagttccaggtcttaggcagccagagtcgagactgtcaccccaaagcctgtcgggtatcacccatgaccatgtcaggccctaaaaaataccctgaatcgctttcaagatcaggaaaacctcaccatgtgagactggagaatttcaggaagatggaaggcatggtccacccaatcctgcaccggaaaatgagcccgcagaacattggggcggcgcggccgatcaagcgcagcctggaggatttggaccttgtgattgcagggaaaaaggcccgggcagtgtctcccttagacccatccaaggaggtctctgggaaggagaaggcctctgagcaggagagtgaaggcagcaaagcagcgcacggtgggcattccgggggcggatcagaaggccacaagcttcccctctcctcccctatcttcccaggtctgtattccgggagcctgtgtaactcgggcctcaactccaggctcccggctgggtattctcattctctgcagtacttgaaaaaccagactgtgctttctccactcatgcagcccctggctttccactcgcttgtgatgcaaagaggaatttttacatcaccgacaaattctcagcagctgtacagacacttggctgcggctacacctgtaggaagttcatatggggaccttttgcataacagcatttaccctttagctgctataaatcctcaagctgcctttccatcttcccagctgtcatccgtgcaccccagtacaaaactatgcccaggcacctccagatcattcacttcgcacgtgggccttgtgaagggatttgtgaatatccaggaagaacttagaggaccccatctgagttcggatggggaggaccaggaaaaaacgaacgtgatagttctcagctaccccccagtctgccggtaccgctcgatgctgaaacgcatccaggataagccatcttccattctaacggaccagtttgcattggccctggggggcattgcagtggtcagcaggaaccctcagatcctgtactgtcgggacacctttgaccacccgactctcatagaaaacggagagtatatgcgattgagtttgcgccaaatcttaaaggcagaccacggcaaaaaggaaccatgcccacaaagaagagattcattcagtggtgttaaggattccaacaacaattccgatggcaaagccgttgccaaggtgaaatgtgaggccaggtcagccttgaccaagccgaagaataaccataactgtaaaaaagtctcaaatgaagaaaaaccaaaggttgccattggtgaagagtgcagggcagatgaacaagccttcttggtggcactttataaatacatgaaagaaaggaaaacgccgatagaacgaataccctatttaggttttaaacagaaaatggagaaaattgccggagtgattttagaagccacacgtgctgaagatggcatagcctttgtcagcataggcctctgctatggtttggatttatatcacctcccaaatctcatgtcgaatcgtaatccccagtgttggaggaggaggctggtgggagatgattggatcatggtgatagattttcccctggctgttcttgtgatagcgaaaagagagaatgaatcacggctggtggtggtgtgcgcgtttgagagtgttgtcgcagcattgtcaggagtgatcgtgtga

SEQ ID NO: 9921 - DNA, 446 bp, Homo sapiens
  SIMILAR (3)..(353): 731254mologous to Homo sapiens myosin VIIA,accession number U39226,Smith-Waterman Score=483.
  misc_feature (1)...(446): n = a,t,c or g
ccaaggtggccttcctgaagtggatctgccggtggcccaccttcggntccgccttcttcgaggtgaagcaaacctcggagccttcctacccggacgtcatcctcatcgccatcaaccgacatggggttctgctcatccaccccaagaccaaggacctgctcaccacctatcccttcaccaagatctccagctggagcagcggcagcacctacttccacatggcgctggggagcctgggccgtggcagccgcctgctgtgcgagacctccctgggctataagatggatgacctgctgacctcatatgtgcagcagctcctgagtgccatgaacaagcagcggggctccaaggccccagccctggccagcacctagcagcggatgctggcgtgtntgctcaggcgcccttnccgacctctagcctggcggcaccttcccagggcctct

SEQ ID NO: 9922 - DNA, 2338 bp, Homo sapiens
  SIMILAR (449)..(1066): 571254mologous to Homo sapiens myosin VIIa,accession number U55208,Smith-Waterman Score=633.
atgggcggtggctcctgggcacccacaggcctgtgcccccttcagagcttgcttgccatgtcaccagagaagaggaagctggcggctcaggaggggcagttcacagagccacgtcctgaggagccacccaaggaaaagctgcacaccctggaggagttctcctatgagttcttcagggctccagagaaggacatggtgagcatggccgtgctgcccctggcccgtgcccgtggccacctgtgggcctattcctgcgagccgctgcgacagccgctgctcaagcgagtccacgccaacgtcgacctctgggacatcgcctgccagatctttgtcgatatccttccccaccagcctgcctgcacctcggccgtggtcggtgtcagcgtctatccccagtctgtgtcagcgtggagctgccccagcactgtgctccttgacagccacacccatcctccggtacatgggcgactacccttctcggcaggcctggcccaccctggagctcaccgaccagatcttcacactggccctgcagcacccggccctccaggacgaggtctactgccagatcctgaagcatctgacgcacaactccgacaggcacagcgaagagcggggctggcaactgctgtggctgtgcacgggcctcttcccgcccagcaaggggctgctgccccatgcccagaagtttatagacactcggagggggaagctgctggcccccgactgcagccgccgaatccagaaggtcctgaggacggggccccggaagcagcccccgcaccacgtggaggtggaggccgcagagcagaacgtctcccgcatctgccacaagatctacttccccaatgacaccagtgagatgctggaggtggttgccaacacacgggtgcgggatgtgtgtgacagcattgccaccaggctgcagctggcctcctgggagggctgcagcctcttcatcaagatttcagacaaggtcatcagccagaaggagggagacttcttctttgattccttgagggaggtgtctgactgggtgaagaagaacaagccccagaaagaaggtgaggaggcctctgtggagctgggggagggcgtggctgggtgggtcgagggggcactggcggcctctgtgcggcccatgcccattcatccatccattcgttcccgtgtgtccctgggttgtgggaacaaccaggccctggggcccggcggggcccccgtgacgctcccctaccaggtgtacttcatgcggaaattgtggctcaacatatctccagggaaggatgtgaatgcagacaccatactccattaccaccaggagctgcccaagtacctgcgcggattccacaagtgttcgcgggaggatgccatccacctggcgggcctcatctacaaggcccagttcaacaacgaccggtcccagctggctagtgtccccaagatcctgagggaactggtgcctgagaacctcacacgcctgatgtcctcggaggagtggaaaaagagcatccttctagcctatgacaagcataaggacaagacagtggaggaggccaaggtggccttcctgaagtggatctgccggtggcccacccttcggatccgccttcttcgaggtgaaggtaaaccttgccccacgccagggcctcctacccaagcagcgtccgctcagcccagccccagcaggcccagcgtcaaccagcacacatcttggcaaacctcggagccttcctacccggacgtcatcctcatcgccatcaaccgacatggggttctgctcatccaccccagagaccaaggacctgctcaccacctatcccttcaccaagatctccagctggagcagcggcagcacctacttccacatggcgctggggagcctgggccgtggcagccgcctgctgagcgagacgctccctgggctataagatggatgacctgctgacctcatatgtgcagcagctcctgagtgccatgaacaagcagcggggctccaaggccccagccctggccagcacctagcagcggatgctgacgtgactgctccagcgcctgtcccgacctcctcacgtggcggcaccttcccaggccctctcaacccagggcctgtcctgtggcggcagccttccatgctgccccccatacaaagcccactcaggcccgcaggcggccccctctgttctgggcgctgcccagggaggccaaaagacgggcccagaatggggtcgggagtctcggacccccaggctattggtggatgactgactgacaggacacctcccaaccccaccccaccccaccagaatgttcaataaaaactcctggagcaggaaaa

SEQ ID NO: 9923 - DNA, 2505 bp, Homo sapiens
  SIMILAR (1186)..(2232): 881254mologous to Rattus norvegicus TEMO,accession number AF296169,Smith-Waterman Score=1558.
atggcggccagaataccagaaagatggggacttaaaggggacagaaaaattaaatctataaggaacaagcgggatggagtaaataaatctataaggagcaagtggggggaccaggccgacctggctgccgcctgtcgtggcgactgggactccagtgggctgccgcttggagtgcgcgacccccggcgaagcaggacaatagcttggaattcggcctcgtgtttccgcgtcaccagcagagccggtgcggggcgggcagagcggccgtgccgccgccaacgaactgagagccgcgtggggcccagcagcacgccggccagggaagggggcctagcgatcggtccgagggcgacgggccgccagcggccgcagggcgacgaagacgcggaggaggcggagcccggagaggggtgggggccggggataggtttcgaaggagatcgtctacaacaagctgctgccctacgcggagcggctagacgccgagtccgacttgcagctggcccagatcaaatgcaacctgggccgggccgtgcagctccaagagctgtggcccgggggcctcttctggaccaggaaactctccacagggctggacccttagctctgtcctcgctggagctgtccccgagcggtgatcccagggtcgtgacagagcctgtgaagtactcaagccgtcctccctgccactttcctacgggacttcccgggtctttaccatccctctacgtcctccgcatctgcttctcccgaagtgttcgggttgttgtcttcccacctggggggccctgggtagcccaagggccccggccccgagggagagagacatggggtttcaccatgttgctcagatatattcgactttatgggagaaaatttagcaaagaagatcatgttctttttattaagttattgtatgagctggtatcaattccaaaactggaaatcagcatgatgcagggatttgcccgccttttgatcaacttgttaaaatattttccagcagatgccaccgctgagatgctagaagaatggcgacctttaatgtgcccttttgatgtaaccatgcaaaaggccatcacttattttgaaatatttcttcctacctcccttcctccagaacttcatcataaaggttttaaactttggtttgatgaattaattggcctttgggtttcagtgcaaaatctcccacaatgggaggggcaactagtaaatctctttgctcgattggctacagataatatagggtacatagattgggatccatatgtaccaaagggtggaccaagtaagctagtgcaaaaacacttagctggtttgtttaacagcatcacatctttttaccatccttcaaataatgggcgctggctgaacaagttaatgaaactacttcagcggttgccaaacagtgttgttagaagattgcatcgtgaaagatacaagaagccctcttggttaactcctgtgcctgatagccacaagcttactgatcaagatgttacagactttgtacaatgcattattcagcctgtcctcttggctatgtttagcaaaaccggtagtctagaagcagcccaggctttgcagaatcttgcactcatgagacctgaattggtaataccccctgtacttgaaagaacatatcctgcattagagacattaacagaacctcaccagctcacagctactttaagttgtgtaattggagtagcccgcagtttggtatcaggaggcagatggtttcctgaaggtcctacacatatgctacctctgttgatgagagcattgcctggggtggatccaaatgactttagtaaatgcatgatcacattccagttcatagcaacattttctactctggtgcctttagtagattgttcatctgtactacaagaaagaaatgacctcacagaagtggaacgagaactttgttcagccacagctgaatttgaggatttcgtcttacagtttatggacagatgttttggacttatagaaagtagcacattggagcaaacaagagaagagacagaaactgagaaaatgacacacttggagagtttggtcgaattaggtctgtcttctacgtttagtacaatcctcacccaatgttccaaagaaatatttatggtggcccttcagaaggtttttaatttttctacttcacatatatttgaaacaagagtagcaggtcgcatggtggcagacatgtgccgcgctgctgtaaaggactggggcaaacccggggacttgtggaatctgggaatccagtggcatgttccttcttcagaagaagtgtcttttgccttttatcttttggactcctttcttcagcctgagctcgtcaaactccagcattgtggggatggaaaacttgaaatgtctagagatgatattctacagagtctgactatagtgcacaactgtttaattggctctggaaacctcctacctccgttgaaaggagagccagttactaacttaatgtatctctttgattaa

SEQ ID NO: 9924 - DNA, 5396 bp, Homo sapiens
  SIMILAR (2307)..(5396): 941254mologous to Rattus norvegicus TEMO,accession number AF296169,Smith-Waterman Score=5136.
cgccgagtccgacttgcagctggcccagatcaaatgcaacctgggccgggccgtgcagctccaagagctgtggcccgggggcctcttctggaccaggaaactctccacatatattcgactttatgggagaaaatttagcaaagaagatcatgttctttttattaagttattgtatgagctggtatcaattccaaaactggaaatcagcatgatgcagggatttgcccgccttttgatcaacttgttaaagaaaaaggaacttctttcaagagctgatttggagttaccctggagaccactttatgacatggtagaaagaatattatattccaagacagagcacctaggattaaattggtttcctaattctgtagaaaatattctcaaaacactcgtgaaaagctgccgaccatattttccagcagatgccaccgctgagatgctagaagaatggcgacctttaatgtgcccttttgatgtaaccatgcaaaaggccatcacttattttgaaatatttcttcctacctcccttcctccagaacttcatcataaaggttttaaactttggtttgatgaattaattggcctttgggtttcagtgcaaaatctcccacaatgggaggggcaactagtaaatctctttgctcgattggctacagataatatagggtacatagattgggatccatatgtaccaaagatatttacaagaattctgagaagcttgaacctcccagtgggaagcagtcaagtgttagtcccaagatttttaacaaatgcttatgatataggacatgctgtaatatggatcaccgccatgatgggtggaccaagtaagctagtgcaaaaacacttagctggtttgtttaacagcatcacatctttttaccatccttcaaataatgggcgctggctgaacaagttaatgaaactacttcagcggttgccaaacagtgttgttagaagattgcatcgtgaaagatacaagaagccctcttggttaactcctgtgcctgatagccacaagcttactgatcaagatgttacagactttgtacaatgcattattcagcctgtcctcttggctatgtttagcaaaaccggtagtctagaagcagcccaggctttgcagaatcttgcactcatgagacctgaattggtaataccccctgtacttgaaagaacatatcctgcattagagacattaacagaacctcaccagctcacagctactttaagttgtgtaattggagtagcccgcagtttggtatcaggaggcagatggtttcctgaaggtcctacacatatgctacctctgttgatgagagcattgcctggggtggatccaaatgactttagtaaatgcatgatcacattccagttcatagcaacattttctactctggtgcctttagtagattgttcatctgtactacaagaaagaaatgacctcacagaagtggaacgagaactttgttcagccacagctgaatttgaggatttcgtcttacagtttatggacagatgttttggacttatagaaagtagcacattggagcaaacaagagaagagacagaaactgagaaaatgacacacttggagagtttggtcgaattaggtctgtcttctacgtttagtacaatcctcacccaatgttccaaagaaatatttatggtggcccttcagaaggtttttaatttttctacttcacatatatttgaaacaagagtagcaggtcgcatggtggcagacatgtgccgcgctgctgtaaagtgctgcccagaagaatctttgaagctctttgttccccactgctgcagtgttataactcagcttacaatgaatgatgatgtattaaatgatgaagagctagacaaggaattactatggaatcttcaacttttgtctgagattactcgagtggatggaaggaagttgcttctttatagggagcagcttgtaaagattctccaaagaaccctacatttaacctgtaagcagggttacactctgtcttgtaaccttttgcatcatcttctccgttctaccacacttatctaccctacagaatactgcagtgtgccaggtggctttgacaagcctccttctgaatactttcctatcaaggactggggcaaacccggggacttgtggaatctgggaatccagtggcatgttccttcttcagaagaagtgtcttttgccttttatcttttggactcctttcttcagcctgagctcgtcaaactccagcattgtggggatggaaaacttgaaatgtctagagatgatattctacagagtcgtgactatagtgcacaactgtttaattggctctggaaacctcctacctccgttgaaaggagagccagttactaacttagtaccaagtatggtgtccttggaagagacaaagttgtatactggacttgaatatgatctgtctcgagagaaccaccgagaagtaattgctacagttataaggaaacttcttaaccacatacttgataattcagaagatgatactaagtcattgtttcttattataaagattattggagaccttttacaattccaaggatctcacaagcatgaatttgactcccgatggaaaagcttcaacttagtaaagaaatcaatggaaaatcggctccatgggaaaaaacaacatatcagagcactgttgattgatagagtaatgttacagcatgagctacggacactaactgttgagggttgtgaatacaaaaagatacatcaagatatgatcagagatcttcttcgtttatctacaagttcatacagtcaggtgagaaataaggctcagcaaacattttttgctgccttgggagcatataacttctgttgcagagatatcattcccttggttttggagttcttaaggcctgatagacaaggtgttacacagcaacaattcaagggtgccttgtactgtctccttggaaatcacagtggtgtgtgcttggcaaaccttcatgattgggactgtattgtacagacgtggccagcgattgtttcttcagggcttagccaagcaatgtccctggaaaagccatcaatagtgagattgtttgatgatcttgcagaaaagattcataggcagtatgaaacaattggcttggacttcacaattccaaagtcatgtgttgaaatagcggaattacttcaacagtcaaaaaacccctctatcaaccagatattgcttagcccagaaaaaattaaggaaggaattaaacgccaacaagaaaagaatgccgatgccctaaggaactatgaaaatttggtagacaccttgctagatggtgtggagcaaagaaacctgccctggaaatttgaacatataggcattgggcttctgtctctactgctgagagatgaccgagtgttgcctcttcgtgccatacggttttttgttgagaatctcaaccatgatgcaattgtagttcgaaagatggctatctcagctgttgctggtatccttaaacagctaaaaagaacccacaaaaagctgaccattaacccctgtgaaatcagtggatgccctaaacccacccaaattattgctggtgataggcctgataatcattggttgcattatgacagcaaaactataccaagaactaaaaaagaatgggagtcaagttgctttgtggaaaaaactcactggggatactacacctggccaaagaatatggttgtttatgctggtgtggaagagcagcctaagcttggcagaagcagggaggatatgacagaggcagaacagattatatttgatcatttttctgatcctaaatttgttgagcagttaattacttttctatcattagaagacagaaaaggaaaagataagtttaatccacgacgtttttgtctctttaagggtatattcaggaattttgatgatgccttcctgccagttctgaagccccatttagaacatttggttgcagattcacatgaaagcacccagcgatgtgttgcagaaattatagctggtttaatcagaggttctaagcactggacatttgaaaaggtggagaagctttgggagcttctgtgccctctgcttagaacagcactgtccaatattaccgtagaaacttataatgactggggagcttgtatagcaacatcctgtgaaagcagagatccccggaaacttcactggctttttgaactgctgttggaatcaccattgagtggtgaaggaggatcctttgtagatgcatgtcgactttatgtactacaaggtggccttgcccagcaagaatggagagtgcctgaactattgcacagactactgaagtacttggaacccaaactcacccaggtttacaaaaatgtcagagaaagaataggaagtgtgctgacctacatattcatgatagatgtatctttgccaaataccacaccaaccatatcgcctcatgtccctgagtttactgctcgaattctggagaaattgaaacctctcatggatgtggatgaagaaattcagaaccatgttatggaagaaaatggaattggtgaagaagatgagcgaactcagggcattaaactcttgaaaaccatattgaaatggctgatggcaagtgcaggaagatccttttctacagcagttacagaacaacttcagcttctacctttgtttttcaagattgccccagtggaaaatgacaatagctacgatgaactgaaaagagatgcaaagttatgtttatcattaatgtctcaggggttgctttaccctcatcaagtgcctttggtacttcaggtgctaaaacaaacagcaagaagcagttcttggcatgcacgatacacagtactgacctacctccagaccatggtattttataacctctttattttcctaaacaatgaagatgcagttaaagatatcaggtggctggttataagtcttttggaggacgaacaactggaggttcgagaaatggctgctactaccttaagcggtctgctacagtgtaactttcttaccatggacagtcctatgcagattcattttgagcaactttgcaaaacaaaactacctaagaaaagaaagcgagaccctggttctgtaggagataccattccttctgcagagttggtcaaacgccatgctggggtgctaggacttggtgcatgtgttctttctagtccttacgatgttcccacctggatgccccagctcctcatgaatctcagtgcacatctaaatgatcctcagcctattgagatgactgtaaaaaaaaccttatccaatttccgaaggactcaccatgacaactggcaggaacataaacagcaattcactgatgaccaactgcttgttctcaccgatcttcttgtgtcaccatgctattatgca

SEQ ID NO: 9925 - DNA, 477 bp, Homo sapiens
  SIMILAR (31)..(99): 1001254mologous to Homo sapiens KIAA0953 protein,accession number AB023170,Smith-Waterman Score=132.
gtccgcgaattcccgggtcgacgatttcgtggctgctgtggtgccctacgccccaggtacaaaaggctggttgacaacatcttccctgaggatcccgaggtacgtgtgcattgctatggaggctttggaccagctgctcatggcctgccactgccagagcatcaacctcttcgtggagagcttcctcaagatggtggccaagctgctggagtcagagaaatccaacctgcagatcctcggcaccaactcgtttgtgaagtttgccaacatcgaggaggacaccccgtcctatcaccggagctatgacttctttgtgtcccgattcagtgaaatgtgccactcgagccatgatgacttagaaatcaagaccaaaattcgaatgtcaggcatcaaaagcctgcaaggggtggtgaggaagacggtgaatgatgaactgcaggccaatatctgggacccacagcacatggataagatcgt

SEQ ID NO: 9926 - DNA, 5334 bp, Homo sapiens
  SIMILAR (1292)..(2311): 271254mologous to Drosophila melanogaster putative transmembrane protein cmp44E,accession number AF099028,Smith- Waterman Score=316.
gctggcggcgcccggctccgtcctgcccgcggccggcccccgcgtctgctccctccccgcccgggcccctgtcggccgccgccagtccccgccccgactgtgaatgaaaggcgggcgccgccgagggctggctgggaacgccgcagcgacgccggcctctcgagaggcgcgcgccccgccgagatgtacggtgtgtgtggctgctgtggtgccctacgccccaggtacaaaaggctggttgacaacatcttccctgaggatcccgaggatggtctggtgaagaccaacatggagaagctgaccttctatgccctctcagctccagaaaaacttgatcgtattggcgcctacctctctgagaggctcatccgtgacgtgggtcgccatcgatatgggtacgtgtgcattgctatggaggctttggaccagctgctcatggcctgccactgccagagcatcaacctcttcgtggagagcttcctcaagatggtggccaagctgctggagtcagagaaacccaacctgcagatcctcggcaccaactcgtttgtgaagtttgccaacatcgaggaggacaccccgtcctatcaccggagctatgacttctttgtgtcccgattcagtgaaatgtgccactcgagccatgatgacttagaaatcaagaccaaaattcgaatgtcaggcatcaaaggcctgcaaggggtggtgaggaagacggtgaatgatgaactgcaggccaatatctgggacccacagcacatggataagatcgttccatcactgcttttcaatctacagcatgtagaggaggcagagagccggtctccctcacccctccaagcacctgagaaggagaaagagagccccgcggagctggctgagaggtgtcttcgggagctgctgggccgggctgcctttggcaacatcaaaaacgccatcaagcctgttctcatccatctggataaccattctctttgggaacccaaggtgtttgccatccgttgctttaaaatcatcatgtactcaattcagccgcagcactcacacctggtcatccagcagctcctgggccacctggacgccaacagccgcagcgctgcgacggtgcgcgcgggcatcgtggaagtcttgtcggaagccgcggtcatcgctgccaccggctctgtggggcccacagtactggagatgttcaaccacgctgctgaggcagctgcggctcagcatcgactacgcgctgaccgggagctacgacggggcggtcagcctcggcaccaagatcatcaaggagcacgaggagcgcatgttccaggaggccgtcatcaagaccgtgggctcctttgccagcacgctgcccacctaccagcgctccgaggtgatcctcttcatcatgagcaaggtcccgcggccatccctgcaccaggcggtggacacaggcaggacgggggagaataggaaccgtctgacccagattatgctgctaaaatccctcctgcaggtatccacaggtttccagtgcaacaacatgatgtcagccctgcctagcaacttcctggaccgccttctctccaccgccctcatggaggatgcagaaattcgactctttgttctagagattctcatcagtttcattgatcgtcatggcaaccgccacaagttctctaccatcagtaccctcagtgacatctctgtcctgaagctgaaagtggacaagtgctctcgacaggacaccgtcttcatgaagaagcactcccagcagctctacagacacatctacctgagctgcaaggaggaaacaaacgtgcagaaacactacgaggcgctctatggcttgctggccctcatcagcatcgagctggctaacgaggaggtggtggtggacctcatccgtctggtgctggctgttcaggacgtggcccaagtcaatgaggagaacttgcctgtctacaaccgctgtgccctctatgctctgggcgcagcctacctgaacctcatcagtcagctcacaacagtgcctgccttctgccagcacatccatgaggtgatagagaccaggaagaaagaggctccatacatgctccccgaggatgtgtttgtggagaggcccaggctgtctcagaatcttgatggggtggtcattgagctcctcttccgccagagcaagatcagtgaagtcctgggaggcagtggctacaactcggaccggctctgcctgccctacattcctcagctgacagatgaggatcgtttatccaagaggaggagcattggagagaccatctccctgcaggtggaggtagaatcgaggaacagtccggagaaggaggaggtgagtgtccgtgccaccgtcctggggcagccccacctcctgtagattggacgctggactccaggctcccctgcctgcatagtgagcttaaggctgcatggaaagcaagcttctcgagtaattccacacttgtactgactctccccacgtatgcgtcatagatacttcccttcggaaaaattgttagggtcctccctgctcccatgaggatatcataaaactcactcttgaaaggcctggctggggatggtggctcacacctgtgatcccaacattttggaggctgaggcaggaggactgcttgagcccaggagtttgagatgatctggggcaatataaggagaccccatctctacaaaaaataattgaaaaatcagccaggcatggtgacgtgcacctgtggtcccaggtactcaggatgctgaggtgggagaatcacctgagcctgggaggtcaaggctgctgtaagccatgatggcagcacggcacttcagcctaggtgacagagtgagacctcgtctcaaaaaaattaaaaagaaaggcatgctggtcatcattccccactcacagggggaccgatatgctctgggttggaaactagaagacttaactggagagataagggtgagaacagctttcatagtgttgcttccgtatgtatcaataaagaatctttttttaaatttacactatttttaaagcaattttagttacagcaaaattgagaggaaggtacagagatcgccctttgccccctcccctcccctgacacatgcacagcctcccctcctatccatatcccccagcagagtggtgcatttcttacagttcaacctgccttaacacaacagtatcatctgaagtctgtcgtttacactggggttcgccctcagcgttgtacattctgtgggtttggacaaatgcgtaatgacatgcatcccccaccagagtaccatacagagtcatttcctgccctaaaaccccctgtgctccacctcttcatctctcccctaaccactgacagccaagatgttttttttttttttttttaatgctgactgttacagttcacaagaagtatggaggacacacatctgggtgggaccgggacagaaagatttacatggtcctcaggcatggacaggctggcattccccagcctctctgcccattagggctgatatagacatggaggacagctttgacatcaagcctttccccagatgcaatcagaggtaggagaagtctctaggggtcaggatcaagcctccccctaactgtgccctcgaccacttcatttattggggcagatctctaccccagggccctcaaagcttatccagaaccttcccacggaaggaagctctgacttgggctaattggacaagtaaaatgaggttgaacgaggcatcctccatggcccttccagctccaaggactgggaacctccaatgcgttaggcatcggggtgagttggctgctctctccccatagtggcgattctcccttcccaagaggtaagagaccctcgggaattgaggagtgaagtgactcagaagcgcaaggcgaaatgcttacacagctacagagccacctcctcactagtggcctcctgggccaccagtatcagttccttcctcccttcaagagtcagcttagcccagaggtagcttggtggcaaagcaggggtgcaggggccttcatcctgtgcccttctgccatgccacaactctctccactctcagccatcagtgccagtccagagtcccacggtggttcctagggccgtactgcccagccttgccgcaggggtgaataaatgcttgtttggtcaaatctgaatcctggtgcctggcattcccagccatgcatagtctgggctctgccatttcatttttccccacctgctctggcccgtatccactgtcccactctggtggggctgctctcgatctctcccacgctgcgctccgccatctccaggcctttgctagtgcagaatgccacatctgaaccacccttccctccacactggtgcagctgagcgcctgtgaactgtctgttctccagcgcccggcccctgttcagtttcctcataaacttctctctccctgctcttgcccagggagcatcccttctctcttgcccagagagcggcattttctttgactgttgccaccacacagttccctagcaccctgcaggtgaatatccaatgttgctcggtgctgacagtggatgaatggatggacgtacagaggataagtcctcagagcgagttaaagccgagcatagctctctcttgcatgtaattcctatgctagcaaattgtgcagtttctatagactcacctacagtcctgcatgtagttggtgctcacttaatgtttgttaaatgactttatctcatacatatacttctgtcctctcctactcaaacaaaaatgccaaacaaatcaaaaaatgcacgactcagtgaattttcataaagtgtgtatgcccacgcaaccacgcctggatgagagagtggaacactgtcatcatccaggggccctgcctctgtgccccctcccctaagggagctcccagcctgagttgcgttacttctggaactttatatcaatgaaatcattctgttctgtgtctgctgcttttgcttaagattatgtttaaatgatagagcatgaggctgggcgtggtggctcatgcctgtaatctcagcactttgggaggccgaggcaggtggatcacctgaggttaggagttcaagaccagcctgatcaacatggtgaaaccccgtctttactaaaactacaaaaaattagccgggcatggtggtgggcacctgtaatctcagctactcgggaggctgaggcaggagaatcacttgaacccaggaggcaaaggttgcagtgagccaagatcacgccactgcactccagcctggatgacagaatgagactctgtctcaaaaaaaaaaaaaaaaaactcgagggggggcccggtacc

SEQ ID NO: 9927 - DNA, 662 bp, Homo sapiens
  SIMILAR (88)..(213): 831254mologous to Rattus norvegicus protein phosphatase 2C,accession number AF095927,Smith-Waterman Score=195.
attcccgggtcgacgatttcgtggagcccggccgctgctcgcgggctgagtgtctgtcgctgctgccgcctccacccagcctccgccatggacctcttcggggacctgccggagcccgagcgctcgccgcgcccggctgccgggaaagaagctcagaaaggacccctgctctttgatgacctccctccggccagcagtactgactcaggtacagtcttcaggctctcccaggatcagggggacctttgctttttgatgatctcccacccgctagcagtggcgattcaggttctcttgccacatcaatatcccagatggtaaagactgaagggaaaggagcaaagagaaaaacctccgaggaagagaagaatggcagtgaagagcttgtggaaaagaaagtttgtaaagcctcttcggtgatctttggtctgaagggctatgtggctgagcggaagggtgagagggaggagatgcaggatgcccacgtcatcctgaacgacatcaccgaggagtgtaggcccccatcgtccctcattactcgggtttcatattttgctgtttttgatggacatggaggaattcgagcctcaaaatttgctgcacagaatttgcatcaaaacttaatcagaaaatttcctaaaggagatgtaatcagtgtagag

SEQ ID NO: 9928 - DNA, 1433 bp, Homo sapiens
  SIMILAR (3)..(275): 371254mologous to Rattus norvegicus protein phosphatase 2C,accession number AF095927,Smith-Waterman Score=110.
  misc_feature (1)...(1433): n = a,t,c or g
ggaaagaagctcagaaaggacccctgctctttgatgacctccctccggccagcagtactgactcagctgtagctgcattaggtactactccaagcccagtaacactgtggttcttgcagactcgtagaggatctaagatctggaggaattccctggattaccagagcaaagtcggggctgagccctggtgccatgaacggcagcagaaggcagacagattcctgggcaaaagaggacgggtccctgcctcttcggtgatctttggtctgatagggctatgtggctgagcggaagggtgagagggaggagatgcaggatgcccacgtcatcctgaacgacatcaccgaggagtgtaggcccccatcgtccctcattactcgggtttcatattttgctgtttttgatggacatggaggaattcgagcctcaaaatttgctgcacagaatttgcatcaaaacttagtcagaaaatttcctaaaggagatgtaatcagttgtagagaaaaccgtgaagagatgccttttggacactttcaagcatactgatgaagagttccttaaacaagcttccagccagaagcctgcctggaaagatgggtccactgccacgtgtgttctggctgtagacaacattctttatattgccaacctcggagatagtcgggcaatcttgtgtcgttataatgaggagagtcaaaaacatgcagccttaagcctcagcaaagagcataatccaactcagtatgaagagcggatgaggatacagaaggctggaggaaacgtcagggatgggcgtgttttgggcgtgctagaggtgtcacgctccattggggacgggcagtacaagcgctgcagntgtcacctctgtgccccgacatcaagacgctgcccagctgacccccaaatgacaggttcatttcgtttggccctgtgatgggctctttcaaggtctttaccccagaagaagccgtgaacttcatcttggtcctgtctcgaggatgaaaagatccagacccgggaagggaagtccgcagccgacgtccgcttacgaagcagccctgcaancaggctggccaacaaggcggttgcagccggggctcggccggacaacgtcactgtgattggtggtgcgggatagggcactgaggggtggcgcgcggccaggagcacgcatgggtatttgacttaaaaaggttcattttgtgtgtgtgcacattgtgtgttttgtgtactccctgtgggacgtcccatggttgtaaataaaggtttctctttttaaaaaaaaaaaaaaaaaaaaaaaaaggggggcccgttttaaagaacccttggggggcccaaattttacccgggcttgcaacgtaaaactttttccccttatggggggccgttttaaaacctaggccttggcccgggttttaaaaaggtcgggagtg

SEQ ID NO: 9929 - DNA, 419 bp, Homo sapiens
  SIMILAR (65)..(418): 851254mologous to Homo sapiens acinusL,accession number AF124726,Smith-Waterman Score=500.
  misc_feature (1)...(419): n = a,t,c or g
tatcgtccaacctgctgaggaggaagaggatcaagaaacacctttcagaaacctaagggccagagcacatcgaaatttgaaaacagaggaggaacaacaggaggaggaggaggaggaattagcactggccaaaggaatcactgaagaatgtctgaaacagccatctttggaacagaaggaaggcagaagagcttctcatacccttctcccaagccacagattgaaacagtcagctgattcatcctctagccggncctcctcatcttcctcctccagttctagatcaagatctcgctctcctgacagttcaggttctcggtctcattcaccgctcagatccaagcagagagatgtagcccaggcacgtactcatgccaaccctcgtggtagacccaagatgggctccagatcaacatcag

SEQ ID NO: 9930 - DNA, 1842 bp, Homo sapiens
  SIMILAR (1)..(1842): 1001254mologous to Homo sapiens acinusS',accession number AF124728,Smith-Waterman Score=3183.
atgtctccggctgatcgctgccgctccgccaatacaatagagccagccactaccagcagcctggccctcttcctccttctccagagagaccaatccagccgaactcggggtttgcctgaggagaaggaggaagtgaccatggacacaagtgaaaacagacctgaaaatgatgttccagaacctcccatgcctattgcagaccaagtcagcaatgatgaccgcccggagggcagtgttgaagatgaggagaagaaagagagctcgctgcccaaatcattcaagaggaagatctccgttgtctcagctaccaagggggtgccagctggaaacagtgacacagaggggggccagcctggtcggaaacgacgctggggagccagcacagccaccacacagaagaaaccttccatcagtatcaccactgaatcactaaagagcctcatccccgacatcaaacccctggcggggcaggaggctgttgtggatcttcatgctgatgactctcgcatctctgaggatgagacagagcgtaatggcgatgatgggacccatgacaaggggctgaaaatatgccggacagtcactcaggtagtacctgcagagggccaggagaatgggcagagggaagaagaggaagaagagaaggaacctgaagcagaacctcctgtacctccccaggtgtcagtagaggtggccttgcccccacctgcagagcatgaagtaaagaaagtgactttaggagataccttaactcgacgttccattagccagcagaagtccggagtttccattaccattgatgacccagtccgaactgcccaggtgccctccccaccccggggcaagattagcaacattgtccatatctccaatttggtccgtcctttcactttaggccagctaaaggagttgttggggcgcacaggaaccttggtggaagaggccttctggattgacaagatcaaatctcattgctttgtaacgtactcaacagtagaggaagctgttgccacccgcacagctctgcacggggtcaaatggccccagtccaatcccaaattcctttgtgctgactatgccgagcaagatgagctggattatcaccgaggcctcttggtggaccgtccctctgaaactaagacagaggagcagggaataccacggcccctgcaccccccacccccacccccggtccagccaccacagcacccccgggcagagcagcgggagcaggaacgggcagtgcgggaacagtgggcagaacgggaacgggaaatggagcggcgggagcggactcgatcagagcgtgaatgggatcgggacaaagttcgagaagggccccgttcccgatcaaggtcccgtgaccgccgccgcaaggaacgtgcgaagtctaaagaaaagaagagtgagaagaaagagaaagcccaggaggaaccacctgccaagctgctggatgaccttttccgaaagaccaaggcagctccctgcatctattggctcccactgactgacagccagatcgttcagaaagaggcagagcgggccgaacgggccaaggagcgggagaagcggcgaaaggagcaagaagaagaagagcaaaaggagcgggagaaggaagccgagcgggaacggaaccgacagctggagcgagagaaacgtcgggagcacagtcgggagagggacagggagagagagagagaaagggagcgggacaggggggaccgagatcgggatagggaaagggaccgagaacgaggcagggaaagggatcgcagggacaccaagcgccacagcagaagccggagtcggagcacacctgtgcgggaccggggtgggcgccgc

SEQ ID NO: 9931 - DNA, 3540 bp, Homo sapiens
  SIMILAR (1400)..(2956): 971254mologous to Homo sapiens acinusS',accession number AF124728,Smith-Waterman Score=2655.
gcaatgatgaccgcccggagggcagtgttgaagatgaggagaagaaagagtacctcatgtacggtaatccgcccgtaaaatataaccctgcccaactggccaatcgctgatgccgcctcttcctctggacccacccgctgctactgagctgcccaatcagagccaagtctgctatccaggtgtcttggccagaggggggcatgtatatgggctcctgtgatgggcccccttttgcctccctgtcttgcttacatcagggggccaagaagaacactgttctggagagacttgtattgagcaagcaaaaaacatttggaaaggggtggacttgcatcatctccctacttgggacaccccaagaagagcttgtgccagtgctggggcgcctgcccacatgcccttgcccttttgaggactgtgggttgccttgtttgctacagactgttgggatccccatctagggcaccaagacctcctaaagtttgtgatcgcagtgccatgctgtaaaacactgagtgggaccctctacttaagctgtgacgactaggaaccgtgcagaggagtctagggtctgagcccctggggatttaatgctgatgacagcccagcccatgtgtcaccacttgctcatcagatggactttcctttggtccctgttgtccatggtgaagggcagcatgttggttgctccaacttctcctccatccctggaggcagggactcatttcatccacctgactggaaccactgtctcagctggagtccctgaggagatgccagccacaactctccgaagagaagtattctgaccttgctgctgaatgtctgccaggtcctggggtattcacctacccccaggctaccttcatcagaggctccatgatcccactcggtgagaggaccccctccccagttacaggcagaggagaaagggactctggagtcatcacctggattccaagtattgggtggtgttattgctgcagcttgccactggtggacatagggtcctgcctgcctctcacgataaaaggcaaggatcattcctgctactcacaggccatctcatcagggactgcaagatgatgtcccttcagggccaggactgatgtctctgcccctttcccccctctatccctcgctgagcctggccaccgccagtgaactgtcttgacatcatggaaactgggcagcgtccccccacacgtttccctcccgccccccctgcgcccctgggaggactctggcagtgccgtgctgactaccacgccgtgcgcccaccttttttgccaacccaaccccccaccaattgcacagcgcctagcagggagggctcattctgattggaccggcggttgactagatacagtacacagtgaggtgcgattggctgaactgaagatcccagagctcgctgcccaaatcattcaagaggaagatctccgttgtctcagctaccaagggggtgccagctggaaacagtgacacagaggggggccagcctggtcggaaacgacgctggggagccagcacagccaccacacagaagaaaccttccatcagtatcaccactgaatcactaaaggaggctgttgtggatcttcatgctgatgactctcgcatctctgaggatgagacagagcgtaatggcgatgatgggacccatgacaaggggctgaaaatatgccggacagtcactcaggtagtacctgcagagggccaggagaatgggcagagggaagaagaggaagaagagaaggaacctgaagcagaacctcctgtacctccccaggtgtcagtagaggtggccttgcccccacctgcagagcatgaagtaaagaaagtgactttaggagataccttaactcgacgttccattagccagcagaagtccggagtttccattaccattgatgacccagtccgaactgcccaggtgccctccccaccccggggcaagattagcaacattgtccatatctccaatttggtccgtcctttcactttaggccagctaaaggagttgttggggcgcacaggaaccttggtggaagaggccttctggattgacaagatcaaatctcattgctttgtaacgtactcaacagtagaggaagctgttgccacccgcacagctctgcacggggtcaaatggccccagtccaatcccaaattcctttgtgctgactatgccgagcaagatgagctggattatcaccgaggcctcttggtggaccgtccctctgaaactaagacagaggagcagggaataccacggcccctgcaccccccacccccacccccggtccagccaccacagcacccccgggcagagcagcgggagcaggaacgggcagtgcgggaacagtgggcagaacgggaacgggaaatggagcggcgggagcggactcgatcagagcgtgaatgggatcgggacaaagttcgagaagggccccgttcccgatcaaggtcccgtgaccgccgccgcaaggaacgtgcgaagtctaaagaaaagaagagtgagaagaaagagaaagcccaggaggaaccacctgccaagctgctggatgaccttttccgaaagaccaaggcagctccctgcatctattggctcccactgactgacagccagatcgttcagaaagaggcagagcgggccgaacgggccaaggagcgggagaagcggcgaaaggagcaagaagaagaagagcaaaaggagcgggagaaggaagccgagcgggaacggaaccgacagctggagcgagagaaacgtcgggagcacagtcgggagagggacagggagagagagagagaaagggagcgggacaggggggaccgagatcgggatagggaaagggaccgagaacgaggcagggaaagggatcgcagggacaccaagcgccacagcagaagccggagtcggagcacacctgtgcgggaccggggtgggcgccgctagctgggaaaacactagagctgcaggtaccagccactcggccccagggggttatggccacagagggataggcacagtctccaccaccctggagccaagggtctttcacatcacctatccctacatacataccaaatggaaaagtggccatccttttccccccaaacacacccccttaacctatctcttgggacttagcccgaccctccctctcatttcccattaagtctgagaggcaagagctaggttaggcaaggaggtggttggccagagatggggaacagccaggtgccccagtcctctgatttttcctccatcctgcttaccacctccctgggtacttacagccttctcttgggaacagccggggccaggactgggtcacctatgagctgaatcagcatctcctcctgagtcccagggcccctgcagttcccagtctcttctgtcctgcagcccttgcctctttcccacaggttccactttatatccaccttttccttttgttcaatttttatttttattttttttattattaaatgatgtggtctatggaaaaaaaaataaaaatctgacttagtttt

SEQ ID NO: 9932 - DNA, 430 bp, Homo sapiens
  SIMILAR (196)..(122): 361254mologous to Homo sapiens Tissue plasminogen activator residues 266-321,accession number R64210,Smith-Waterman Score=37.
ggaaacgtgtggggggacgctgcccagtttccatgatgtcaagacagttcactggcggtggccaggctcagcgagggatagaggggggaaaggggcagagacatcagtcctggccctgaagggacatcatcttgcagtccctgatgagatggcctgtgagtagcaggaatgatccttgccttttatcgtgagaggcaggcaggaccctatgtccaccagtggcaagctgcagcaataacaccacccaatacttggaatccaggtgatgactccagagtccctttctcctctgcctgtaactggggagggggtcctctcaccgagtgggatcatggagcctctgatgaaggtagcctgggggtaggtgaataccccaggacctggcagacattcagcagcaaggtcagaatacttctcttcggagagttgt

SEQ ID NO: 9933 - DNA, 511 bp, Homo sapiens
  SIMILAR (13)..(153): 931254mologous to Mus musculus acinusL protein,accession number AF168782,Smith-Waterman Score=210.
aagtacctcacgcaaatgacggagctggaggaggtgactctgaacgggaagcctcttcaggcgctgcgggtgaccgacctgaaggccgcactggagcagcgaggcctagccaagagcgggcagaagagtgccctggtcaagcggctcaaaggggtgaggagtcggcgttgctggggtgtcggaggagagcggacccggtagagacgagcctctgccgcggcgcaggcgcagtatccgggctcggcgcgagctcgctcaggccgccagcgcgagcctctggatccgcgcgcacggtggttgatgaggttcgcgctggaatggagatcgcgccggttcccgccttaacggcagcagcgcgagcccaaatgggagggtgtgcactactctccaggagtgtcttaagctccttcctccttcccccaccccctccttgtttgtatctgtggtttcggcgcatgcgctgcagaaggagttaaatcccactacaacctacggcgttgctggcctgagg

SEQ ID NO: 9934 - DNA, 4618 bp, Homo sapiens
  SIMILAR (1)..(2748): 981254mologous to Homo sapiens acinusL,accession number AF124726,Smith-Waterman Score=4521.
atgtggagacggaaacatccgaggacatccggaggaacccggggagttctgagtggtaatcgaggggtagagtatggcagtgggcggggtcatctcggtacgttcgaagggcgttggcggaaattaccgaagatgcccgaagccgtcgggacggacccgagtacctcacgcaagatggcggagctggaggaggtgactctggacgggaagcctcttcaggcgctgcgggtgaccgacctgaaggccgcactggagcagcgaggcctagccaagagcgggcagaagagtgccctggtcaagcggctcaaaggggctctaatgctagaaaatttacagaaacactcaacaccccatgctgcattccagccaaattcccagattggtgaggaaatgagccagaacagtttcataaaacagtatctggaaaagcagcaggagctacttaggcagcgtctggaacgtgaagctcgagaagctgcagaacttgaagaagcttcagctgagtcggaggacgagatgatccatcctgagggagtggcttccctgctgcctcctgactttcagagcagcctggagagaccagagctggagctcagcagacattcgcccagaaaaagctcctcaatttctgaagagaaaggtgactctgatgatgagaaaccaaggaaaggagaaagacgatcatctagggtcagacaggcaagagcagctaaactgtctgagggcagccaacctgctgaggaggaagaggatcaagaaacaccttccagaaacctaagggtcagagcagatcgaaatttgaaaacagaggaggaagaagaggaggaggaggaggaggaagaagatgatgaagaagaggaaggtgatgatgagggacaaaaatctagggaggcaccaatcctgaaagagtttaaggaagaaggggaagagatacctagagtaaaaccagaggagatgatggatgagagacccaaaacaagatcccaggaacaggaggtgttagagagaggagggagatttacaagatcccaggaagaggctagaaaaagtcatctggccagacagcagcaggagaaggaaatgaaaacaacatctccccttgaggaggaagaaagagaaataaaatcttcacaaggcttaaaggaaaaatcgaagtctccttcccctcctcgactgactgaagatcgaaagaaggcctcacttgtagcgctgccagagcaaactgccagcgaggaggagactcctccacctttactaacaaaggaagcatcttctccaccacctcatccacagctccatagcgaagaagaaatagagcccatggaaggcccagccccccctgtcctcattcagttatctcctcctaatacagatgctgacaccagggagctattagtatctcagcatactgtccagttggtaggaggcctgtctcctttgtcaagtccttcagacaccaaagcagaatctccagcagagaaagtgccagaggagagtgtcctgcctctggttcagaaaagcacactggctgactactcagcccagaaggatcttgaacctgagtcagacagatctgctcagcccctccctctaaaaattgaggaattagcactggccaaaggaatcactgaagaatgtctgaaacagccatctttggaacagaaggaaggcagaagagcttctcatacccttctcccaagccacagattgaaacagtcagctgattcatcctctagccggtcctcctcatcttcctcctccagttctagatcaagatctcgctctcctgacagttcaggttctcggtctcattcaccgctcagatccaagcagagagatgtagcccaggcacgtactcatgccaaccctcgtggtagacccaagatgggctccagatcaacatcagagtccagatcaaggtcacgttcacgttctcgttcagcatcaagcaacagcagaaaatctctgagccctggagtctccagggacagcagcaccagctatactgaaaccaaagatccctcttctggtcaggaggttgcaactccaccagtgccacaactgcaggtctgtgagccaaaggagaggacttccacctcctcatcctctgtccaagcaaggcgtctgagtcagcctgaatcagctgaaaagcatgtgacccagaggttacagcctgagcgggggagcccaaagaagtgtgaagctgaagaggcagagccaccagctgccacacagccccaaacctcagagactcagacctctcatctgccagaatcagaaagaattcatcacactgttgaggagaaggaggaagtgaccatggacacaagtgaaaacagacctgaaaatgatgttccagaacctcccatgcctattgcagaccaagtcagcaatgatgaccgcccggagggcagtgttgaagatgaggagaagaaagagagctcgctgcccaaatcattcaagaggaagatctccgttgtctcagctaccaagggggtgccagctggaaacagtgacacagaggggggccagcctggtcggaaacgacgctggggagccagcacagccaccacacagaagaaaccttccatcagtatcaccactgaatcactaaagagcctcatccccgacatcaaacccctggcggggcaggaggctgttgtggatcttcatgctagatgactctcgcatctctggaggatggagacagagcgttaatggcgatagatggggacccatgacaaaggggcttgaaaatatgccggacagtcactcaggtagtacctgcagagggccaggagaatgggcagagggaagaagaggaagaagagaaggaacctgaagcagaacctcctgtacctccccaggtgtcagtagaggtggccttgcccccacctgcagagcatgaagtaaagaaagtgactttaggagataccttaactcgacgttccattagccagcagaagtccggagtttccattaccattgatgacccagtccgaactgcccaggtgccctccccaccccggggcaagattagcaacattgtccatatctccaatttggtccgtcctttcactttaggccagctaaaggagttgttggggcgcacaggaaccttggtggaagaggccttctggattgacaagatcaaatctcattgctttgtaacgtactcaacagtagaggaagctgttgccacccgcacagctctgcacggggtcaaatggccccagtccaatcccaaattcctttgtgctgactatgccgagcaagatgagctggattatcaccgaggcctcttggtggaccgtccctctgaaactaagacagaggagcagggaataccacgggcccctgcaccccccacccccacccccggtccagccaccacagcacccccgggcagagcagcgggagcaggaacgggcagtgcgggaacagtgggcagaacgggaacgggaaatggagcggcgggagcggactcgatcagagcgtgaatgggatcgggacaaagttcgagaagggccccgttcccgatcaaggtcccgtgaccgccgccgcaaggaacgtgcgaagtctaaagaaaagaagagtgagaagaaagagaaagcccaggaggaaccacctgccaagctgctggatgaccttttccgaaagaccaaggcagctccctgcatctattggctcccactgactgacagccagatcgttcagaaagaggcagagcgggccgaacgggccaaggagcgggagaagcggcgaaaggagcaagaagaagaagagcaaaaggagcgggagaaggaagccgagcgggaacggaaccgacagctggagcgagagaaacgtcgggagcacagtcgggagagggacagggagagagagagagaaagggagcgggacaggggggaccgagatcgggatagggaaagggaccgagaacgaggcagggaaagggatcgcagggacaccaagcgccacagcagaagccggagtcggagcacacctgtgcgggaccggggtgggcgccgctagctgggaaaacactagagcttgcaggtaccagccactcggccccagggggttatggccacagagggataggcacagtttccaccaccctggagcctagggtctttcacatcacctatccctacatacataccaaatggaaaagtggccattcttttccccccgaaaaacacccctttaacctatttctggggacttatccggaccttcctttttattgcccattaagtctgagaggcaagagctaggttaggcaaggaggtggttggccagagatggggaacagccaggtgccccagtcctctgatttttcctccatcctgcttaccacctccctgggtacttacagccttctcttgggaacagccggggccaggactgggtcacctatgagctgaatcagcatctcctcctgagtcccagggcccctgcagttcccagtctcttctgtcctgcagcccttgcctctttcccacaggttccactttatatccaccttttccttttgttcaatttttatttttattttttttattattaaatgatgtggtctatggaaaaaaaaataaaaatctgacttagtttt

SEQ ID NO: 9935 - DNA, 6307 bp, Homo sapiens
  SIMILAR (273)..(2009): 971254mologous to Homo sapiens acinusL,accession number AF124726,Smith-Waterman Score=2797.
cggagctggaggaggtgactctggacgggaagcctcttcaggcgctgcgggtgactcgacctgaaggccgcactggagcagcgaggcctagccaagagcgggcagaagagtgccctggtcaagcggctcaaaggggctctaatgctagaaaatttacagaaacactcagcactcccatgctgcatttcagccaaattcccagattggtgaggaaatgagccagaacagtttcataaaacagtatctggaaaagcagcaggagctacttatgtagccgtctggaacgtgaagctcgagaagctgcagaacttgaaggaaaaagctcctcaatttctgaagagaaaggtgactctgatgatgataaaccaaggaaaggagaaagacgatcatctagggtcagacaggcgagagcagctaaactggctgagggcagccaacctgctgaggaggaagaggatcaagaaacaccttccagaaacctaagggtcagagcagatcgaaatttgaaaacagaggaggaagaagaggaggaggaggaggaggaagaagatgatgaagaagaggaaggtgatgatgagggacaaaaatctagggaggcaccaatcctgaaagagtttaaggaagaaggggaagagatacctagagtaaaaccagaggagatgatggatgagagacccaaaacaagatcccaggaacaggaggtgttagagagaggagggagatttacaagatcccaggaagaggctagaaaaagtcatctggccagacagcagcaggagaaggaaatgaaaacaacatctccccttgaggaggaagaaagagaaataaaatcttcacaaggcttaaaggaaaaatcgaagtctccttcccctcctcgactgactgaagatcgaaagaaggcctcacttgtagcgctgccagagcaaactgccagcgaggaggagactcctccacctttactaacaaaggaagcatcttctccaccacctcatccacagctccatagcgaagaagaaatagagcccatggaaggcccagcccccgctgtcctcattcagttatctcctcctaatacagatgctgacaccagggagctattagtatctcagcatactgtccagttggtaggaggcctgtctcctttgtcaagtccttcagacaccaaagcagaatctccagcagagaaagtgccagaggagagtgtcctgcctctggttcagaaaagcacactggctgactactcagcccagaaggatcttgaacctgagtcagacagatctgctcagcccctccctctaaaaattgaggaattagcactggccaaaggaatcactgaagaatgtctgaaacagccatctttggaacagaaggaaggcagaagagcttctcatacccttctcccaagccacagattgaaacagtcagctgattcatcctctagccggtcctcctcatcttcctcctccagttctagatcaagatctcgctctcctgacagttcaggttctcggtctcattcaccgctcagatccaagcagagagatgtagcccaggcacgtactcatgccaaccctcgtggtagacccaagatgggctccagatcaacatcagagtccagatcaaggtcacgttcacgttcacgttctcgttcagcatcaagcaacagcagaaaatctctgagccctggagtctccagggacagcagcaccagctatactgaaaccaaagatccctcttctggtcaggaggttgcaactccaccagtgccacaactgcaggtctgtgagccaaaggagaggacttccacctcctcatcctctgtccaagcaaggcgtctgagtcagcctgaatcagctgaaaagcatgtgacccagaggttacagcctgagcgggggagcccaaagaagtgtgaagctgaagaggcagagccaccagctgccacacagccccaaacctcagagactcagacctctcatctgccagaatcagaaagaattcatcacactgtctcccaccccccgcccagcacccccaacccccaaccattttctccatgctggtgtctccagatcctgaggatcagcaggcctttacttattaagcagttgattaaacacagtgaggagaaggaggaagtgaccatggacacaagtgaaaacagacctgaaaatgatgttccagaacctcccatgcctattgcagaccaagtcagcaatgatgaccgcccggagggcagtgttgaagatgaggagaagaaagagctggagtccctgaggagatgccagccacaactctccgaagagaagtattctgaccttgctgctgaatgtctgccaggtcctggggtattcacctacccccaggctaccttcatcagaggctccatgatcccactcgcagctaccaagggggtgccagctggaaacagtgacacagaggggggccagcctggtcggaaaccgacgctgggggacccagcacagcccaccacacagaagaaaccttccatcagtatcaccactgaatcactaaagagcctcatccccgacatcaaacccctggcggggcaggaggctgttgtggatcttcatgctgatgactctcgcatctctgaggatgagacagagcgtaatggcgatgatgggacccatgacaaggggctgaaaatatgccggacagtcactcaggtagtacctgcagagggccaggagaatgggcagagggaagaagaggaagaagagaaggaacctgaagcagaacctcctgtacctccccaggtgtcagtagaggtggccttgcccccacctgcagagcatgaagtaaaagaaagtgactttaggagataccttgaacttcgacgttccattagccagcagaagtccggagtttccattaccattgatgacccagtccgaactgcccaggtgcccttcccaccccggggcaagatttagcaacattgtccatatctccagatttggtccgtcctttcactttaggcgagctaaaggagttgttggggcgcacaggaaccttggtggaagaggccttctggattgacaagatcaaatctcattgctttgtaacgtactcaacagtagaggaagctgttgccacccgcacagctctgcacggggtcaaatggccccagtccaatcccaaattcctttgtgctgactatgccgagcaagatgagctggattatcaccgaggcctcttggtggaccgtccctctgaaactaaggacagaggagcagggaataccacggcccctgcaccccccacccccacccccggtccagccaccacagcacccccgggcagagcagcgggagcaggaacgggcagtgcgggaacagtgggcagaacgggaacgggaaatggagcggcgggagcggactcgatcagagcgtgaatgggatcgggacaaagttcgagaagggccccgttcccgatcaaggtcccgtgaccgccgccgcaaggaacgtgcgaagtctaaagaaaagaagagtgagaagaaagagaaagcccaggaggaaccacctgccaagctgctggatgactcttttccgaaagaccaaggcagctccctgcatctattggctcccactgactgacagccagatcgttcagaaagaggcagagcgggccgaacgggccaaggagcgggagaagcggcgaaaggagcaagaagaagaagagcaaaaggagcgggagaaggaagccgagcgggaacggaaccgacagctggagcgagagaaacgtcgggagcacagatgggagaagagacaggagagagagagagagaggggagcgggacaggggggaccgagatcgggatagggaaagggaccgagaacgaggcagggaaagggatcgcagggacaccaagcgccacagcagaagccggagtcggagcacacctgtgcgggaccgggacctgcagcggagcgcggcgcccgctccaatcggctcggggctgtgccccgggacccggcgacaagctcgactgtggcgcttcccccggcctgggcccctcgcagttccagggtcccgggaacacccagggcctgctctgctgcggactcgaaggagctgggtctggaaccagttctttgtcattgaggaatatgctggtccagagcctgttctcattggcaagctgcactcggatgttgaccggggagagggccgcaccaagtacctgttgaccggggagggggcaggcaccgtatttgtgattgatgaggccacaggcaatattcatgttaccaagagccttgaccgggaggaaaaggcgcaatatgtgctactggcccaagccgtggaccgagcctccaaccggcccctggagcccccatcagagttcatcatcaaagtgcaagacatcaacgacaatccacccatttttccccttgggccctaccatgccaccgtgcccgagatgtccaatgtcgggacatcagtgatccaggtgactgctcacgatgctgatgaccccagctatgggaacagtgccaagctggtgtacactgttctggatggactgcctttcttctctgtggacccccagactggagtggtgcgtacagccatccccaacatggaccgggagacacaggaggagttcttggtggtgatccaggccaaggacatgggcggccacatgggggggctgtcaggcagcactacggtgactgtcacgctcagcgatgtcaacgacaacccccccaagttcccacagagcctataccagttctccgtggtggagacagctggacctggcacactggtgggccggctccgggcccaggacccagacctgggggacaacgccctgatggcatacagcatcctggatggggaggggtctgaggccttcagcatcagcacagacttgcagggtcgagacgggctcctcactgtccgcaagcccctagactttgagagccagcgctcctactccttccgtgtcgaggccaccaacacgctcattgacccagcctatctgcggcgagggcccttcaaggatgtggcctctgtgcgtgtggcagtgcaagatgccccagagccacctgccttcacccaggctgcctaccacctgacagtgcctgagaacaaggccccggggaccctggtaggccagatctccgcggctgacctggactcccctgccagcccaatcagatactccatcctcccccactcagatccggagcgttgcttctctatccagcccgaggaaggcaccatccatacagcagcacccctggatcgcgaggctcgcgcctggcacaacctcactgtgctggctacagagctcgacagttctgcacaggcctcgcgcgtgcaagtggccatccagaccctggatgagaatgacaatgctccccagctggctgagccctacgatacttttgtgtgtgactctgcagctcctggccagctgattcaggtcatccgggccctggacagagatgaagttggcaacagtagccatgtctcctttcaaggtcctctgggccctgatgccaactttactgtccaggacaaccgagatggctccgccagcctgctgctgccctcccgccctgctccaccccgccatgccccctacttggttcccatagaactgtgggactgggggcagccggcgctgagcagcactgccacagtgactgttagtgtgtgccgctgccagcctgacggctctgtggcatcctgctggcctgaggctcacctctcagctgctgggctcagcaccggcgccctgcttgccatcatcacctgtgtgggtgccctgcttgccctggtggtgctcttcgtggccctgcggcggcagaagcaagaagcactgatggtactggaggaggaggacgtccgagagaacatcatcacctacgacgacgagggcggcggcgaggaggacaccgaggccttcgacatcacggccttgcagaacccggacggggcggcccccccggcgcccggccctcccgcgcgccgagacgtgttgccccgggcccgggtgtcgcgccagcccagaccccccggccccgccgacgtggcgcagctcctggcgctgcggctccgcgaggcggacgaggaccccggcgtacccccgtacgactcggtgcaggtgtacggctacgagggccgcggctcctcttgcggctccctcagctccctgggctccggcagcgaagccggcggcgcccccggccccgcggagccgctggacgactggggtccgctcttccgcaccctggccgagctgtatggggccaaggagcccccggccccctga

SEQ ID NO: 9936 - DNA, 407 bp, Homo sapiens
  SIMILAR (390)..(103): 351254mologous to Homo sapiens Fragment of human pre-pro- artemin polypeptide,accession number Y84598,Smith-Waterman Score= 81.
tttcgtcgcacttgcgtggtgatctggggtataccgttttagtcttgggggtagagtgactgcttgcgaaccagttcagcagtgcctcaggtgagtacatgagctgcttcgaggcccagggcttcaagtggaacctgtatgaggtggtgagggtgcccttgaaggcgacagatgtggctcgacttccataccagctgtccatctcctgtgccacctcccctggcttccagctgagctgctgcatccccagcacaaacctggcctacaccgcggcctggagccctggagagggcagcaaagctgctgcaggcaggccagggcagtcctgctgaggaggtgccacagatcctggcacagctgccagggcaggcggcagaggcaagttcacccttcgacttactgaccct

SEQ ID NO: 9937 - DNA, 236 bp, Homo sapiens
  SIMILAR (6)..(101): 681254mologous to Rattus norvegicus seven transmembrane receptor,accession number AB019120,Smith-Waterman Score=119.
cttacatcttcaccattctcaacaccctccagggcgtcttcatcctattgtttggttgcctcatggacaggaagatacaagaagctttgcgcaaacgcttctgccgcgcccaagcccccagctccaccatctccctggtgagttgctgccttcagatcctcagctgtgcatccaagagcatgtcagaaggcattccatggccctcctcagaggacatgggcacagccagaagctga

SEQ ID NO: 9938 - DNA, 3214 bp, Homo sapiens
  SIMILAR (343)..(504): 331254mologous to Rattus norvegicus seven transmembrane receptor,accession number AB019120,Smith-Waterman Score=72.
atggtctgttcggctgccccactgctgctcctggccacaactcttcccctgctggggtcaccagttgcccaagcatcccaacctctttggccgatggccaagggccagacaatgtgggcccagacctccaccctcaccctgacagaggaggagttgggacagagtcaggctggaggggaatctggatctgggcagctcctggaccaagagaatggagcaggggaatcagcgctggtctccgtctatgtacatctggactttccagataagacctggccccctgaactctccaggacactgactctccctgctgcctcagcttcctcttccccaaggcctcttctcactggcctcagactcacaacagagtgtaatgtcaaccacaaggggaatttctattgtgcttgcctctctggctaccagtggaacaccagcatctgcctccattaccctccttgtcaaagcctccacaaccatccagccttgtggctgccttgtcttcagccatcccgaacccgggtactgccagttgctgccacctgtccccgggatcctcaacctgaactcccagctgcagatgcctggtgacacgctgagcctgactctccatctgagccaggaggccaccaacctgagctggttcctgaggcacccagggagccccagtcccatcctcctgcagccagggacacaggtgtctgtgacttccagccacggccaggctgccctcagcgtctccaacatgtcccatcactgggcaggtgagtacatgagctgcttcgaggcccagggcttcaagtggaacctgtatgaggtggtgagggtgcccttgaaggcgacagatgtggctcgacttccataccagctgtccatctcctgtgccacctcccctggcttccagctgagctgctgcatccccagcacaaacctggcctacaccgcggcctggagccctggagagggcagcaaagcttcctccttcaacgagtcaggctctcagtgctttgtgctggctgttcagcgctgcccgatggctgacaccacgtacgcttgtgacctgcagagcctgggcctggctccactcagggtccccatctccatcaccatcatccaggatggagacatcacctgccctgaggacgcctcggtgctcacctggaatgtcaccaaggctggccacgtggcacaggccccatgtcctgagagcaagaggggcatagtgaggaggctctgtggggctgacggagtctgggggccggtccacagcagctgcacagatgcgaggctcctggccttgttcactagaaccaagctgctgcaggcaggccagggcagtcctgctgaggaggtgccacagatcctggcacagctgccagggcaggcggcagaggcaagttcaccctccgacttactgaccctgctgagcaccatgaaatacgtggccaaggtggtggcagaggccagaatacagcttgaccgcagagccctgaagaatctcctgattgccacagacaaggtcctagatatggacaccaggtctctgtggaccctggcccaagcccggaagccctgggcaggctcgactctcctgctggctgtggagaccctggcatgcagcctgtgcccacaggaccaccccttcgccttcagcttacccaatgtgctgctgcagagccagctgtttggacccacgtttcctgctgactacagcatctccttccctactcggcccccactgcaggctcagattcccaggcactcactggccccattggtccgtaatggaactgaaataagtattactagcctggtgctgcgaaaactggaccaccttctgccctcaaactatggacaagggctgggggattccctctatgccactcctggcctggtccttgtcatttccatcatggcaggtgaccgggccttcagccagggagaggtcatcatggactttgggaacacagatggttcccctcactgtgtcttctgggatcacagtctcttccagggcagggggggttggtccaaagaagggtgccaggcacaggtggccagtgccagccccactgctcagtgcctctgccagcacctcactgccttctccgtcctcatgtccccacacactgttccggaagaacccgctctggcgctgctgactcaagtgggcttgggagcttccatactggcgctgcttgtgtgcctgggtgtgtactggctggtgtggagagtcgtggtgcggaacaagatctcctatttccgccacgccgccctgctcaacatggtgttctgcttgctggccgcagacacttgcttcctgggcgccccattcctctctccagggccccgaagcccgctctgccttgtgccgccttcctctgtcatttcctctacctggccacctttttctggatgtggcgcaggccctggtgttggcccaccagctgctctttgtctttcaccagctggcaaagcaccgagttctccccctcatggtgctcctgggctacctgtgcccactggggttggcaggtgtcaccctggggctctacctacctcaagggcaatacctgagggagggggaatgctggttggatgggaagggaggggcgttatacaccttcgtgggccagtgctggccatcataggcgtgaatgggctggtactagccatggccatgctgaagttgctgagaccttcgctgtcagagggacccccagcagagaagcgccaagctctgctgggggtgatcaaagccctgctcattcttacacccatctttggcctcacctggggctggcctggccactctgttagaggaagtctccacggtccctcattacatcttcaccattctcaacaccctccagggcgtcttcatcctattgtttggttgcctcatggacaggaaggccggggccgtggctggcataagcagagcatttacctctcccgcagatacaagaagctttgcgcaaacgcttctgccgcgcccaagcccccagctccaccatctccctggccacaaatgaaggctgcatcttggaacacagcaaaggaggaagcgacactgccaggaagacagatgcttcagagtgaaccacacacggacccatgttcctgcaagggagttgaggctgtgtgcttgaacccaccagatgagccctggcccaatgctctgaactcttcccgcctcccggagctcagcccttga

SEQ ID NO: 9939 - DNA, 872 bp, Homo sapiens
  SIMILAR (156)..(872): 1001254mologous to Homo sapiens tetraspan NET-5,accession number AF089749,Smith-Waterman Score=1292.
tttcgtctggcggcggcggcggcggtgccggagcgcgagcagagcggagacccccaggtcctgcgggcgcggaatatcctggaaccttcttttgtttgtcagcagccaaggtgtttccaggaagttcagagagaacagaatttaagaagtgcaacatggccaggggctgcctctgctgcttgaagtacatgatgttcctcttcaatttgatattctggctctgtggctgtgggctgctgggagtgggcatctggctctccgtgtcccaaggcaactttgccaccttctcccccagcttcccttcgttgtctgcagccaacctggtcattgccataggcaccattgtcatggtgacgggcttcctcggctgcctgggggccatcaaggaaaacaagtgcctcctcctcagctttttcatcgtcctgttggtcatcctcctagcagagctgatcttactcatcctcttctttgtctacatggacaaggtgaacgagaacgccaagaaggacctgaaggaaggcctgctgctgtaccacaccgagaacaacgtggggctgaagaacgcctggaacatcatccaggctgagatgcgatgctgtggtgtcactgactacacagactggtacccagtgctgggggagaacacggttcccgaccgctgctgcatggagaactcccagggctgcgggcgcaacgccaccacgcctttgtggagaacgggctgctatgaaaaggtgaagatgtggttcgatgacaataagcacgtgctgggcacggtggggatgtgcatcctcatcatgcagatcctgggcatggccttctccatgaccctcttccagcacatccaccggactggtaagaagtacgacgca

SEQ ID NO: 9940 - DNA, 1848 bp, Homo sapiens
  SIMILAR (427)..(1080): 461254mologous to Arabidopsis thaliana putative proline-rich protein,accession number AL050399,Smith-Waterman Score=423.
atgggagagctctcacctctaggaggcgggcctgccagggagccagtgaggctgcaggttcaccagcacaagtcaccaccagcacaggtcaccaccagcacaggtcacaccagcacaggtcaccaccagcacaggtcaccaccagcacaggccaccaccagcacaggtcaccagcacaggccaccaccagcacaggtcaccatcagcacaggccaccaccagcacaggtcaccaccagcacaggccaccaccagcacaggtcaccagcacaggccaccaccagcacaggtcaccaccagcacaggtcacaccagcacaggtcaccaccagcacaggtcaccaccagcacaggccaccaccagcacaggtcaccagcacaggccaccaccagcacaggtcaccatcagcacaggccaccaccagcacaggtcaccaccagcacaggccaccaccagcacaggtcaccagcacaggccaccaccagcacaggtcaccaccagcacagctcaccaccagcacaggccaccaccagcacaggccaccaccagcacaggtcaccaccagcacaggccaccaccagcacagctcaccaccagcacaggccaccaccagcacaggtcaccaccagcacaggtcaccaccagcacaggtcaccaccagcacagctcaccaccagcacaggccaccaccagcacagctcaccaccagcacaggccaccaccagcaccatcagcacaggccaccaccagcacagctcaccgtaccagcacaggccaccaccagcacaggccaccaccagcacaggtcaccaccagcacaggtcacaccagcacagctcaccaccagcacaggtcacaccagcacaggccaccaccagcacaggccaccaccagcacaggtcaccagcacaggccaccaccagcacaggtcacaccagcacaggccaccaccagcacaggccaccaccagcacaggtcaccaccagcacaggccaccaccagcacaggtcacaccagcacaggtcaccaccagcacaggccaccaccagcacagctcaccaccagcacagctcaccaccagcacaggccaccaccagcacaggtcaccaccagcacaggccaccaccagcacagctcaccaccagcacaggccaccaccagcacagctcaccaccagcacaggccaccaccagcacaggccaccaccagcacagggaaagcccagcggttgcagctgcggcggatccctcggcactgtccgccgcgcgccggggcagcccagggccggcggcagctccgcaaagtcgcggaacgagaggaggcggagcgccggccaagtggtggggctcagcgctggggctgggctgggctgggagagcccgcgcccgacttgggcgccccctccgtcccattctgggagcgatgccccccgctcctcgcaccccccgggaacgccgcgagcatggagaagtcgagtagcgaggattcttcgatccatcggagtccatctttggacagcaaggactcggactttgccaagccgtccacctccggccgcccgttcggccgcggcttcacggccggcgccttctacggcaccgcgggctcccggggccagagccgcgccgaggccggcgttaagaccgacaagtgcaatgcacccaaaggcagcaagtacgtggtgttttacctggacctgtcctttgtgttcctcctagaatttaagaagtgcaacatggccaggggctgcctctgctgcttgaagtacatgatgttcctcttcaatttgatattctgggggttcttcactagagtggatgttcgcatcagccaggcagcttttacatga

SEQ ID NO: 9941 - DNA, 780 bp, Homo sapiens
  SIMILAR (3)..(275): 391254mologous to Mus musculus T2,accession number X67863,Smith-Waterman Score=139.
atgaccgccccgaagacgaggacagaaaaggagacagaagaagaagaaggagagagagagcggggggaaagaaagagaccacgcgaccggaaagaagaaagaaaagggggcgtacgaaaagacaaggcgggacagaaacacgagagagcaggccaaacggagacgggccgcaggcgaaaaggaagaaacaaacagccggacagcgggaaagagaagaaggagagcagaggagcagccgacagcgaggagcggcggagagagagagaggaagagaaacgacccatatcacctgcctcctggtcccatgctggtgggagcctaatggtaggctatgtctataggatagcggtccctgaagcagcattcatctgcctgggcaaccccaatgggtcatgtctttgtaagttctcgatctggccgatgcccgaagctggggggctttctctgccgccgtgttcacaatgggcggaaatatccgtaagccttaaggttcagaaccccatcggctggatcaggggcaagaaatctgcgtatatcatgccaccagtcggcgatgcatcccgtgtagttgtaaacagtgctacgctgactaatggaatctgtgacgttagttctacgccggaatcggcgcatcgacgccacaacttggctacacttaatacgttaccgtatgtggatatgacaaacaatagtggtgctctacagagcacgctcacccgatgcaccagatgtgctcaaaaccctagcactttaggagcctttgctcggaggaatcagtga

SEQ ID NO: 9942 - DNA, 582 bp, Homo sapiens
  SIMILAR (128)..(244): 411254mologous to Tupaia belangeri mineralocorticoid receptor,accession number X83607,Smith-Waterman Score=72.
atgctggcccagagaggagggcgttccgtggtgcagtgcattgcagtctcaaagctgtctgtgactcagagaagttttgtcaccctcattatggatgaagaggctcttgggaactgtggagggtcttctgggagccaaacttgtgaaaaagctgtctgcatccacaatctccctttcctcacctcccacgcattccagtctggcttcccccctcatcagtccccagaagcatctctccctaagatggtcagcgatgctcagaccgccaggctgagcctggagagcatgagggagctgggctttcacatcagtgaaagtgcaggctttcctgcaccagtcagtggttatgaacacagcaaccccagcagaccaggtgtgatgccctcaggtacaagccactggaaacaaaggtcacagaaagtggaggataacaggacagaaatggtaaaagggatccagggggatacaggtgaagcaccaacagcatctgccacgtataaacgggaattaattggcttatatgactgcaaagtccaggacgtggctgccagtacagcaggatccagggcctcagacaattaa

SEQ ID NO: 9943 - DNA, 684 bp, Homo sapiens; identical to SEQ ID NO: 9824
  SIMILAR (1)..(111): 911254mologous to Homo sapiens Human secreted protein, SEQ ID NO: 6833,accession number G02752,Smith-Waterman Score=173.

SEQ ID NO: 9944 - DNA, 1520 bp, Homo sapiens
  SIMILAR (355)..(780): 1001254mologous to Homo sapiens unnamed protein product,accession number AK025521,Smith-Waterman Score=737.
atgctggcccagagaggagggcgttccgtggtgcagtgcattgcagtctcaaagctgtctgtgactcagagaagttttgtcaccctcattatggatgaagaggctcttgggaactgtggagggtcttctgggagccaaacttgtgaaaaagctgtctgcatccacaatctccctttcctcacctcccacgcattccagtctggcttcccccctcatcagtccccagaagcatctctccctaagatggtcagcgatgctcagaccgccaggctgagcctggagagcatgagggagctgggctttcacatcagtgaaagtgcaggctttcctgcaccagtcagtggttatgaacacagcaacccatctctttccaccacaaacctgagcggcccgtctcggcgtcggcagcctcccgtcagccctctcacgctttctcctggccctgaagcacatcaaggtttcagcagacagctgtcttcaaccagcccactggccccatatcctacctcccagatggtgtcctcagaccgaagccaactttcctttctgcccacagaagctcaagcccaggtgtcgccgccacccccttaccctgcaccccaggagctcacccagcccctcctgcagcagccccgcgcccctgaggcccctgcccagcagccccaggcagcctcctcactgccacagtcagactttcagcttctcccggcccagggctcatctttgaccaacttcttcccagatgtgggttttgaccagcagtccatgaggccagggccctgcctttcctcaacaggtgcctctggtgcaacaaggttcccgagaactgcaggactcttttcatttgagaccaagcccgtattccaactgcgggagtctcccgaacaccatcctgccagaagactccagcaccagcctgttcaaagacctcaacagtgcgctggcaggcctgcctgaggtcagcctggacgtggacactccatttccactggaagaggagctgcagattgaacccctgagcctggacggacgtcaacatgttaagtgactccagcatgggcctgctggacccctctgttgaagagacgtttcgagctgacagactgtgaacagaaggcagtggaacagaagaatgtttttctgcaacagccaaaatagaatggaatagaatgaagccagctgataccacgggctttcgttatcttgacatagaaggaagcaatgccacggctccagggtttcagatgagatcccatctcagacactgtggcttcctccagatcacacagctttgtactgcctctcccgcctgtggccaaagtcgtgttgcagcaggcaggctgcttggagcttcccatgaactggaaagctcacctccactgcatctttttactggccatccagtcagccgatgtgtaagagtaggaaatactgtgtcactggaggcctccgtagcattgtgtagtgtgctcagaaccactgatctccgtccgcaccgaaggcgggcccggagtgggagg

SEQ ID NO: 9945 - DNA, 913 bp, Homo sapiens
  SIMILAR (13)..(459): 321254mologous to Caenorhabditis elegans Similar to cuticular collagen,accession number AF000198,Smith-Waterman Score=92.
atgcgcgagcgcgctcggccgccgcggggctgcctggctccgccgctgccgccgggcagtgggcgccgacggacagccggctccacgggggaggggcacggccgggggaggctggcggctgcgggctgcggcgcccgagcagcaatgcaccgaggagcagtgccctcggccgagccagtcccagccagtcccgcggccggtggcagtgggcgggcgagggtcggccgtgcaatgctgcggggggcagccgcacagagccgggtgtgggtggcctgcgcctgccgggtggggtccagcgccgagcagcgctgcgagctgcccagcctccggcggtgcaacgcaccgaggcgcttcggcggctccgggcgggggagggggcgggcgagctccagcccggatgcgctggagcagcggcgcgcaggcgcaccccctaacgctcctgggactcccggcagcccggaggagagctcgctgcgcatgcgcagggagagcgcggccggcgctccagcggtcggcatggcagctgctacctcgctgggacaggctctgggcccacgcgtgccgcgcagtccctacagaactgcagttgtcttgtcttctcggagtgctttcggctacttttcccttattactttagctcgatacacgttgggctgcctttcacattcggatattacgctgttcgagtgctgacgggaaaggcagccctttgacacgcacgcgaaatgtcgcctgacgagggcaaaggtgacagttactaccggaagtaccctatctcagataccctttagattttcccccattgaagaaaaacgaggcgggaaaaacgctgttagggtttaactcaggccctggctccttctcgaacgaattagcggaacacccgcaggagccttgtttggcttccactttt

SEQ ID NO: 9946 - DNA, 1068 bp, Homo sapiens
  SIMILAR (1)..(1065): 1001254mologous to Homo sapiens bA392M18.1 (novel protein similar to testis specific protein TSPY),accession number AL121897,Smith-Waterman Score=1885.
atggcggacaagagggcggggaccccagaagccgcggcgcgcccgccgcccggccttgcccgggagggggacgcgcgcacggtccccgcggcccgggcccgagaagctggggggcgcgggtccctccaccccgcagcgggccccgggaccgccttcccttcccctgggcgcggggaagcggcctccacggcgactactccgagcctggaaaatggccgggtccgggacgaagccccagaaacctgtggtgcagaggggctagggactcgggcaggagccagcgagaaggccgaggacgcgaacaaggaggagggcgccatcttcaagaaggagccagcggaggaggtggagaagcagcaggagggggaggagaagcaggaggtggcagcggaggcccaggagggcccgcggctcctgaaccttggtgccctaattgtggacccactggaggccatccagtgggaggcggaggccgtgagcgcccaggccgacagggcctacctcccgctcgagcgcaggtttgggcggatgcacaggttgtacctcgcccgtaggagcttcatcatccagaatattccgggcttctgggtcaccgccttcctgaaccacccgcagctctcagccatgatcagccctcgagatgaagacatgctctgctacctgatgaatttggaggtgagggagctcaggcactctaggacaggttgcaaattcaagttccgcttttggagcaacccctacttccagaacaaggtgatagtgaaggagtatgaatgcagagcctcaggccgagtggtgtctattgcgactcgcatccgatggcactggggccaggaacccccggccctcgtacacaggaaccgggacactgtccgaagcttcttcagctggttttcacagcacagcctcccagaggccgacagggttgcccagattattaaagatgacctgtggcccaaccccctgcagtactacctgctgggggataggccctgcagagccaggggaggcctcgcaaggtggcccacggagaccccttctaggccctacgggttccagtctggctaa

SEQ ID NO: 9947 - DNA, 433 bp, Homo sapiens; identical to SEQ ID NO: 7238
  SIMILAR (2)..(433): 1001254mologous to Rattus norvegicus Ca2+-dependent activator protein; calcium-dependent actin-binding protein,accession number U16802,Smith-Waterman Score=731.

SEQ ID NO: 9948 - DNA, 334 bp, Homo sapiens
  SIMILAR (185)..(292): 721254mologous to Homo sapiens Ca2+-dependent activator protein for secretion,accession number U36448,Smith-Waterman Score= 126.
agcagttctaatatcaattcctaccagcccaggctgtggacagcaatcccatgcctacaaagctgatccagcagaagcatctcagggtgtgtgagggcaagtagagggtacaagtgaatggtaaacaaggaagagtggctgtctgaaaattcgttttcatgttttcctgtttctttacagaaaccccgggatggacgtggccgacgcctacgtgactttcgtccgccattctcaggatgtcctgcgtgataaggtcaatgagggagatgtacataggaaaggttattttgatgttagttaaatgcctttttccttctttggaaaacccaagggg

SEQ ID NO: 9949 - DNA, 777 bp, Homo sapiens
  SIMILAR (1)..(408): 981254mologous to Homo sapiens NAG13,accession number AF194537,Smith-Waterman Score=682.
atggatacattcctcgacacatacactctcccaagactaaaccaggaagaagttgaatctctgaatagaccaataacaggagctgaaattgtggcaataatcaatagtttaccaaccaaaaagagtccaggaccagatggattcacagccgaattctaccagaggtacaaggaggaactggtaccattccttctgaaactattccaatcaatagaaaaagagggaatcctccctaactcattttatgaggccagcatcattctgataccaaagccgggcagagacacagccaaaaaagagaattgtagaccaatatccttgatgaacattgatgcaaaaatcctcaataaaatactggcaaaccgaatccagcagcacatcaaaaagcttatccaccatgatcaagtcaatgcagaatataagtcgctttttccagatgacacagtggccaacagaactgctactggactggtcttactttttccactagaacagtggttcacagagatcagcaaacagcagctgcagacagtcaaggaccggtttcaggctttcctcaatggggaaacccagatcatggctgacgaagccttcatgaacgctgtgcagagttactatgaggtgagaatcactgttcagaagaatgccaagaccactcaagccctatgcctggggagtctgagctgcagggcaatggggacagtcgttttggtttactacagtatcatccttcctaaggcaaatgggttggtgattcgttacaatgttaagaaataa

SEQ ID NO: 9950 - DNA, 1752 bp, Homo sapiens; identical to SEQ ID NO: 7240
  SIMILAR (511)..(882): 841254mologous to Rattus norvegicus Ca2+-dependent activator protein; calcium-dependent actin-binding protein,accession number U16802,Smith-Waterman Score=497.

SEQ ID NO: 9951 - DNA, 1175 bp, Homo sapiens
  SIMILAR (709)..(1104): 841254mologous to Mus musculus Ca2+ dependent activator protein for secretion,accession number D86214,Smith-Waterman Score= 558.
atgtttgcaagctgctacatgagaaatattcccaagagggtaatcgagtttggcacctgcttgtggagaacttgtaaaaattgcctcagtagcttagagtttaagatgcccttccctccccatcccagatctgtaacttataatttgaaacaggaaagatgccgtctttcgttggatgcatcactgagctgcatgttgtcaattgaagattcccagatccctaatacaagattagagtgttgcaaaggcctctctcgctgtacttctgtggcctctacctgccccctagtcactttctctttttgccttttctctcccaagatggagcaatattcaaaagatgactcagagaagaccctcaaaggctggttcagtcctggccaggtgtttgtactagacgagtattgcgcccgaaatggagtccgggggtgtcaccgacatctctgctacctcagagacttgcttgaacgggcagaaaatggcgccatgatcgaccccacccttcttcactacagctttgccttctgtgcatcccatgtccatgggaacagtcaacaaatgcatgtgtaccttagtgggctgccaccaaatacagaccctgaagggagcaaaactccctccccacctgaaccagaagctaaaaaagataccaaaaaggaatccaaaaaaagaaaagattccaaaacccaggcaaatcaagagctgaaaaggagtttaaccagtaacctacccaatgtgaacctacccaatgtgaaccttcccaaagtaccaaatctaccagttaacatccctctaggcatcccacaaatgcctactttttcggcaccgtcatggatggctgctatatatgatgcggataatgggtcaggcacctcagaagatctgttttggaaacttgacgcccttcagaccttcattcgggacctgcactggcctgaagaagagtttggaaagcacctggaacaacggctgaagttgatggcaagtgacatgatcgaatcttgtgtcaaaagaaccagggattgcatttgaagttaagctgcaaaaaaccagttcgattcaacagatttttcgagtcccacagttcaatatggcaccatgttttaatgttatggggttgatggccaaaggttcaattcaaccaaaacttttgcagcatggaaatgggccaagag

SEQ ID NO: 9952 - DNA, 5049 bp, Homo sapiens
atgctggacccttcgtccagcgaagaagaatcggatgagatcgtggaggaggagagcggcaaggaggtgctcggctcggccccgtccggcgcgcgcctgtctcccagccgtaccagcgagggctcggccggcagcgccgggctggggggcggcggcgccggcgccggagccggggtgggtgcaggcggcggcgggggcagcggcgcgagcagcggcggcggggccggggggctgcaacccagcagccgcgctggcggcggccggccctccagccccagcccgtcggtggtgagcgagaaggagaaggaagagttggagcggctgcagaaagaggaggaggagaggaagaagaggctgcagctgtatgtgttcgtgatgcgctgcatcgcctacccctttaatgccaagcagcccaccgacatggctcgccggcagcagaagatcagcaaacagcagctgcagacagtcaaggaccggtttcaggctttcctcaatggggaaacccagatcatggctgacgaagccttcatgaacgctgtgcagagttactatgaggtgttcctgaagagcgaccgtgtggcccgcatggttcagagtggaggctgttccgccaacgactcccgggaggtcttcaagaagcacattgagaagagagtgcgcagcctgcctgagattgacggcctcagcaaggagactgtgctgagctcctggatggccaaatttgatgccatctaccgtggagaagaggacccgcggaagcagcaggcccggatgacagccagcgcagcctccgagctgattctgagcaaggagcaactctatgagatgttccagaacattcttgggatcaagaagttcgaacatcagctcctttacaatgcctgccagctggacaatccagatgagcaagcagcccagatcagacgagagctggatggacgtctacaaatggcagaccaaatagccagggaacgcaaatttcccaagtttgtatccaaagaaatggaaaacatgtacattgaggagctgaagtcatctgtcaacctgctcatggccaacttggagagcatgccggtatccaaaggcggggagttcaagctccagaaactcaaacgcagccacaatgcttccatcatcgacatgggcgaggagagtgagaaccagctctccaagtcagatgtcgtgctgtctttctcattggaggtggtaattatggaagtccaaggcctcaaatctttggctccaaatcgcatcgtatattgcacaatggaggtggaaggaggagagaaactacagactgatcaggccgaggcttctaaaccaacctggggcacccagggtgacttctccacaacccatgcactgccagctgtgaaggtgaagctgttcacagagagcacaggcgtcctggcgttggaggacaaggagcttgggcgggttattctccatcccaccccgaacagccccaaacagtcagagtggcacaaaatgacagtctccaaaaactgccccgaccaagatctcaaaatcaaacttgctgtccgaatggataagcctcaaaacatgaagcattctgggtatttatgggccatcggtaagaatgtctggaagagatggaagaaaaggttttttgtattggtgcaggtcagtcagtacacgtttgccatgtgcagttatcgggagaagaaagcggagcctcaggaacttctacaattggatggctacactgtggattacaccgacccccagccaggtttggagggtggccgagccttcttcaatgctgtcaaggagggagacaccgtgatatttgccagtgacgatgaacaagaccgcatcctgtgggtccaggccatgtatcgggccacggggcagtcacacaagcctgtgcccccgacccaagtccagaaactcaacgccaagggaggaaatgtacctcagctggatgcccctatctctcaattttctggactgaaggacgcagatagagctcaaaaacatggcatggatgaatttatctcttccaacccctgtaactttgaccacgcttccctctttgagatggtacaacgccttactttggatcacagacttaatgattcctattcttgcctgggctggttcagtcctggccaggtgtttgtactagacgagtattgcgcccgaaatggagtccgggggtgtcaccgacatctctgctacctcaaaagacttgcttgaacgggcagaaaatggcgccatgatcgaccccacccttcttcactacagctttgccttctgtgcatcccatgtccatgggaacaggcctgatggaattgggaactgttgactgttgaagaaaaggaacgttttttgaaggaaatcaaagagaggctccgagttctgctagaaaatcagattacacattttaggtattgctttccatttggtcgacctgaaggtgctttgaaagctactctctcactcttggaaagggttttgatgaaagatattgttaccccagtgccacaagaggaggtaaaaacagttatccgtaaatgtctggaacaggctgcgttagtcaactattctcggctctcagagtatgccaaaatcgaagagaatcaaaaggatgcagaaaatgtaggccggttaatcactcctgccaaaaagcttgaagatacaatacgtcttgctgaactagtcattgaagttcttcagcaaaatgaggagcaccacgcagaggggaaagaggcctttgcgtggtggtcagatttaatggtggagcatgcggagacgttcctgtcactctttgcagtagacatggatgcagccttagaggtgcaacctccagacacatgggacagttttccactatttcagctgctggaatgattttctccgtactggactattaatttgtggcaatgggaaaatttcacaaacacctgcaagacctgtttgccccacttgttgttaggatatgtgggatcttgatgggagttccccaattgcacaatccattcacagggggcttttgagccgggagtcatgggaaccagtcaataatgggtcaggcacctcagaagatctgttttggaaacttgacgcccttcagaccttcattcgggacctgcactggcctgaagaagagtttggaaagcacctggaacaacggctgaagttgatggcaagtgacatgatcgaatcttgtgtcaaaagaaccaggattgcatttgaagttaagctgcaaaaaaccagtcgatcaacagattttcgagtcccacagtcaatatgcaccatgtttaatgttatggttgatgccaaagctcaatcaacaaaactttgcagcatggaaatgggccaagagtttgctaaaatgtggcatcaataccattcaaaaatagaccgaactaattgaagaaactgttaaagaaatgataacactcttggttgcaaagttcgttactatcttggaaggagtgctggcaaaattatccagatatgacgaagggactttgttttcttcttttctgtcatttaccgtgaaggcagcttccaaatatgtggatgtacctaaacccgggatggacgtggccgacgcctacgtgactttcgtccgccattctcaggatgtcctgcgggaataaggtcaatgaggagatgtacatagaaaggttatttgatcaatggtacaacagctccatgaacgtgatctgcacctggttgacggaccggatggacttacagcttcatatttatcagttgaaaacactaattaggatggtaaagaaaacctacagagatttccgattgcaagggggccctggactccaccttaaacaggcaagacctgatgaaccgatccggaaccgtctcactgtggaggaagccacagcatcagtgagtgaaggtggggggctgcagggcatcagcatgaaggacagcgatgaggaagacgaagaagacgattagaccatttggtcctagagtctgctgggacagagtcctgtaatcagtgcatgtccttagtctgttagttaaacccattaggaattttcctgtccaactacccatgcccccatgagatgtttatccaatacaactgcccattttagcctatgtggtacccaagattagcaaatgacccttcatatcccactgatttccctgatgtcccatgtctatatgtttacaagcaatatggagcaccattctttaaatactgttccatggagaatacatagtctaaccactagggcgtgtccctgttattcaggcaaaggttcaatgatgcttcattcatgtactatgtatgcattggtggtaaatggatgtgagggcaagtacatcaagtacattcactctgtttcacgtatgtggatgccagttaattaaatgagtacgtaaataaattaattaaaacacatagatctgctttgtgtttttatttttattttttgvaaaacaaaaggcaagtctccaacaattaacttttgatgctttctgttcccctaaaaccaaaaaatgaaccccttgtgtcgttgttaaccccatccttccatttacctcatataattagccaaaaaaaaaaaggatggcttacatacccaatggatggattctcttaattgccacggcaagggggcgatccttatcatgacttaacatcaagcgcgcagttccaaaaactactgtcctcctgtccaaagttttccccctcttaaatgttattttgccttttaccgtcctcaactgtgtatgtaaaaaaaacgaatatttaaattacacaccctagactaaaaatgtgtttataataagatgtggatatttcccttcagtagattgtaaccataatttaaattattttgttcccacactgbgybbttatatctgtcatgtacattgcattttgatctgtaactgcacaaccctggggtttgctgcagagctatttctttccatgtaaagtagtggatccatcttgcttttgccttatataaagcctacagttatggaagtgtggaaaactgtggcttctcaataaatattcagatgtcctaagaatat

SEQ ID NO: 9953 - DNA, 658 bp, Homo sapiens
  SIMILAR (102)..(422): 551254mologous to Homo sapiens Human secreted protein, SEQ ID NO: 6063,accession number G01982,Smith-Waterman Score=236.
gtggcggcggtagctgctacggcgctgaagggcgggggggcgagaaatgcccgcgtcctccgggggattttcgcaggagccacagcttaacaaggcttcttcataacaggacccgggcccttcaaaacccacagcttccccagagggcaaggaggaaccctgaaccccttatccccggaactggaaaatacattccccagaaaagaggggcaaagaacccccatgaaaactgtgggaacttgccctgggccatcggcttcccttgtggtatcctcctcttcgatccctcacccaagcgggaaagttggacaaggaccgtgttgaagcagatgaaggctcggcagaacatgcgggtgtccaacacggggcgagtatgagagcccagaggttcagggcttcctcccagagttgccccgtccccttgatgttgggtctggggtgtctggggtgcagacctgaggagcgtctgcgaccctccttaggctattgactgttaagtcctcaggttttggccagattccagtttcgtgcctctgaaggtccaccagaagggcgcatgaagcccaaggctgtttgccaaaaccctaccctgccccacaccaaggaagccagccaaaagggaaaataaagttattgagtgtttagtagaaagaaaaaa

SEQ ID NO: 9954 - DNA, 873 bp, Homo sapiens
  SIMILAR (558)..(91): 921254mologous to Escherichia coli 2-SUCCINYL-6-HYDROXY-2, 4- CYCLOHEXADIENE-1-CARBOXYLATE SYNTHASE (SHCHC SYNTHASE) / 2- OXOGLUTARATE DECARBOXYLASE (EC 4.1.1.71) (ALPHA- KETOGLUTARATE DECARBOXYLASE),accession number D90857,Smith-Waterman Score=730.
ttagtcaaatgattggaaaaccaataacgaaaaatagttcttcaggttcttctcctggtaaggcggaggacacaccaaactgcactggccctgcgccacaaattggtggagcgtttgcgcaccatcggggtcgttaaccaccatttcaatcaccgtggtggttggcgtgcgccaggcgttggcaaatgccgtttcaagttcctgccagttttgcggacgatgatatttcagctcgaacatcgcggcggcgtgctcaaaatggacgttttgcggcatcagatagaaacgctcacgctcgctttgcggcgttggcaacagcgagaaaatttgcccgccgttgttgttcaccacaattaataccagcggcgcagaaacctgacgcaataacgccagcgcgttgagatcgtaaagtgcggagagatcgcccacaatcgccagcgtcggtttgccgcttgcccgctgaacgccggcggcggtcgaaagcagcccgtcgataccgctggccccacggttgctgtacaccgggtaacccttgcagcctggccgcgtggccagggctgcgtaccacgcattgtgccgtgctgtccaaagccggctgcgctcctcggcctccttggcccaggagaagtcagaggctccgttctgctggactatctcctctgtgcgctgcagctgctcctccagtgcctgctgggagccatggaactccaggaagagtgtgggcgccactaagcaattcagcttgctgtacctgttgcaggcatccatcatgacttcatccaggaactctggatccagggagatggcaggccaggtgaggccctgcccttcccagggggcctcttccagggagcccaccctgactgcccccat

SEQ ID NO: 9955 - DNA, 814 bp, Homo sapiens
  SIMILAR (44)..(253): 601254mologous to Homo sapiens adaptor protein p130Cas,accession number AB040024,Smith-Waterman Score=159.
  misc_feature (1)...(814): n = a,t,c or g
ccaaagatcttggtgggcgccagcaaggttgttctcctcaggcgcccacaagctgggtttcatcggggacacactgtcacggcaggccaaaggctgttgacgtggcaagcagggtgacccattacagcaacctgctggtgcgacttcttgcnagggcattgtggccaccacaaaggccgctgccttgcagtaccccatcgcctttcccgggcccaaggacatggtggagagggtcaaggagctgggccacagccacccagcagttccgccgcgtcttaggccagctggcagccgcctgagggtggtgacccccaagaggaaggcaggggaggggtgcggcggtcccagctccctggctcccatgtcaaagagtcgcttgttccaacaggcttagggacaggaccccaagctctgcgtcggtcctggtgcccctggatgccccaggaatcctgtatatatttatggccgggacagggtgtggggccatgccctcctcaggaaccgaaaagcccaggggccggccagtgggccttcccccagcatgcacccacgggacccgggttggggttaccacaaccgggctgggagtgtagacggtcctgcagcctgcaggaccatcgtgccaccccgagggctgagcctggtcccacaaagggtgccgtgtccccctgacagggccagtgcagtttggtgtgtcctccgccttaccaggagaagaacctgaagaactatttttcgttattggttttccaatcatttgactaagagtctcccatttaaataaagtttttaaaaggaagagcaaaaaaaaaaa

SEQ ID NO: 9956 - DNA, 294 bp, Homo sapiens
  SIMILAR (40)..(186): 571254mologous to Rattus norvegicus phosphatidylinositol synthase,accession number D82928,Smith-Waterman Score=99.
atgcccggattgcttcgccatcatttctttctacttcatgccctgctgccccctcacggcccctccttctacctgctcagcggcctgctggacgctttcgatggacacgcgctcgcgctcttaatcaagttctgtgtccgaggcagtgagagtcacaagatgatcgacttgtccgggaatccggtcttcggatctactacacctcgaggttggctctgtgggactgttccggatgggctctgggtcactgcccccatcgccttgctgaagtcgctcatcagcgtcatcacctga

SEQ ID NO: 9957 - DNA, 642 bp, Homo sapiens
  SIMILAR (37)..(249): 941254mologous to Homo sapiens phosphatidylinositol synthase,accession number AF014807,Smith-Waterman Score=350.
gtccttatccgtgcgcgtttatctgacaatcctgcggtccgaggcagtgagagtcacaagatgatcgacttgttctgttatccggtgcttcggatctactacacctcgaggcctgctctgttcaccttgtgtgctgggaatgagctcttctactgcctcctctacctgttccatttctctgagggacctttagttggctctgtgggactgttccggatgggcctctgggtcactgcccccatcagccttgctgaagtcgctcatcagcgtcatccacctgatcacggccgcccgcaacatggcttgccctgggacggcagcaggaccgcgccaagaagaagtgacgctggagccccgggtcctggctgcccacctgccctgggaagtcttgctgtgccacacagctccccaccccctgcttaggaggtcccagtctcacagccttcctcatgtgttgttctaccttgctgggatggtgggtcaatccctctttggtgacgtcacgtttctctggggatcctgaggaaccggggccttaaatcagggaggatacgcaggaaggccccttcaatccaggcggtgctcctggggtgccgggaccgggcaatgtcacaacctgcctgctcagtcctggggtccgaa

SEQ ID NO: 9958 - DNA, 645 bp, Homo sapiens
  SIMILAR (1)..(309): 821254mologous to Homo sapiens PBX2,accession number X80700,Smith-Waterman Score=435.
atggtgcgctcctgttttgtggatgacagaagaaagcgctgtaatttcaacagacaggccagtgaggtcctaaatgagtatttctactcccacgtgagtaacccatatcatagtgaggaggccaaggaggagcttgccaaaaagtgtggcatcactgtgtctcaggtctccaaccggtttggcaacaagaagattcgatataagaaaaacatcggagagttccaagaggaggcaaacatatatgctgtcaagacagctgtgtcagtcacccaggggggccacagcagcaccagcttccccgacacccccttcctgtgcaggctgtggcggctctttcaatatctcaggatctggagacatgtttctggggatgcctgggctcaacggagattcctattctgcttcccaggctctggaatctggagacgccagccctgcccaatcagagatgccaaaaatggggacatgacttctggacagaggacatgggacacgcccccatgcatccccacccctgcccctccagacagcttacttacctcatacgcagctcatcttaaaccaatagaatcgcttggtggacgagagtgtctgactcagatatctacctcggagggagtttctgctactttagggaattattga

SEQ ID NO: 9959 - DNA, 3261 bp, Homo sapiens
  SIMILAR (273)..(1520): 721254mologous to Homo sapiens homeobox protein,accession number X59842,Smith-Waterman Score=1369.
cctccctcctccctctctctcacacacacccccgcttgggcctcctctctctctccggctccattttctccgccgccgggggccggggtctcctgtggggggcccagccggtatcccaggtctcccttcagtgccggggtgaacccccgggggagccgggagccgggggcagacgggcgggggttggggcggagggagcagcggccccagcgagtttggggggagaagtaaccaggcggggggaggggcggagcagggagggggcctcagggcccccccccagctatggacgaacggctactggggccgccccctccaggcgggggccgggggggcctgggattggtgagtggggagcctgggggccctggcgagcctcccggtggcggagaccccggtgggggtagcgggggggtcccgggaggccgagggaagcaagacatcggggacattctgcagcagataatgaccatcaccgaccagagcctggacgaggcccagggccaaaaaacaccgcccttaaactgccccccgaaagaagcctgttctttttagcggccggggtgaaatcaaggagaaaaccggccctcagcattcggagctcccaggaggaggagccggtggacccacagctgatgcgcttggacaacatgcttctggcagagggtgtggctgggcccgagaaagggggcggctcagcagcagcagctgcagccgctgcagcctctggtggtggcgtgtcccctgacaactccatcgaacactcggactatcgcagcaaacttgcccagatccgtcacatataccactcggaactggagaagtatgagcaggcatgtaatgagttcacgacccatgtcatgaacctgctgagggagcagagccgcaccaggcccgtggcccccaaagagatggaacgcatggtgagcatcatccatcgaaagttcagcgccatccagatgcagctgaagcagagcacctgcgaggctatgatgatgctgcgctcccgtttcctggatgccagacgaaagcgccgtaacttcagcagacaggccactgaggtcctaaatgagtatttctactcccacctgagtaacccatatcctagtgaggaggccaaggaggagcttgccaagaagtgtggcatcaccgtgtctcaagtctccaaccggtttggcaacaagaagattcgctataagaaaaacatcggaaagttccaagaggaggcaaacatctatgctgtcaagacagccgtgtcagtcacccaggggggccacagcagcaccagctccccgacacccccttcctctgcaggctctggcggctctttcaatatctcaggatctggagacatgtttctggggatgcctggggctcaacggagattcctattctgcttcccagggtgggaatcactccgacactcgatgggggccaggggggttattgggggataaaccttcggggggagggccagatgttacagcccacggggaaatgagggcaaatggcagctggcaagaggctgtgaccccctcttcagtgacatccccaacggagggaccagggagtgttcactctgatacctccaacttgatcttgcccctcagggtcacaggggtgggggctctcacaaggcgacttgaagaggacgcaggcttccagaggacaaaccccaatacaggagaagcacaagacagagaagggccaatggggtcatcccctccctaacgagactctctgtgctgggggtgctaattacatggcaggaagaatggggcctctagaggggagtgtggggtctgtctctcccttttttccatctttttcctctctcgctttctttcttacacagaaacatacacataccgagaaacctatttctcagaccccttttttctcctctgtctttctctctccctctcccacacctcacacacacatactcccacttgcaactattctgtttctctcccctgggttccccccaactttccccttccccccacccccacttgtatgctctggaatctgtggagacgcccagccctgccccaatcagagatgcccaaaaatggggacatgacttctggacagaggacatgggccacgcccccatgcatccccaccccccgcccctccggacgggcttacttacctcatacgcagctcatcttaaaccaatagaatcgctcgggtgggacgagagtgtctgactcagatatctacctcggagggagtttctggctactttaggggaattattgactgggctttggggttgaactttttttttttttaaagaaagaaaaagaaaccctgggatccatctgttttttttgttgttgttgttgtttttgttgttgttgttggtggtggtggtggtggttctttaatttttaatttagtttggggaagtagcttgtttttttttttataaatatgttgatttcttgttttcttttttttttatttcttactttcccatattaggggtgatagccaaaggggttctggtaagagaaagggggacaaacagaactggtaaagaggcccccctggctccaggcctgtccatcaggaaggtaaattttacagggcaccaagctttgccccctaaaatcccttaggtgttctttgttcatgcaggcaggtttctgccgcatttgatgtggaggcagtgaagggcttgccctgctggcctctcatcccccttcttcccacaacccttgggcagggctggactcagtaattttgaggaaattgaagatgccatcttcccctgtgagtgacatgtctttaattttttaaaaaactactatttgaaaattggagggggaagaatgggaagggagttattgccaaatatgttaaatatgggttggggtgcttgtatatgtatcttcctcaatttccccataaatgaggtatctttttgtcacaccaaaatcaaggggtagggagagggaggaggttgcaaaaagccagatgtgggggaaaagtaacatcaacactgtcccatcctcagccctgaactagctaccatctgatcccctcagacattctcaggattttacaagactgtcagagtggggaacccctcccattaaagatccgggcaggactgggacaggttggaagtgtgatgggtgggggggtgggaggcatgggccggggggctagttctctcctcacttgtaaacttgtgtagtttcacagaaaaaaaacaaaatgcagttttaaataaagaaatttcttttt

SEQ ID NO: 9960 - DNA, 830 bp, Homo sapiens
  SIMILAR (483)..(830): 861254mologous to Homo sapiens WNT receptor Frizzled- 4,accession number AB032417,Smith-Waterman Score=570.
tttttttttaacttttaattttaaaaatgataaagaaacggggataaaaataaaccacctaaatgagtcatattagtttctttagctttttcaaatagtttctaaaatggaaggagattgaaagccagttttttaagatttatttcaagtgttgtgcaaagagggcttatgcaattcttcagaccctatttattttatttatttatttatgtacattcttctggaaaggattactaaagccaaactaagaaaagtatgtaagtgatggattatcaggcgcccttgtttgaggtcagagtaaacagacagactcccgataggttggtttaaaagtagatacctagattgcctggaagcattcaactcagctttgtgggagcatttggtcaaacttccaagtcattgttttttttgtgtgtgttcattttgttacttttccagttcttcctttgttctgtttatgtgccaatgtgcacagaggaaggatcaacatccccattggcccatgcggcggcatgtgtctttcagtcaagggacgctgtgaacccgtcctgaaggaatttggatttgcctggccagagagtctgaactgcagcaaattcccaccacagaacgaccacaaccacatgtgcatggaagggccaggtgatgaagaggtgcccttacctcacaaaacccccatccagcctggggaagagtgtcactctgtgggaaccaattctgatcagtacatctgggtgaaaaggagcctgaactgtgtgctcaagtgtgctatgatgcttgcttatacagccgctcagcccaagaagtcactggatatctggatggct

SEQ ID NO: 9961 - DNA, 1962 bp, Homo sapiens
  SIMILAR (401)..(1552): 911254mologous to Homo sapiens Human frizzled-4 protein sequence SEQ ID NO:2,accession number Y90903,Smith-Waterman Score= 1804.
  misc_feature (1)...(1962): n = a,t,c or g
atggcctggcggggcgcagggccgagcgtcccgggggcgcccgggggcgtcggtctcagtctggggttgctcctgcagttgctgctgctcctggggccggcgcggggcttcggggacgaggaagagcggcgctgcgaccccatccgcatctccatgtgccagaacctcggctacaacgtgaccaagatgcccaacctggttgggcacgagctgcagacggacgccgagctgcagctgacaactttcacaccgctcatccagtacggctgctccagccagctgcagttcttcctttgttctggttatgtgccaatgggcacagagaagatcaacatccccattggcccatgcggcggcatgtgtctttcagtcaagagacgctgtgaaaccccgtccctgaaaggaatttggatttgccctggcccagagagtctgaactgcagcaaaatcccnacccacagaacgacccacaacccacatgtgccatggaagggcccaggtgatgaagaggtgcccttacctcacaaaacccccatccagccctggggaagagtgtcactctgtgggaaccaattctgatcagtacatctgggtgaaaaggagcctgaactgtgtgctcaagtgtggctatgatgctggcttatacagccgctcagccaaggagttcactgatatctggatggctgtgtgggccagcctgtgtttcatctccactgccttcacagtactgaccttcctgatcgattcttgtaggttttcctaccctgagcgccccatcatatttctcagtatgtgctataatatttatagcattgcttatattgtcaggctgactgtaggccgggaaaggatatcctgtgattttgaagaggcagcagaacctgttctcatccaagaaggacttaagaacacaggatgtgcaataattttcttgctgatgtacttttttggaatggccagctccatttggtgggttattctgacactcacttggtttttggcagcaggactcaaatggggtcatgaagccattgaaatgcacagctcttatttccacattgcagcctgggccatcccgccagtgaaaaccattgtcatcttgattatgagactggtggatgcagatgaactgactggcttgtgctatgttggaaaccaaaatctcgatgccctcaccgggttcgtggtggctcccctctttacttatttggtcattggaactttgttcattgctgcaggtttggtggccttgttcaaaattcggtcaaatcttcaaaaggatgggacaaagacagacaagttagaaagactgatggtcaagattggggtgttctcagtactgtacacagttcctgcaacgtgtgtgattgcctgttatttttatgaaatctccaactgggcactttttcggtattctgcagatgattccaacatggctgttgaaatgttgaaaatttttatgtctttgttggtgggcatcacttcaggcatgtggatttggtctgccaaaactcttcacacgtggcagaagtgttccaacagattggtgaattacacataaggtatccagtggatttttcttctctgtcttcctctcttaaatttcaacatctctcttcttggctgctgctgttttcttcattttatgttaatgactcaaaaaaggtatttttatagaatttttgtactgcagcatggtgtttctggcgatgttctcttctcttgattgatgattcctcagagcctgcccacctcctagggctaaactggctcaattttaagaatggatgaaaaatgtgaagctctcctcgactcttctgtgaactccatgaaagcagaacactgtcttttctgtcctggtgtctctgcttctagccaggtcctggaaccatgactgccccaggaattctcggttttcatttccacaccagaatctaattctcttcctttagtctttcccat

SEQ ID NO: 9962 - DNA, 979 bp, Homo sapiens
  SIMILAR (562)..(98): 921254mologous to Homo sapiens centrosomal P4.1-associated protein,accession number AF139625,Smith-Waterman Score=742.
ctccagagatcaagaggatcttctccctcatgttcttaaaatgtcctggctgcgcagctggcagaagagatttgccattcagctggaatgcgcacgacaaattctcttcaaggtcagtccaagttctttcatcatcaaagtccattttactcagacttagggatgaggatctcgagggctcagacactttatgttttatgctttccatgatagactcatcgctactgtaatctttatcagacaaatccagatcaacatctctccttttatcttcttgggtcctggtgtccttaaaaggccccttatcatcacagacttgtgggctatcctctctgctgctgatgcccctctctctatcctcagtcgatggttttatggtaacatcaagctgttcctcagagtcagtgctactgtcactatttggaacaccttcatcgtcacgtgcattccattcagtctgattttcagaagtgctcttttggacggctttcctgattttacaaggctgttccctcaattcatcagctagatgtcccacagacacatcagccgtagagcactggacttgtacagaaggtgtactcaaggagtaaacacgtgtctctgtagccaaaatattactatgttcagttagtaccaaaattagaccatttgatcttctattaagtaagttttcagttaacaaccactgaacataaatcttctcaggagatattacattacagatatgcacaggcaattccttattataaagtgactgaaaattctcattaggtagagattttgcagacacaggatttaagttgtgtacttcatttgaaataatttcttctggagaaggatcccaaacttcaatatgcttttgagaattatctttgaggatgtatagggtcatcccacagaacgtctgacttagaatcacttgggacattgctaagtctatagattcctgggccccaatccagatttcccgaatcat

SEQ ID NO: 9963 - DNA, 957 bp, Homo sapiens
  SIMILAR (1)..(552): 981254mologous to Escherichia coli product appears to be membrane bound,accession number X54945,Smith-Waterman Score=956.
atgcgtgcaccagagcctgttaccctggtggccatcggcccgttaaccaatattgcgctgttactttcacaatgcccggaatgcaagccgtatattcgccgtctggtgatcatgggtggttctgccggacgcggcaactgtacgccaaacgccgagtttaatattgctgccgatccagaagctgctgcctgtgtcttccgcagtggtattgaaatcgtcatgtgcggtttggatgtcaccaatcaggcaatattaactcctgactatctctctacactgccgcagttaaaccgtaccgggaaaatgcttcacgccctgtttagccactaccgtagcggcagtatgcaaagcggcttgcgaatgcacgatctctgcgccatcgcctggctggtgcgcccggacctgttcactctcaaaccctgttttgtggcagtggaaactcagggcgaatttacctcaggcacgacggtggttgatatcgacggttgcctgggcaagccagccaatgtacaggtggcattggatctggatgtgaaaggcttccagcactatgacgatgtgaaagcttataccccggcctgggccgagcagattaccggcgtttctcgcagccagattattcgcatcgcccgtgaatttgccgataacgctgataaaacgcacggtcgttcgatgattatcgtcggtgcggggctgaaccactggtatcacctcgatattcataaccagacctggggcactcagacaaggactggtggccaggccagaggagcagagctcaggtggtctgtacgcgatgccatcattgccatcgcccagaacagactctgccacgggaatttaagcataatcagatgtccgagcactggcgctaacaccggaatgatgcagatatacggagaacgcaatatgcaactgcgcttcgctggcattgagatcggcggcgatgcgcggtaa

SEQ ID NO: 9964 - DNA, 1346 bp, Homo sapiens
  SIMILAR (1332)..(706): 981254mologous to Homo sapiens centrosomal P4.1-associated protein,accession number AF139625,Smith-Waterman Score=1069.
tcatggtaaggtagcatgagcctccaagcaattccgggagtgggcggctgtctgtgcagcgtgtgcacagactctccgtggctgtgaggctattgacaggtactccggtttccgcgcacgtcctaaggacgcacacgagaggcaacttggcgtgtctacagtgtcgcagtcggcgtttctcgcagccagattattcgcatcgcccgtgaatttgccgataacgctgataaaacgcacggtcgttcgatgattatcgtcggtgcggggctgaaccactggtatcacctcgatatgaactatcgtggtctgatcaacatgctgattttctgcggctgtgtcggtcagagcgggggcgctgggcgcactatgtaggtcaggaaaaactgcgtccgcaaaccggctggcagcctggcgtttgccttgactggcagcgtccggcgcgtcacatgaacagcacttcttattttttgctagttccataaaaaccagcgcatctctaagagacacaggcatatcactgcttattttattcggtggtggtttttgcagatctacaataagcacaccatcttcttctctaaaaactttcattgaaacagccttgttatttaccattttcaaaaattccactttagcttcctcttcccagccttcattcgcaagccagaggaaatcccgccaactccctccaccacttaacatcaaagggacagggccttcatcgtcacgtgcattccattcagtctgattttcagaagtgctcttttggacggctttcctgattttacaaggctgttccctcaattcatcagctgaggacaatgaatgaagttgtttgggtgcgacttcacactcactctccttctcacgtgcagtgtggtccaaatcctcactgcggttacaatgactaatgggatctgccggatttgtcttctgtggcacagctttgacaggggtggaagacatccggtgacctttgcagatctgttgatccctttctaagattttcagtacaaatgaggaattactagaaaatgatatttcatcagcagcttgttctaaaaacaaaaattcatctaattccaaattttccttttccttttctcgttcccaagtctctaactttttctgaagagaaacgtcaagagaagattcagactctttcatggtctcccttatggggctcttagcagccagccggctggccggccctgttgaaagaggaagtctgtctataccttgtgtcttattccaccctgtgcagccagtatcgcaaggttttggacactcagttacattttctttattattagatgtggctttgttttcaaaattctcgtgccgaa

SEQ ID NO: 9965 - DNA, 408 bp, Homo sapiens
  SIMILAR (159)..(395): 421254mologous to Desulfovibrio gigas periplasmic hydrogenase protein large subunit,accession number M18083,Smith-Waterman Score =117.
  misc_feature (1)...(408): n = a,t,c or g
agcacatctttctcacactttgctctttggaaggcccaggagaacatccgcgaaggctgttggaggtgctccgagcactgtggcatgtctggcacatggcccccaggctgcggttgcctgggttggttgggggaggaagtggggggagtgttccgggaccatggtggcccaggctgcagccgcctttgggccatccgagaggctctggcagcccctgtgctttatggagcaaccgtgagccgagcccagaggcctgggcctgcactgcctgcagccgacatgcgacagcggggggtcgggggagggccaccgactggctctgctgccagcacaggcccctccctggaagtcctcgggagcggagcgcggatcggcacgggctctgngctccccgtggagagaagctgg

SEQ ID NO: 9966 - DNA, 199 bp, Homo sapiens
  SIMILAR (3)..(191): 901254mologous to Homo sapiens dJ439F8.1 (KIAA0767 (PUTATIVE partial isoform 2)),accession number AL021392,Smith-Waterman Score= 288.
  misc_feature (1)...(199): n = a,t,c or g
gagatgacttcctcgatctagcggagtctccaaatgcctcggacaccgaatncagcgacgaaatccccctgaaggctggtccagggaccctcatcatggccacaggagtccaggactttaaccggacagagtttgatcgactgaatgngatcaaaggtcacctggaaattngccttattggaaaaacatttttttacag

SEQ ID NO: 9967 - DNA, 455 bp, Homo sapiens
  SIMILAR (275)..(454): 1001254mologous to Homo sapiens dA59H18.1 (KIAA0767 protein),accession number AL096766,Smith-Waterman Score=294.
ggtctgtggcctcgctgtgttccctccaggccttgactcagaactcaccttctcccgaggctttcccagagcagccctgtgtccagcctgccccgtgctcttctcaggccccctggccagcttgagctgtgggctgtccccgctggcccagggcctttgctctgctgccgacgcgtcccagaacctcacccagcacatggaggcgctggcatcccagagtcggggtcgcgtggacatgagcgatggtcacctggccgttctctcccccatagaggaggagctccggaagctgcgagaagaaaccaacgcggagatgctgcggcaggagctggaccgcgagcggcagcggcggatggagctggagcagaaggtgcaggaggtgctgaaggccagaaccgaggagcagatggctcagcagcccccaaaagggcaggcccaggccagcaatggagcag

SEQ ID NO: 9968 - DNA, 4306 bp, Homo sapiens
gacaaaatcaggttcagaggtcacaagagagatgacttcctcgatctagcggagtctccaaatgcctcggacaccgaatgcagcgacgaaatccccctgaaggtaccgcggacctcgccccgggacagcgaggagctgagggaccctgctggtccagggaccctcatcatggccacaggagtccaggactttaaccggacagagtttgatcgactgaatgagatcaaaggtcacctggaaattgccttattggaaaaacatttcttacaggaggagctccggaagctgcgagaagaaaccaacgcggagatgctgcggcaggagctggaccgcgagcggcagcggcggatggagctggagcagaaggtgcaggaggtgctgaaggccagaaccgaggagcagatggctcagcagcccccaaaagggcaggcccaggccagcaatggagcagagcgccggagccaggggctgtcctcgcgcctgcagaagtggttctacgagcggtttggggagtacgtggaggacttccggttccagcccgaggagaacactgtggagacagaggaacccctgagcgcccgcaggttaactgaaaatatgagacggctcaagcgcggtgccaagccggtcactaactttgtgaagaacctctctgccttatccgactggtactccgtctacacgtctgccattgccttcaccgtgtacatgaatgccgtgtggcatggctgggccatcccattgttcttatttctagcaattctgaggttatccctcaattacctcatcgccagggggtggcggatacagtggagcatcgtgcccgaagtgtctgagcccgtggaacctccaaaggaagacctgactgtgtctgagaagttccagctggtgctggacgtcgcccagaaagcccagaaccttttcgggaagatggctgacatcctggagaagatcaagaacttgttcatgtgggtccagccggagatcacacagaagctgtatgtggcgctctgggctgccttcctggcctcctgcttcttcccctaccgcctggtggggcttgccgtgggactctatgctggtatcaagttcttcctcattgatttcatctttaaacgctgcccgaggctgcgcgccaagtacgacacgccctatatcatctggaggagtctccccaccgacccgcagctcaaggagcgctccagcgccgcagtctcacgcaggctgcagacgacctcgtcacggagctacgtacccagcgcaccggccggcctgggtaaagaggaggacgccggtcgcttccacagcaccaagaagggcaatttccacgagatcttcaatctgacagaaaacgagcgtccgctggcggtgtgcgagaatggctggcgctgctgcctcatcaacagggaccggaagatgcccacggactacatcaggaacggggtgctctacgtcacggcagaattacttgtgcttcgaaagctccaaatctgggtcctcaaagaggaacaaagtcatcaagctagtggacatcacggacatccagaagtacaaggtcctgtctgtcctcccaggctcaggcatggggattgccgtgtcgacgccatccacccagaaaccgctcgtgtttggtgccatggtgcacagggatgaggccttcgagaccattctcagccagtacatcaagatcacctcagcggcagcgtctggcggggacagctagtattgacttgcccaggacgttgctggaattttctttttctttttctttttctttttttttttttacgatttggtagtggaaacaattggacatcctcatgagcttttgcaataattctcctggacctgtggttctattgtgttgacctctgcgttttatcgaccaagaaggggccagggctcacagggacgggggtgcccctctcccacagggcacgtcaggtgcctctgagggccacccgcagactgggggagggggcagaggccctcgggggcccgtggagaagacacacaggacccctggccctgcccttctccgttccagcctggacagagaaacctctccagccaccccaagaggttctcgcaaccttgtgtcccgctctccagaggccagaagctcgtccaccaccaaagccatagctgaagagtgcggggcccttcctcctggggacagaaagatgtcgtcaaggagggacatgggggcctttcaccaaccaccgagaaacgggcctggcggccctccttcctcttacatgagaccctcctgtggcatttgcccttggtgccgggctggggccgggcgcagtgaccctgcctgcgctccacactcgctccacgggaacagagagggtgagaagggcccacccctcacctgccctcagtgtctttggtggcaccttccttgctggcctccagggcgctcagcaccgtgtctgtaagggcctgcctgctgctctcggcctgacacgccggccaggaggtctgtagctggggaccagtaagggcacaggatggtgcaggtaaaagcacatctttctcacactttgctctttggaaggcccaggagaacatccgcgaaggctgttggaggtgctccgagcactgtggcatgtctggcacatggcccccaggctgcggttgcctgggttggttgggggaggaagtggggaggagtgttccgggaccatggtggcccaggctgcagccgcctttgggccatccgagaggctctggcagcccctgtgctttagggagcaaccgtgagccgagcccagaggcctgggcctgcactgcctgcagccgacatgcgacagcgttccctcccccgcgtgcctagccggtgccggtccgggcacagacccccccagcccccgccctgccccagggaagcctgggcttcccgggaacaaggtggcatttgtggagggagcgcccgcaggcctggtctgctggggccgcctgcgctgggctgaagggagggaaaggcggcttgggcctcctgggaaggagttggccaccccgcgggcctgcgtgtctgctggggcggatcccgcagctccctcagcttgtcctgagtcccttgggtgtcgttgagattgttgttttttgaagaaacagaagattctattttttacagcgagcaagctggttttcttatttttgtatcctttttcagatgtaatttttatctttgctccgatcctcatttgctggagtgggtgagggatccggcggcatgggctggtttcacccccttcacgaggggcccgagagtcacacgctggtgccgggggtgctttggggggagctgcgccgatcaccagattaagcacatgtcctatcccaggcggtggagcggagcccccgtggctctggactgcgcggacgttggcgtcaggatagaccacacggcggcctttcccgaatggggacagaacccgcatctgagccagtgggtctggctcctgtaggggactggctctcttggtgcaccaggggagggggacatatcccagtgaaccccaccagttggcgcctgaggcaaaactagggtgggcactgacccaccctcaggggctggctgcagaggcagtgcccgcaaacaatggccacacctctctccccaaggcccggcagtgcccaaggatgggtccggggccttcggggcaaatgagcgcctcttcctaaggtgctggggatttcagttccccaaacacagcgggatggggttccttgggggcagattggggggctttaccagcgtggggtggtttagttcgagtcccttttgtggagaaagggagatgaaaactgaccacgtgccagggtgttggcccgaagccccccagggagggccacagttcggggagctgggaggtcgggggagggccaccgacttggcttttcttccaaccccgggcccctccctggaagtcctcgggagcggagcgcggatcggcacgggctctgggctccccgtggagagaagctgtagtttttaccaaattggtgtacatctgggccagatgttttaatttctgtgactaatcactgaactagaccgaatgttaaattttttatgtcctgaagcctgagtctattttggatctgtaaataatcattgccagtgtgacttttgttcaacaaaaggattgtactgtattaagaaccgatgaaaaaaattctcctgtaacatttttttaagaaaactttgtttgtttacagcaaaaagtcttgtataaattataatttttatttaaataaacctaaaatgactttgtgctaaggctaaaaaaaaaaa

SEQ ID NO: 9969 - DNA, 573 bp, Homo sapiens
  SIMILAR (64)..(111): 1001254mologous to Escherichia coli O157:H7 putative beta- lactamase,accession number AE005473,Smith-Waterman Score=90.
  misc_feature (1)...(573): n = a,t,c or g
ccgcccggaattctcgngtcgacgatttcgtggagggcgagaggactgagtgtgctgagcccccccgggacgaacccccggctgatggagctctgaagcgggcagaggagctcaagactcaggccaatgactacttcaaagccaaggactacgagaacgccatcaagttctacagccaggccatcgagctgaaccccagcaatgccatctactatggcaaccgcagcctggcctacctgcgcactgagtgctatggctacgcgctgggagacgccacgcgggccattgagctggacaagaagtacatcaagggttattaccgccgggctgccagcaacatggcactgggcaagttccgggccgcgctgcgagactacgagacggtggtcaaggtgaagccccatgacaaggatgccaaaatgaaataccaggagtgcaacaagatcgtgaagcagaaggcctttgagcgggccatcgcgggcgaaaggggctggccagagggtctgctccctggacagataggaaggaggaggagcagctggggctgggggcacagtctgggcattctgtggg

SEQ ID NO: 9970 - DNA, 438 bp, Homo sapiens
  SIMILAR (5)..(193): 581254mologous to Rattus norvegicus phosphoprotein phosphatase,accession number U12203,Smith-Waterman Score=169.
  misc_feature (1)...(438): n = a,t,c or g
aaccggtntcaccntgaatgacatccggaaaatttgagcggaatcgaaaacccccaagattcagggccccatgtgtgaccttgttcttgntcagatccacagccaacagaacggcggctcgaatcagcaancgggcgtgagctgtcagtttgggcctgacgtcaccaaggccttcttggaagagaagcagctaggaatgatgtgaggtgacgggcggggcgcctgcatcccagggcccctccaatcccaccggacccagccctgggctagggcagagcaggccccccccagggcaatgttggacccccttttactttgtaaagtttgtatttattcccctcctanntcgcatggtggggctaggctgggctcacccccctccccagctattttatgtctgtaattaaatatgttaaaataaagtcattatcggaagtc

SEQ ID NO: 9971 - DNA, 278 bp, Homo sapiens
  SIMILAR (37)..(93): 891254mologous to Rattus norvegicus phosphoprotein phosphatase,accession number U12203,Smith-Waterman Score=94.
  misc_feature (1)...(278): n = a,t,c or g
gaacaaagcctcctacatccacctccagggctctgactacggcctcagttccaccagttcacagcagtgcctcatcccaacgtcaangccatgcctatgccaacacgctcttagggccccgccataggaagacccccagagagagggtcagcaggggggccccgcctgcgcctcccctcctatagccccatggtggggctaggctggggctcacccccctccccagctattttatgtctgtaattaaatatgttaaaataaagtcattatcggaagtc

SEQ ID NO: 9972 - DNA, 335 bp, Homo sapiens
  SIMILAR (128)..(301): 451254mologous to Arabidopsis thaliana F24J5.4,accession number AC008075,Smith-Waterman Score=104.
ttgacttccgataatgactttattttaacatatttaattacagacataaaatagctggggaggggggtgagccccagcctagcccttgcttgagtgggggaggagccatgcaaatgaggggggcagggcagccactcggccccaccccaccccgaggacggcctccccacagaatgcccaggctgtgcccccagccccagctgctccacctccttcttctctgtccagggagcagaccctctggccagcccctgactctgcccctaccccctctgcaaacctaaaggggaataaatacaaactttacaaagtaaaagggggtccaacattgccct

SEQ ID NO: 9973 - DNA, 373 bp, Homo sapiens
  SIMILAR (62)..(301): 401254mologous to Mus musculus Wiscott-Aldrich Syndrome protein homolog,accession number U42471,Smith-Waterman Score=97.
ctcacccttttcggcttaaagctcctgtacccagagggtctgctcactggacagagaggaaggaggtggagcagctgggtctgggggcacagcctgcgcattctgtggggagcccgtcctcggggtgggatggggccgagtggctgccctgcccccctcatttgcatggctcgtcccccactcaagcaatagggccccgccataggaagacccccagagagagggtcagcaggggggccccgcctgcgcctcccctcctatagccccatggtggggctaggctggggctcacccccctccccagctattttatgtctgtaattaaatatgttaaaataaagtcattatcggaagtcaaaaaaaaaaaaaaaaa

SEQ ID NO: 9974 - DNA, 279 bp, Homo sapiens
  SIMILAR (1)..(132): 931254mologous to Rattus norvegicus phosphoprotein phosphatase,accession number U12203,Smith-Waterman Score=219.
atgaaccagatctacggtttcgagggtgaggtgaaggccaagtacacagcccagatgtacgagctctttagcgaggtgttcgagtggctcccgttggcccagtgcatcaacggcaaagtgacctgcaggcacgagtgaagatcgtgaagcagaaggcctttgagcgggccatcgcaggcgacgagcacaagcgctccgtggtggactcgctggacatcgagagcatgaggcgctccatccgcagcccaaagctccgtctcatgattcccaatgggcgag

SEQ ID NO: 9975 - DNA, 194 bp, Homo sapiens
  SIMILAR (193)..(92): 911254mologous to Homo sapiens serine-threonine phosphatase,accession number U25174,Smith-Waterman Score=166.
  misc_feature (1)...(194): n = a,t,c or g
aggaggggaggcgcagcggggccccctgctgaccctctctctgggggtcttcctatggcggggcctattgcttgagtgggggaggagccatgcaaatgaggggggcagagaagacggtgacacagcggcctccgtgagccacctcgtagccctcgnccttgacttcgtggctncggatgatatagtccaggttg

SEQ ID NO: 9976 - DNA, 571 bp, Homo sapiens
  SIMILAR (259)..(570): 971254mologous to Homo sapiens protein phosphatase 5,accession number X89416,Smith-Waterman Score=557.
  misc_feature (1)...(571): n = a,t,c or g
ggcctcgtgccatctccaagctgagcacgctcgtggaaaccacactcaaattgacagagaagattacagtatgtggggacacccatggccagttctatgacctcctcaacatattcgagctcaancccatgtccatgctggatgtcccctgcccaacacccacccaggctgggctgtggggtcagcacctggccgggccaggaggtggcctgtgagtgaccacccccggggaggtggacgagtccctaatgtttccctcgctccccaccagggcccatgtgtgacctgctctggtcagatccacagccacagaacgggcgctcgatcagcaagcggggcgtgagctgtcagtttgggcctgacgtcaccaaggccttcttggaagagaacaacctggactatatcatccgcagccacgaagtcaaggccgagggctacgaggtggctcacggaggccgctgtgtcaccgtcttctctgcccccaactactgcgaccagatggggaacaaagcctcctacatccacctccagggctctgacctacggcctcagttccaccagttcacagcag

SEQ ID NO: 9977 - DNA, 422 bp, Homo sapiens
  SIMILAR (15)..(263): 711254mologous to Homo sapiens serine-threonine phosphatase,accession number U25174,Smith-Waterman Score=262.
gcagaaagaacctggtggcaaagttccagaggttagcggagcctagcatggaggcggtggtcaaggtgaagccccacgacaaggatgccaaaatgaaataccaggagtgcaacaagatcgtgaagcagaaggcctttgagcgggccatcgcaggcgacgagcacaagcgctccgtggtggactcgctggacatcgagagcatgaggcgctccatccgcagcccaaagctccgtctcatgattcccaatgggcgagtggccgtggtcgctgactctcgtgtctcccctgttcacatgccagccatcgagggtgagtacagcggacccaagcttgaggacgacaaagtgacaatcaccttcatgaaggggctcatgcagtggtacaaggaccagaagaaactgcaccagaaatgcgcctaccag

SEQ ID NO: 9978 - DNA, 1090 bp, Homo sapiens
  SIMILAR (637)..(1089): 801254mologous to Homo sapiens protein phosphatase 5,accession number X89416,Smith-Waterman Score=600.
cagattctggtacaggtcaaataggtcctctccaagatgagcacgctcgtggcaaccacactcaaacaggtgcgcgttgtggggcagtgcgagaagggccagcaggggtgggctctctggctggggagggcccacagagctcaggaacttacggatccacctccctctctccctcacaccccacccctgtgcctttcctcctgaatatcccatttctctcctggcctcttggtcttcgtttgtgttccctgcgtgtgtctcgtgcatgattcttcttggtctactgtgaactcttacccttcccctcacctctgccccctccccacgtctctctctcggcccctccctctccggtggcctcttttctttcagacagagaagattacagtatgtggggacacccatggccagttctatgacctcctcaacatattcgagctcaacggtttaccctcggagaccaacccctatatatttaatggtgactttgtggaccgaggctccttctctgtagaagtgatcctcacccttttcggcttcaagctcctgtacccagatcactttcacctccttcgaggcaaccacgagacagacaacatgaaccagatctacggtttcgagggtgaggtgaaggccaagtacacagcccagatgtacgagctctttaggcgaggtgttcgagtgggctcccgttgggcccagtgcatcaacgggcaaagtgctgattcattgcacggagggcccacgcgggccattgagctggacaagaagtacatcaagggttattaccgccgggctgccagcaacatggcactgggcaagttccgggccgcgctgcgagactacgagacggtggtcaaggtgaagccccatgacaaggatgccaaaatgaaataccaggagtgcaacaagatcgtgaagcagaaggcctttgagcgggccatcgcgggcgacgagcacaagcgctccgtggtggactcactggacatcgagagcatgaccattgaggatgagtacagcggacccaagcttgaagacggcaaagtgacaatcagtttcatgaaggagctcatgcagtggtacaaggacc

SEQ ID NO: 9979 - DNA, 2145 bp, Homo sapiens
  SIMILAR (715)..(1161): 971254mologous to Homo sapiens PPP5_HUMAN,accession number AC007193,Smith-Waterman Score=759.
atggcgatggcggagggcgagaggactgagtgtgctgagcccccccgggacgaacccccggctgatggagctctgaagcgggcagaggagctcaagactcaggccaatgactacttcaaagccaaggactacgagaacgccatcaagttctacagccaggccatcgagctgaaccccagcaatgccatctactatggcaaccgcagcctggcctacctgcgcactgagtgctatggctacgcgctgggagacgccacgcgggccattgagctggacaagaagtacatcaagggttattaccgccgggctgccagcaacatggcactgggcaagttccgggccgcgctgcgagactacgagacgggaggggcaaccagggagctgggagccgcgagtctgcagttggtcgcggggctgagaagcacgagtctgcagtcggtggagccagctcagacactgtcctggctgttggccgctggcctggggtggagggtggacttcaggccagaaaatggtgacaagaggagtggccgcctccggatggctgtggctgtgatgacatggttgagtaaaggtcacgagctgcagggctcagtaatgagtaaccaaggacagtcggtgttgggttggggcagggctccagctatcacactggtccacgacactgatggcattttactaattggacctagtgagcatgaagcagctactctgtacttattggtggtcaaggtgaagccccatgacaaggatgccaaaatgaaataccaggagtgcaacaagatcgtgaagcagaaggcctttgagcgggccatcgcgggcgacgagcacaagcgctccgtggtggactcgctggacatcgagagcatgaccattgaggatgagtacagcggacccaagcttgaagacggcaaagtgacaatcagtttcatgaaggagctcatgcagtggtacaaggaccagaagaaactgcaccggaaatgtgcctaccagattctggtacaggtcaaagaggtcctctccaagctgagcacgctcgtggaaaccacactcaaagagacagagaagattacagtatgtggggacacccatggccagttctatgacctcctcaacatattcgagctcaacggtttaccctcggagaccaacccctatgtatccttctcagcagagccaccctctccccacctccacccccagccgcagcctcaggtctgcacagagtgggaggagcccttgccaggaaaagacgtgaccttggaaaggagaggcctggccatgctggggcaccaaggacagatatttaatggtgactttgtggaccgaggctccttctctgtagaagtgatcctcacccttttcggcttcaagctcctgtacccagatcactttcacctccttcgaggcaaccacgagacagacaacatgaaccagatctacggtttcgagggtgaggtgaaggccaagtacacagcccagatgtacgagctctttagcgaggtgttcgagtggctcccgttggcccagtgcatcaacggcaaagtgctgatcatgcacggaggcctgttcagtgaagacggtgtcaccctggatgacatccggaaaattgagcggaatcgacaacccccagattcagccctgcctcggaggatgggctttgtgcccttggcaagaaacagcgggtctgagcctcagtttcctcacctgcgacttgggccagtgcacctccttcatggggctgtgatggcaagcacggtcgtgaccatggtgcggggtgaaggcacggtgaccgccgagcacacctgtccttatttatttaacgggcgctcgatcagcaagcggggcgtgagctgtcagtttgggcctgacgtcaccaaggccttcttggaagagaacaacctggactatatcatccgcagccacgaagtcaaggccgagggctacgaggtggctcacggaggccgctgtgtcaccgtcttctctgcccccaactactgcgaccagatggggaacaaagcctcctacatccacctccagggctctgacctacggcctcagttccaccagttcacagcagtgcctcatcccaacgtcaagcccatggcctatgccaacacgctgctgcagctaggaatgatgtga

SEQ ID NO: 9980 - DNA, 3702 bp, Homo sapiens
  SIMILAR (2071)..(3195): 1001254mologous to Homo sapiens PPP5_HUMAN,accession number AC007193,Smith-Waterman Score=1999.
gcaccgccccgtaattcccgggtcgacgattccgtgcggagggcgagaggactgagtgtgctgagcccccccgggacgaacccccggctgatggagctctgaagcgggcagaggagctcaagactcaggccaatgactacttcaaagccaaggactacgagaacgccatcaagttctacagccaggccatcgagctgaaccccagcaatgccatctactatggcaaccgcagcctggtctacctgcgcactgagtgctatggctactcgctgtgagacgccacgcgggccattgagctggacaagaagtacatcatgggctattaccgccgggcctgccagcaacatggcactgggcaagttccgggccgcgctgcgagactacgagacggtggtcaaggtgaagccccatgacaaggatgccaaaatgaaataccaggagtgcaacaaagatcgtgaagccaaaagcctttgagcgggccatcgcgggcgacgagcacaagcgctccgtggtggactcgctggacatcgagagcatgaccattgaggatgagtacagctgacccaagcttgaagacggcaaagtgacaatcagtttcatgaaggagctcatgcagtggtacaaggaccagaagaaactgcaccggaaatgtgcctaccagattctggtacaggtcaaagaggtcctctccaagctgagcacgctcgtggaaaccacactcaaagagacagagaagattacagtatgtggggacacccatggccagttctatgacctcctcaacatattcgagctcaacggtttaccctcggagaccaacccctatatatttaatggtgactttgtggaccgaggctccttctctgtagaagtgatcctcacccttttcggcttcaagctcctgtacccagatcactttcacctccttcgaggcaaccacgcagacagacaacatgaaccagatctacggtttcgagggtgaggtgaaggccaagtacacagcccagatgtacgagctctttagcgaggtgttcgagtggctcccgttggcccagtgcatcaacggcaaagtgctgatcatgcacggaggcctgttcagtgaagacggtgtcaccctggatgacatccggaaaattgagcggaatcgacaacccccagattcagggcccatgtgtggacctgctctggtcagatccacagccacagaacgggcgctcgatcagcaagcggggcgtgacgtgtcagtttgggcctgacgtcaccaaggccttcttggaagagaacaacctggactatatcatccgcagccacgaagtcaaggccgagggctacgaggtggctcacggaggccgctgtgtcaccgtcttctctgcccccaactactgcgaccagatggggaacaaagcctcctaacatccacctccaggggctctgacctacggccttcagttccaccagtttcacagcagtgccttcatcccaacgtcaaggcccatggcctatgccaacacgctgtctgcagcttagggaattgatgtgaggtgacggggcgggggcggccttgcattcccaggggcccctccaatcccacgggacccaggccctgggctaaggggcagagcaaggccccgccccagggcaagtgttgggaccccctttttactttggtaaagtttttgtatttattccccctttaggtttgcagagggggtaggggcaagagtcaggggcttggcaagagggtctgctcccctggacagagaggaaggaggtggagcagctggtggctgggggcacagcgtgggcattctggtggggaggccgtcctcggggatggggtggggccgaagtgcctgccctgcccccctcaattggatgggtccttcccccattcaagcaatagggccccgccataggaagacccccagagagagggtcagcaggggggccccgcctgcgcctcccctcctatagccccatggtgggggtagggctggggctcacccccctccccaagctattttatgtcttgtaattaaatatgttaaaataaaagtcattatcggaagtgtgaagccccatgacaaggatgccaaaatgaaataccaggagtgcaacaagatcgtgaagcagaaggcctttgagcgggccatcgcgggcgacgagcacaagcgctccgtggtggactcgctggacatcgagagcatgaccattgaggatgagtacagcggacccaagcttgaagacggcaaagtgacaatcagtttcatgaaggagctcatgcagtggtacaaggaccagaagaaactgcaccggaaatgtgcctaccagattctggtacaggtcaaagaggtcctctccaagctgagcacgctcgtggaaaccacactcaaagagacagagaagattacagtatgtggggacacccatggccagttctatgacctcctcaacatattcgagctcaacggtttaccctcggagaccaacccctatatatttaatggtgactttgtggaccgaggctccttctctgtagaagtgatcctcacccttttcggcttcaagctcctgtacccagatcactttcacctccttcgaggcaaccacgagacagacaacatgaaccagatctacggtttcgagggtgaggtgaaggccaagtacacagcccagatgtacgagctctttagcgaggtgttcgagtggctcccgttggcccagtgcatcaacggcaaagtgctgatcatgcacggaggcctgttcagtgaagacggtgtcaccctggatgacatccggaaaattgagcggaatcgacaacccccagattcagggcccatgtgtgacctgctctggtcagatccacagccacagaacgggcgctcgatcagcaagcggggcgtgagctgtcagtttgggcctgacgtcaccaaggccttcttggaagagaacaacctggactatatcatccgcagccacgaagtcaaggccgagggctacgaggtggctcacggaggccgctgtgtcaccgtcttctctgcccccaactactgcgaccagatggggaacaaagcctcctacatccacctccagggctctgacctacggcctcagttccaccagttcacagcagtgcctcatcccaacgtcaagcccatggcctatgccaacacgctgctgcagctaggaatgatgtgaggtgacgggcggggcggcctgcatcccagggcccctccaatcccaccggacccaggccctgggctaggggcagagcaggccccgccccagggcaatgttggacccccttttactttgtaaagtttgtatttattcccctttaggtttgcagagggggtaggggcagagtcaggggctggccagagggtctgctccctggacagagaggaaggaggtggagcagctggggctgggggcacagcctgggcattctgtggggaggccgtcctcggggtggggtggggccgagtggctgccctgcccccctcatttgcatggctcctcccccactcaagcaatagggccccgccataggaagacccccagagagagggtcagcaggggggccccgcctgcgcctcccctcctatagccccatggtggggctaggctggggctcacccccctccccagctattttatgtctgtaattaaatatgttaaaataaagtcattatcggaagt

SEQ ID NO: 9981 - DNA, 207 bp, Homo sapiens
  SIMILAR (111)..(1): 861254mologous to Mus musculus glucose transporter,accession number M75135,Smith-Waterman Score=167.
agaaagtaaagtgaagatagtattaaccacacccgcgctgatggtggcatagatgggctgttgaacacctgcatccttgaagattcctgttgagtaatagaacaccttgttagccaagatggtctcgatttcctgacctcgtgatctgcccgcctcggcctcccaaagtgctgggattacaggcgtgagccaccgcgcccggtgcat

SEQ ID NO: 9982 - DNA, 602 bp, Homo sapiens
  SIMILAR (497)..(589): 961254mologous to Homo sapiens Human irritable bowel disease related polypeptide IMX4,accession number Y71205,Smith-Waterman Score=158.
agaatagagggggagcttgcaggaaccagcaatgataaggtcaggaaaagaaagagctgaaaatggagaaaaccagagttagaactgttggatacaggagaagaaacagcagctccactaccgacccccccccaggtttgatgtccttccaagaataaagtctttccctggggaaggtctctcgctctgtctttccagcatccactctcccttgtccttctgggggtgtatcacagtcagccagtggcttcttcatgatggtggttggggtggttgtcatgtgacgggtcccctccaggttactaaagggtgcatgtcccctgcttgaaccctgagaggcaggtggtaggccatggccacaatccccagctgaggagcaggtgtccctgagaacccaaacttcccagagagtatctgagaaccaaccaatgaaaacagtcccatcgctcttagccggtaagtaaacagtcagaagattagcatgaaagcagtttagcattgggaggaagcacagatctctagagctgtcctgtcgctgcccaggattgacctgtgtgtaagtcccaataaactcccctactccccaaaaaaaaaaaaaaaaa

SEQ ID NO: 9983 - DNA, 1310 bp, Homo sapiens
  SIMILAR (1)..(216): 771254mologous to Homo sapiens PRO2822,accession number AF119900,Smith-Waterman Score=292.
gagatggagtctcgctctatcgcccaggatggagtgcagtggctcaatctcggctcactgcaaactccgcctcccgggttcacaccattctccggcctcagtctcccgagtagctgggactacaggcacctgccaccacgcccggctaatttttttgtattttcactggagacggggtttcactgtgttagccacgatggtctccatctcctgacctcgtgatctgcccacctcggcctcccaaagtgctgggattacaggcgtgagccaccgcgcctggccaaaatgcagacattttattagggggataaggagggcaaggtaaagcttatggaactgagtgttagtgactttggcatttgtgtagctgagcacagcaagggaggggttaatgcagatggcaagtgcaccaaggagaaggcaggaacactggagcctgcaataagggaggagaggggactggagagtgtggggaatgggaagaagtagtttactttggactaaagaatatattggggggaggaatagaggggaggtgtgcaggaaccagcaatgagaaggccaggaaaagaaagagctgaaaatgcagaaagccgaagagttagaacttttggatacagcagaagaaacagcggctccactaccgacccccccccccaggtttgatgtccttccaagaataaagtctttccctgggtgatggtctctcgctctgtctttccagcatccactctcccttgtccttctgggggtgtatcacagtcagccagtggcttcttcatgatggtggttggggtggttgtcatgtgacgggtcccctccaggttactaaagggtgcatgtcccctgcttgaacccaagctggacttgttcgagtcattctttggtctctcagctccttctaagctttgggggccatcagtctcaagtttttctcgtaatggtggtgatggtggttgtgatggcagcagagtggtgggggccttggcaagtggtcggtgctcttccagaccaggggacaccgatggaccgatgaagttccaggggaacttgaagtgctgcttccaaccctctaatggcttcccattactcttagcacaaagatgtaggccatgatgctgcctaaagtagcctgttgtggcctggggtccttccaatctcctatgcacgttgagtcctccttcttctttgtcataccaagtcatttctgaatttttggcgtcacaacgaagtggccagcatttacttgagggtggctcatccagccctgggcacagctggcatcccagcctgctgctggagcaaaccat

SEQ ID NO: 9984 - DNA, 1921 bp, Homo sapiens
  SIMILAR (1142)..(1807): 1001254mologous to Homo sapiens eosinophil granule major basic pre-proprotein,accession number Z26248,Smith-Waterman Score= 1223.
  misc_feature (1)...(1921): n = a,t,c or g
gcgcggacgcgtgggcgtggccacactgctgactgtgctgctgtaatgcctgggctttgctggcgtcctctttggctggccttcactagtgtttgtcttcaagaatgaagattactttaaggatctgtgtggaccagatgctgggccgattggcaatgccacagggcaggctgactgcaaagcccaggatgagaggttctcactcatcttcaccctggggtccttcatgaacaacttcatgacattccccactggctacatctttgaccggttcaagaccaccgtggcacgcctcatagccatatttttctacaccaccgccacactcatcatagccttcacctctgcaggctcagccgtgctgctcttcctggccatgccaatgctcaccattgggggaatcctgtttctcatcaccaacctgcagattgggaacctatttggccaacaccgttcgaccatcatcactctgtacaatggagcatttgactcttcctcggcagtcttccttattattaagcttctttatgaaaaaggcatcagcctcagggcctccttcatcttcatctctgtctgcagtacctggcatgtagcacgcactttcctcctgatgccccgggggcacatcccatacccaccgccccccaactacagctatggcctgtgccctgggaatggcaccacaaaggaagagaaggaaatagctgagcatgaaaacagggagctacagtcaaaggagttccttttaagcgaagggaagagaccccagggcaagggcagaagcaggaactccgctccttctggagctacggntttctctcgggcgctttagcctgggnacctggtgtgggcttgtctgtgatacagttgtggcactacctctttcattggcactctcaactccttgctgaccaacatggccggtggggacatggcacgagtcagcacctacacaaatgcctttgccttcactcagttcggagtgctgtgtgccccctggaatggcctgctcatggaccggcttaaacagaagtaccagaaagaagcaagaaagacagggtcttttaacatccgaggaccacattctttatactttccaaatcatcacctgccccatgcaacttacagggataaagccaagatgaaactccccttacttctggctcttctatttggggcagtttctgctcttcatctaaggtctgagacttccacctttgagacccctttgggtgctaagacgctgcctgaggatgaggagacaccagagcaggagatggaggagaccccttgcagggagctggaggaagaggaggagtggggctctggaagtgaagatgcctccaagaaagatggggctgttgagtctatctcagtgccagatatggtggacaaaaaccttacgtgtcctgaggaagaggacacggtaaaagtggtgggcatccctgggtgccagacctgccgctacctcctggtgagaagtcttcagacgtttagtcaagcttggtttacttgccggaggtgctacaggggcaacctggtttccatccacaacttcaatattaattatcgaatccagtgttctgtcagcgcgctcaaccagggtcaagtctggattggaggcaggatcacaggctcgggtcgctgcagacgctttcagtgggttgacggcagccgctggaactttgcgtactgggctgctcaccagccctggacccgcggtggtcactgcgtggccctgtgtacccgaggaggctactggcgtcgagcccactgcctcagaagacttcctttcatctgttcctactgagctggtcccagccagcagttcagagctgccctctcctgggcagctgcctcccctcctctgcttgccatccctccctccacctccctgcaataaaatgggttttactgaaaa

SEQ ID NO: 9985 - DNA, 2316 bp, Homo sapiens
  SIMILAR (433)..(885): 801254mologous to Mus musculus selectively expressed in embryonic epithelia protein-1,accession number AF188622,Smith- Waterman Score=642.
  misc_feature (1)...(2316): n = a,t,c or g
atgaaaagaggaaatggatccaggagaaggagacgactcctgagtgaaaacaacggggtttttcacattgagagctttgcccaacaccccaaagatgaaaagagcaggaaactgctggggccgattgaacactggacttttgttgtggaaaaaggcaaagggaagccggaagagactggaacagtttccatggtgctggaggatggggaagtggaggctgacattaagcagggatctgtcgtggggtgctgcaatgttcctccagatgctgcacgggagagggcagaaaaggcctatatggatggagaacagccaactttaatcttacttctctgggatttgaaaaagcaaattcctgttcataaaggtacccacagtgtgggacgtcatcaaacagagcttcttcctaataacggcggcggtgttgtaagatttttctacaccaccgccacactcatcatagccttcacctctgcaggctcagccgtgctgctcttcctggccatgccaatgctcaccattgggggaatcctgtttctcatcaccaacctgcagattgggaacctatttggccaacaccgttcgaccatcatcactctgtacaatggagcatttgactcttcctcggcagtcttccttattattaagcttctttatgaaaaaggcatcagcctcagggcctccttcatcttcatctctgtctgcagtacctggcatgtagcacgcactttcctcctgatgccccgggggcacatcccatacccactgccccccaactacagctatggcctgtgccctgggaatggcaccacaaaggaagagaaggaaacagctgagcatgaaaacagggagctacagtcaaaggagttcctttcagcgaaggaagtcagcacctacacaaatgcctttgccttcactcagttcggagtgctgtgtgccccctggaatggcctgctcatggaccggcttaaacagaagtaccagaaggaagcaagaaagacaggttcctccactttggcggtggccctctgctcgacggtgccttcgctggccctgacatccctgctgtgcctgggcttcgccctctgtgcctcagtccccatcctccctctccagtacctcaccttcatcctgcaagtgatcagccgctccttcctctatgggagcaacgcggcgcttcctcacccttgctttcccttcagagcactttggcaagctctttgggctggtgatggccttgtcggctcgtggtgtctctgctccagttccccatcttcaccctcatcaaaggctcccttcagaatgacccattttaacgtgaatgtgatgttcatgcttgccattcttctgacatttcttccacccctttctggtatatcgggaatgccgtacttggaaagaaagtccctctggcnattgcatagttcagaagccctcactttttcagccccgaggatggtttttgttcatctttccaccacctttggaggaccttgtgtcccaaaagactttggcctatcccagcaaaacacacacacacacacacacacacacaaaataaagacacacaaggacgtctggcgcagcaagaaaagaatctcagttgccaagcagatttgatatcacacaggactcaaagcaaagggcatgtggaacttctttatttcaaaacagaagtgtctcctttgcacttaagccttggcagacccttgactccaggggagatgacctgggagaaggaagtgcgacaactatttctttacgcctgtttggctcccaaacccatatgtgcctggaacctctgccacgggttaaattttcaggtgaagagtgaaggttgtcatgggcctcagctatgcttcctgggctctccctcaagagtgccagccttgggtaaggagaactcacagctctggggaaaaagagggagcagacagggttccctggggccccagtctccagcccagcccactgatgctggattgacctttgcccttgaccctggtctggttcttcagaattcaatttttcccatctgtaaaattgagatgaattttggtgttgaaaggttcttcctggagcagatgtcctagaaggttttttagggaatagtgacagagtcaggccaccccaagggccatgggagccaagctaacatgatttgaccgaaagattttctgacagactatctttngggggatgttttcaagaagggatataagttatttacttttngggcatttaaaagaaaatttctctcgggaataattttatagaaaaataaagcttctgtgtctaaggcaaaaaaaaaaaaaa

SEQ ID NO: 9986 - DNA, 454 bp, Homo sapiens
  SIMILAR (312)..(389): 801254mologous to Danio rerio microphthalmia-related protein,accession number AF119220,Smith-Waterman Score=111.
ggttaaggcatggaacctggggcatcagagttctgtgtagcagggaagagtcctaccccaggcagctttgctgtgctacgagcatcaccatggctgattctacctttcagtgctcttaattgtgtctggcctttgccctggaccccctaattcctgtagaaatcccaatctgttggtcacctcttacttcctggaagaactaaatctaagctgcaggttgccctgaagcacccctccctgggctgggtacttctccccatggggtggggggtccccatccctctaattgctccttctggaatctgttacctttagttgaaaggagacgaaggttcaacatcaatgaccgcatcaagggagtgggattgctgatccccaaggccaatgacctgtgagcaggtttctgagggggagggtgatgggtctgggtgggcagcagctgacaagtattatc

SEQ ID NO: 9987 - DNA, 1686 bp, Homo sapiens
cgcatgcagcaacaggctgtcatgcattacatgcagcagcagcagcagcagcaacagcagcagctcggagggccgcccaccccggccatcaatacccccgtccacttccagtcgccaccacctgtgcctggggaggtgttgaaggtagggcctgttctggcctgccccccaccctgtccccactagtcccagcctcccctagagcccttgccttacctgtccgagacctatgggaacaagtttgctgcccacatcagcccagcccagggctctccgaaacccccaccagccgcctccccaggggtgcgagctggacacgtgctgtcctcctccgctggcaacagtgctcccaatagccccatggccatgctgcacattggctccaaccctgagagggaggtgagtgaggagctggccagtggccatgctgcttgcagagctcgtgcccactgctgtgcttctgagactatgcccaacacggtactcctggctagggtggggtgggtgtgcaagggttctagggaggggggcacccactgtggctctgagcctggagagagtggagtcaccagcagctcctgccctgcggacctgacccagaagcgagagctcacaggtactgcctccctctacccctgtgcctttgaatacccgactcctccctccttttctccctccctcccagccgcccctctccctgcctccctcttccttgttctcacctgggctggctaaaaagccaatgacctgtgagcaggtttctgagggggagggtgatgggtctgggtgggcagcagctgacaagtattatctgccctcctgcaaaagtccagggagctggagaaccactctcgccgcctggagatgaccaacaagcagctctggctccgtatccaggtctggtcctgaacttggacttctttggtaactctgacccttaacctggctcctggccctaaggggcagtactttaggatgttttgctttggtaacaaacaatcctcagcatctttaagcaacacatatcagctggaggttctgttctgtgagaccctcattctggcacccacgctgctggcacccagctctctgatggcacatctagagctggctcttaaagccattgtcactcttaaggtgccacatgtcacttctgttcaatgggcttggccaatgcaagcacactctacaagtactctaacctcactggcccagcaggtggtgaagcaggagctgcctagcgaagagggcccaggggaggccctgatgctgggggctgaggtccctgaccctgagccactgccagctctgcccccgcaagccccgctgcccctgcccacccagccaccatccccattccatcacctggacttcagccacagcctgagctttgggggcagggaggacgagggtcccccgggctaccccgaacccctggcgccggggcatggctccccattccccagcctgtccaagaaggatctggacctcatgctcctggacgactcactgctaccgctggcctctgatccacttctgtccaccatgtcccccgaggcctccaaggccagcagccgccggagcagcttcagcatggaggagggcgatgtgctgtgaccctggctgcccctgtgccagggaacaggggccggcctgggggctgggagggccaggggcacctccctc

SEQ ID NO: 9988 - DNA, 2405 bp, Homo sapiens
  SIMILAR (91)..(1872): 1001254mologous to Homo sapiens organic-cation transporter like 4,accession number AB011082,Smith-Waterman Score=3079.
ggtggagtgacagccggagcccgggcgccggcgcggggctcggtgacagcggaggcggcggcccgggcgggacgagggagcggccgcggcgccgacggcgggcgggaagggcggacggggcgggcctccctggtggcacggggccggagcaggccgggagcaggtggcgggcacagcttgcgggccaggcacccgaacttgcgacaagttgccggagccgcggggcgcgggcggcggacagattgaccttcagagcgagggagccagcgccggcagccaccatggcgtcacgcatagggttgcgcatgcagctcatgcgggagcaggcgcagcaggaggagcaacgggagcgcatgcagcaacaggctgtcatgcattacatgcagcagcagcagcagcagcaacagcagcagctcggagggccgcccaccccggccatcaatacccccgtccacttccagtcgccaccacctgtgcctggggaggtgttgaaggtgcagtcctacctggagaatcccacatcctaccatctgcagcagtcgcagcatcagaaggtgcgggagtacctgtccgagacctatggaaacaagtttgctgctgcccacatcagcccagcccagggctctccgaaacccccaccagccgcctccccaggggtgcgagctggacacgtgctgtcctcctccgctggcaacagtgctcccaataagccccatggccatgctgcacattggctccaaccctgagagggagttggatgatgtcattgacaacattatgcgtctggacgatgtctcttggctacatcaatcctgaaatgcagatgcccaacacggtactcctggctaggctacccctgtccagcagccacctgaatgtgtacagcagcgacccccaggtcacagcctccctggtgggcgtcaccagcagctcctgccctgcggacctgacccagaagcgagagctcacagatgctgagagcagggccctggccaaggagcggcagaagaaagacaatcacaacttaattgaaaggagacgaaggttcaacatcaatgaccgcatcaaggagttgggaatgctgatccccaaggccaatgacctggacgtgcgctggaacaagggcaccatcctcaaggcctctgtggattacatccggaggatgcagaaggacctgcaaaagtccagggagctggagaaccactctcgccgcctggagatgaccaacaagcagctctggctccgtatccaggagctggagatgcaggctcgagtgcacggcctccctaccacctccccgtccggcatgaacatggctgagctggcccagcaggtggttgaagcaggagctgcctagcgaagagggcccaggggaggccttgatgctgggggcttgagggtcctggaccctgagccactgccagctctgcaccggcaagccccgttgcccttgcccacccaagcaccgtccccatttcattcaactgggatttcagccacagccttgagctttggtgggcagggtggacgactggtccccggggctaccccgaacccctggcgccggggcatggctccccattccccagcctgtccaagaaggatctggacctcatgctcctggacgactcactgctaccgctggcctctgatccacttctgtccaccatgtcccccgaggcctccaaggccagcagccgccggagcagcttcagcatggaggagggcgatgtgctgtgaccctggctgcccctgtgccagggaacaggggccggcctgggggctgggaagggccaggggcacctccctcccacccttcaggctgcactgtgtgtgaagtagccacctgccctgcctccctcctccccgttggcccctgtttggacttagtgcctgtctggcagcctgtggggtcaggagaagcacccccagggcagccctcttgactggcgcagtgggaagaggccttcagcccctctcccggagatggaatcgcggggcagggaggggcagggtgttctagaggtgagaagagggcctggtggagattccctgtcttctgagcccgagcccctcattaccagtgagaggacatgcttgaggggttcgggaagctcctcatctgaggcaactggtccctgggggtgctcaggcctgccctttttgggactcagatggcaggaggtccaccccgcagcctggtcctcggctctcccacaggtgggcaccccccactttggtgctaatagctctccaccaggtggtgtgagcgcgggggctgccagaagcgggaggggtcactgccggaagagcaggctgccctccgacccctcactttgtgcctttagtaaacactgtgctttgtaaaaaaaaaaaaaaaaaaattcctgcggccgcaagcttat

SEQ ID NO: 9989 - DNA, 405 bp, Homo sapiens
  SIMILAR (232)..(987): 851254mologous to Escherichia coli URF1 (aa 1-267),accession number X03966,Smith-Waterman Score=1041.
aacaccacttgctccaccacctaaacctgttcgaagaagattaaaatccagaagatgaattaaggccagaagttgatgaacatacacaaaagacgggtgtcttagctgctgttcttgcatcacaaccttctattcccaggatgttcttgaggagagaatttccctggaagttcaactggaacaacttcgaccattctctcacctataagccaattgccgttaactgaacatacttgtttttaagtggttttgggttcaaagccaatttggagacctagacattcagctcactgcttaactcaacattaaattttatgattctgttttgccctatatgttcaccgttgtatttaagtatcttttattttttaatttcgacaataaaaaggtcaggatggcgtttta

SEQ ID NO: 9990 - DNA, 438 bp, Homo sapiens
  SIMILAR (32)..(109): 461254mologous to Lycopersicon esculentum Metallothionein- like protein,accession number Z68310,Smith-Waterman Score=66.
tttcgtggagcgggtcccgggatgtgaccggggctctgcttgtggctgcggcggtggcttctgaggctgtcgggtctttgcgggttgcggaagggggccccaatacccttcttcttcaggtatgtaggggaagcaaaggaacctccgcaacctgcccctttaggcccttcccaccactctggtcactgctgggtactgggcggtgaagggtcatcgcttcggtagattggggaaggggaatgaggtgatgtcaagagggatgcccagtggtactgcttggaggcaagacctggcacttaaaaccactgtgtgaataagtaactatgagcagtttacttattatgccttctctaaaacattctttgctgtttgatatacaggaagggtttcagtgctcttgtgacagatgtaattttccaaaaacgaggaaatcgcgag

SEQ ID NO: 9991 - DNA, 495 bp, Homo sapiens
  SIMILAR (262)..(11): 341254mologous to Mus musculus zyxin,accession number Y07711,Smith-Waterman Score=105.
atgccgagggcggagccaagagcgacactgggggagcaggaaaaggcggggcttccgcttggggcatggaggctgtacctcttacgtcacttccgtaaacaaacggagctgcggaggagcgggtcccgggatgtgaccggggctctgcttgtggctgcggcggtggcttctgaggctgtcgggtctttgcgggttgcggaagggggccccaatacccttttttttcaggtcttaagaagctggccgtggtgcaataaggaacttaaaacaatggaagagcggaaagtgaagaggaggagtcctaagtcttttagtgcccactgtactcaggttgtcaatgccaaaaaaaatgccattccaaagggacataaccaaagacaagagaagatttggaagaagtattccaatgagtaccaaatgataaacagcagttttgaggatttccttcgaataaattatcagaatggggtttttgtcatggaagagtttaattag

SEQ ID NO: 9992 - DNA, 3275 bp, Homo sapiens
  SIMILAR (2064)..(2270): 851254mologous to Homo sapiens LckSH3 domain-combining protein,accession number Y11696,Smith-Waterman Score=300.
gaaacaaacggagctgcggaggagcgggtctcgggatgtgaccggggctttgcttgtggctgcggcggtggcttctgaggctgtcgggtctttgcgggttgcggaagggggccccaatacccttcttcttcaggtcttaagaaggctggaccgtggtgcaataaggccactcaaacaatggaagagcggaaagtgaagaggaggagtcctaagtcttttagtgcccactgtactcaggttgtcaatgtccaaaaaaaaatgtccattccagtgtagtaaaagtcacagggttttcaaatcctgcatcacaagtcaacttcacaagccgaccaaaagttaaaaaagaagtgatgaaaagaaaagaccaaacctcaagggttggaagaagggcaaaggcactccagtcaactcccgatccaacactccttcctcacttgatgtctccagatgttccaggaagatggagagagggctgctcagtctttttgaatgatttccactcctggaaaactttcaaacattttggaaattgaatgttccatttgaacagatggaacatgtttccggggaattgcaggagaaattagctcgcttgaatttggagctctatggggagttagaggaacttcctgaggataagagaaaaacagccagtgactcccaatctggataggcttctgtcagattgcagagaaatgataccagcattccgaactttcctgaagaggcatgataagaccattgttaccaaaatgctgagcctgccagagctgctgctgtacccatcccgaagatttgaagaataccttaatcttctctacgctgtcaggcttcatacccctgcagagcatgttgaccgtggggacttgaccactgcaattgaccaaatcaaaaaatataaaggttatatagatcagactctatcagaagtaaacagatatctgattagggtacaagatgtagcccaacttcattgctgtgatgaagaaataagtttctctttaagtgtggcctgcagatctgtggactcagcatcaccagagagcttgccagaaatgcagaattctcaggccaccctagctctactcaatcagaatttgcattttaacaaaatcaccaggctctatgaacacatccatgatctcagccttttcctcttcaatgatgccctgctcgtttctagtcggggcacatctcacactccatttgagaggacttcaaaaacaacctaccagttcattgcatcagtggcccttcatcggttactcatagaaaatattccagattccaagtatgtcaagaatgcatttattcttcagggtccaaaatataaatggatttgtgctacagaaatagaggatgataagttcctatggctgtcagtacttcgaaatgcaatcaaaagcagtatggagaaggcatgtggccttgtatttacagggcagtttatgtttgacaccatgggtatgaccaacattctaaacaaccaagatactgcgcaagctctggcagatggattgatggagttgtcaaaagaagattctaaatgtggcaaaaagatcaaagatgttgaaggaaatgttattccaacaaaatgtgacccaaagacaacattcagtttattcatgaaggaaagaaatgttgtagaagacaattcttgggacacaaagtccaggctcagcaaaaatgatttaaattttgaagcactgattaatctggagagaatactccagaaggactcagcagaaaagcgagctagagttgtcagagaactcttacagagtgagagaaaatacgtgcagatactggaaattgtgagagatgtttatgtcgcaccactgaaagcagcattgtcatcaaacagagcgattctgagtgctgccaatatccagatcattttctgtgacattctacagattttaagtctcaacaggcagtttctagataacctgagagacagactgcaggaatggggcccagctcactgtgtgggagaaatagtcacgaagtttggaagccagttaaacacatataccaatttcttcaacaattaccctgtcattctgaaaactattgagaagcagtgggagacatttagtgaacgctcttcaagctcacaaactctgacccaatttgattctaacattgcaccagctgatcctgatactgctattgttcatccagttcccattcgtatgactccaagcaaaatccacatgcaggaaatggaacttaaaagaactggcagcgaaagcatggtaccagcatctgcttcttgtgaagcctcaggaaacttagaatcatggcagaaggcaaagtgggagccggtgtgtcacatgagcaaaggcacaacaccacttgctccaccacctaaaacctgttctgaagaagattaaaatcagaagatgaattaaggcccagaagttgatgaacatacacaaaagacgggtgtccttagctgctgttccttgcatcacaaccttcctattccccagatctgttgggaaagataagaaagctattcaggcatcaaattagacgtaataaggaaaccaacaccgttttggcccagattgaaatagcgaattgccagcaacaattaaaggatgttccttgaggagagaatttcccccggaagttccaactggaacaacttcgacccattcctcctcaccctataagcccaattgcccgttaactgtgaacatacttgtttttaagtggttttgggttcaaaagccaatttggagacctagacattcagctcactgcttaactcaacattaaattttatgattctgttttgccctatatgttcaccgttgtatttaagtatcttttattttttaatttcgacaataaaaaggtcaggatgggcgttttctgggagggtaggattgtgtttgttgggcacacccaccttttctgttccctaggcatctgggggatatggcaatgcttctatgggataatacccacacacccaattttaatttatagaatggggctccctcatttacatctcaggtcacaggactcagggaataaatgtcagtttgtccttttatgtttaatattttacataaagcatctataaaaatctttagaaagagtttcccatttaattttgattttaaagaattatattggataaggtggttttcaccataagctaatttactctctgcagccgtctacattcttcacaaatcatgtggtacattgaagcctcttttacatgtcaacttgtgacaaatacaaacatgtgagatttt

SEQ ID NO: 9993 - DNA, 454 bp, Homo sapiens
  SIMILAR (53)..(169): 971254mologous to Homo sapiens dJ44A20.2 (novel protein),accession number AL035086,Smith-Waterman Score=191.
gctgacgaattcggcacgagagaagattaagaaggcgaatcaacttttaaaagtgaaaagtctggagctggagcagccgccggccagtcagcatcagaaatccatgcacaaagacctggctgccatcttggaagagaagaagcaaggagggcccgccattggacgtcgtaatcgaatggaccgattctccagacttctccgtgtgggccttgccgctttgccaggagcttgctctcggtgctgtgcggaaggaggagcaccttattcacctgccgaaactctcgagcatctttattgaactctctagccggggtctccaggccctgggtcagatttctgcctataaatcacccaaccaggtccagttgctcccatatcttatagcctgtcatagcatgctggccatcttgttccatcagaccttcctcctgatagtctttgagagcaaggaggc

SEQ ID NO: 9994 - DNA, 369 bp, Homo sapiens
  SIMILAR (2)..(100): 1001254mologous to Homo sapiens dJ44A20.3 (novel protein similar to worm F32F2.1),accession number AL035086,Smith-Waterman Score=176.
cctgtgtggcaacctcatgcttgtggaggtgattccaaaagagccgctcagcttcagcgtcttccactacaagaatcccaagctgcagcacacagtccaggtagcagccgggccctggcctctccgcaaggcccctttgtgtaatgatgagtgctgtgtaccatgtggctttttgagagcgttctggccacatggtcatttcccatctcatcagagggtcctgttggtggtggaatcaagttgtctgactgtctacatctcgtcttggcaggccaaatcccagcaagacaaacgcctctgggttctgcacctaaagagactgattctggagaaccatgcagccaagattccagctaaggtaggacactg

SEQ ID NO: 9995 - DNA, 2561 bp, Homo sapiens
  SIMILAR (1833)..(2561): 1001254mologous to Homo sapiens dJ44A20.2 (novel protein),accession number AL035086,Smith-Waterman Score=1270.
tctagagaggaaggatctccccagctgtcttcagcaaggccgtctcctgcccagagaaatagtcagcctagcagttctaccatgatcagcgtgcttcgagcgggtggagctctcagaaacatctggaccgatcaccagatcaggcaagccttgtttcccagccgacggtccccgcaggagaatgaggatgatgaagatgattatcagatgttcgtgccgtcattttcctcctcagatctgaactctaccagactatgtgaagatagcacttctagtcgcccttgcagctggcatatgggacagatggagtccacagagacctccagctctggtcacaggattgtcaggcgggccagcagtgctggggagagcaacacatgccctcctgaaataggaactagtgacagaactagggaactgcagaacagccccaaaacagaagggcaggaggagatgactccctttgggtcatccatagagttgactattgatgacatagaccatgtctatgataacatcagttatgaggacttaaaactaatggttgctaagcgggaagaagctgaatccactccctctaaatcagccagggactccgttcgccccaagagcaccccagagttagccttcacaaagaggcaagctggccacagtaagggctctctttacgcacaaacagatggcaccctctcaggtggagaggcatccagccaaagcacgcatgaactccaagcggttgaggagaacatctattgacaccatagggctcccagatcctccgtcgctggggtttttaagtgcagcagccttaaagcgttgcaaagcgggacacctttttgggtctggaggccgacttcgtgtgctgtgacagcctgaggccatttgtttcccaagacagcctccagctcagtgaggacgaagccccttaccatcaggccactcccgatcatggttatctgagtttgctgtatgactctcccagtggtaacttgtctatgcctcataagcctgtatctgataaactgtccgaagaagtagatgaaatctggaatgacctggaaaattacatcaagaaaaatgaagacaaggccagagaccgtctcctggcagcgtttcctgtgagcaaggatgatgtgccagacaggctgcacgcagagagcacccctgagctgagccgggacgtggggcgctctgtgtccacgctgtccctgcctgagagccaggctctcctcacgcccgtgaagagcagggctggcagagccagccgcgccaactgcccctttgaggaagacctgatttctaaagaaggctcctttatgagccttaaccggctttctctggctagtgaaatgcccctcatggacaatccctacgacctggccaacagtggcctgtctcaaacagacccagaaaaccctgacctggggatggaggccacagataagacaaaaagcagggtgtttatgatggctcggcagtacagtcagaagattaagaaggcgaatcaacttttaaaagtgaaaagtctggagctggagcagccgccctggctgccatcttggaagagaagaagcaaggagggcccgccattggtatgtgcaccctgcccttcttccttctccaaagtaagaggggagaccacttcctgtgcccactaggctttccgtcagttgacatgatgactccttttctctttcttgtttatctgggcacaggacgtcgtaatcgaatggaccgattctccagacttctccgtgtgggccttgccgctttgccaggagcttgctctcggtgctgtgcggaaggaggagcaccttattcacctgccgaaaaaaagtactcccaggcaattgtccgcagcttgctctgtgccttctcttcaaacctctgaccctctgccaggctctgtgcagagatgcagcgtggtagtaagtcagcccaacaaagagaactggtgtcaggaccatctttacaactccttgggtcggaaagggatcagcgctaaatctcagccttatcacaggtcccagtcatcttcctccgtcttgatcaacaaatcaatggattccatcaactaccctagtgatgtgggaaagcagcagctgctgtctttacacagaagttcaaggtgtgagagtcaccaggacttgctgccagatattgctgactcgcatcaacagggcactgaaaaactctcagatctcacactccaagactcacagaaagttgtggtggtcaatagaaatttacccttaaatgcccaaattgcaacacagaattatttttccaatttcaaagagactgatggagatgaagatgactatgtggaaatcaagtcagaagaagatgagtcggagttggagctatctcacaatcgtagaaggaaatctgactcaaagtttgtggatgctgacttttctgataatgtctgcagcggcaacacattgcattctttgaatagtccgcgcactccaaaaaagccggttaacagcaaacttggcctttcaccatatctgacaccatataatgattctgacaaactgaatgactatctttggagg

SEQ ID NO: 9996 - DNA, 3475 bp, Homo sapiens
  SIMILAR (2628)..(3182): 991254mologous to Homo sapiens dJ44A20.2 (novel protein),accession number AL035086,Smith-Waterman Score=953.
ctatgatgtggtgcttgatgctatagacacaatgcagcgagtcgcctggcatatcaatgacatgaagcggaaacacgagcacgcggtccggttacaggagatacagagtttgctcactaactggaaggggccagacctgaccagctacggggaactggtgcttgagggaaccttccgcatccagcgagccaagaatgagcggacgctcttcctcttcgacaagctgctgctcatcacgaagaagagagatgacacgtttacatacaaagctcacatcctgtgtggcaacctcatgcttgtggaggtgattccaaaagagccgctcagcttcagcgtcttccactacaagaatcccaagctgcagcacacagtccaggccaaatcccagcaagacaaacgcctctgggttctgcacctaaagagactgattctggagaaccatgcagccaagattccagctaaggccaagcaagcaatccttgaaatggatgccattcatcatccaggcttctgttacagtcctgagggagggacgaaagcactgttcggctctaaagaaggttctgctccatatcggctgagaagaaaatctgaaccttcctcacggtcacataaagttttgaagaccagtgaaacagcacaagacatccaaaaggtttctagagaggaaggatctccccagctgtcttcagcaaggccgtctcctgcccagagaaatagtcagcctagcagttctaccatgatcagcgtgcttcgagcgggtggagctctcagaaacatctggaccgatcaccagatcaggcaagccttgtttcccagccgacggtccccgcaggagaatgaggatgatgaagatgattatcagatgttcgtgccgtcattttcctcctcagatctgaactctaccagactatgtgaagatagcacttctagtcgcccttgcagctggcatatgggacagatggagtccacagagacctccagctctggtcacaggattgtcaggcgggccagcagtgctggggagagcaacacatgccctcctgaaataggaactagtgacagaactagggaactgcagaacagccccaaaacagaagggcaggaggagatgactccctttgggtcatccatagagttgactattgatgacatagaccatgtctatgataacatcagttatgaggacttaaaactaatggttgctaagcgggaagaagctgaatccactccctctaaatcagccagggactccgttcgccccaagagcaccccagagttagccttcacaaagaggcaagctggccacagtaagggctctctttacgcacaaacagatggcaccctctcaggtggagaggcatccagccaaagcacgcatgaactccaagcggttgaggagaacatctatgacaccatagggctcccagatcctccgtcgctgggttttaagtgcagcagcctaaagcgtgcaaagcggagcacctttttgggtctggaggccgacttcgtgtgctgtgacagcctgaggccatttgtttcccaagacagcctccagctcagtgaggacgaagccccttaccatcaggccactcccgatcatggttatctgagtttgctgtatgactctcccagtggtaacttgtctatgcctcataagcctgtatctgataaactgtccgaagaagtagatgaaatctggaatgacctggaaaattacatcaagaaaaatgaagacaaggccagagaccgtctcctggcagcgtttcctgtgagcaaggatgatgtgccagacaggctgcacgcagagagcacccctgagctgagccgggacgtggggcgctctgtgtccacgctgtccctgcctgagagccaggctctcctcacgcccgtgaagagcagggctggcagagccagccgcgccaactgcccctttgaggaagacctgatttctaaagaaggctcctttatgagccttaaccggctttctctggctagtgaaatgcccctcatggacaatccctacgacctggccaacagtggcctgtctcaaacagacccagaaaaccctgacctggggatggaggccacagataagacaaaaagcagggtgtttatgatggctcggcagtacagtcagaagattaagaaggcgaatcaacttttaaaagtgaaaagtctggagctggagcagccgccggccagtcagcatcagaaatccatgcacaaagacctggctgccatcttggaagagaagaagcaaggagggcccgccattggtgccaggattgctgagtattcccagttgtatgaccagattgtattcagagagtctcccttgaaaattcagaaggatggctgggccagccctcaagaatcctccctcctgaggtctgtgtcaccttcccaggtccaccatggtagtggagactggcttctgcattcaacctatagtaatggagagttagcagatttctgtctcccaccagagcaagacttgaggtcaagatatcccacgtttgagatcaatacaaaaagtactcccaggcaattgtccgcagcttgctctgtgccttctcttcaaacctctgaccctctgccaggctctgtgcagagatgcagcgtgggtagtaagtcagcccaacaaagagaactggtgtcaggaccatctttacaactccttgggtcggaaagggatcagcgctaaatctcagccttatcacaggtcccagtcatcttcctccgtcttgatcaacaaatcaatggattccatcaactaccctagtgatgtgggaaagcagcagctgctgtctttacacagaagttcaaggtgtgagagtcaccaggacttgctgccagatattgctgactcgcatcaacagggcactgaaaaactctcagatctcacactccaagactcacagaaagttgtggtggtcaatagaaatttacccttaaatgcccaaattgcaacacagaattatttttccaatttcaaagagactgatggagatgaagatgactatgtggaaatcaagtcagaagaagatgagtcggagttggagctatctcacaatcgtagaaggaaatctgactcaaagtttgtggatgctgacttttctgataatgtctgcagcggcaacacattgcattctttgaatagtccgcgcacctccaaaaaagccggttaacagcaaacttggcctttcaccatatctgacaccatataatgattctgacaaactgaatgactatctttggagggggccatctcccaatcaacaaaatattgtccagtctctaagggaaaaatttcagtgtctcagttcaagcagctttgcttaaggttcttcataataactgcttgaatcaacttcttattttgctcataaaacagttacagatactgatgaggtgttttatgtataccagaattaaagacaattttgtaagaaccagaggtgtaaaatatact

SEQ ID NO: 9997 - DNA, 483 bp, Homo sapiens
  SIMILAR (347)..(478): 431254mologous to Caenorhabditis elegans contains similarity to TPR domains,accession number U64842,Smith-Waterman Score=114.
  misc_feature (1)...(483): n = a,t,c or g
gccccctttgaanccnctgataggataaccnttgaagggacacgccgatgctgtgctggctgcggggacggaggcggtgaagtgccatcttctgctaggtcgtcacttgctccggctcatggcatcaagtggcatccatcataagatcgttaactgaagacaatatgcaaaattctcacatggatgaatacagaaattctagtaatggcagcacaggcaacagttcagaggtaaagaaactgaaatggcaagtgctgtggaccttccagtgacgctgacagaaacagaagcaaatttccctccagaatatgaaaaattttggaaaactgtagaaaataatcctcaggattttacaggctgggtatatttgcttcaatatgtagaacaggagaatcacttgatggctgccaggaaggcatttgacagatttttcatacactatccgtattgctatggttactggaaaaagtatgcagaccttga

SEQ ID NO: 9998 - DNA, 1090 bp, Homo sapiens
  SIMILAR (1)..(273): 1001254mologous to Homo sapiens KIAA0423,accession number AB007883,Smith-Waterman Score=478.
atgagacaaaagagaaaagaagagaaagaactgtttcacaataaagattgtgaaaagaaggaaaaaaattcctgggaacgaatgagacatacaggaactgagaaaatggcatctgaaagtgaaacacctactggagctatttcacagtataaagaaaggatgccttctgtcactcatagtccagaaataatggatctgtcagaactacgaccattctctaaaccagaaatagcactgacagaagccctgaggcttttggctgatgaggattggataagcaactccatgcactggaacagctgctggcttcctgctacagcgggaccagacataccacaagcagcttccactgtgggcaccagggaatgtggtggcacccagaagcttggagatgccagcaactgcagaaccccaaagagagcctggaaaaagcaccataagttctcactccagtctgtggaactagcagcccactcccacaagcttcagtctgtccctggcttgaaggtgaaaaatttacgttctggagtttctcgtgctgctgtggtctgtttaagtgatcttttcacttatttgaaaaagagcatggatcaagagctagataccacagtaaaagttttgttgcacaaggctggtgaatcaaatacatttataagagaagatgttgacaaagcattgagagctatggttaataatgtaactcctgcacgtgcagttgtttctcttatcaatggtggacaaagccatttacacattgctgtaagaaggtgtacagcccagcatttatcagatgtattggaatttatggaaccagaacgtattttatctgcagcaaaggatatggctgaacgcatattaccagctgctgctaagtttgctcaagacagttcacaagaaaccaggtattatggtcgaaagatgctgttcttcatgatgtgtcatcctaactttgaaaaaatgcttgaaaagtatgtcccatctaaagatttgccatatattaaggactctgttagaaacttacagcaaaaggtatgtgggaaaagtttgttttataaacagctttataagcaaagcttgtttttacatccag

SEQ ID NO: 9999 - DNA, 669 bp, Homo sapiens
  SIMILAR (239)..(346): 421254mologous to Lycopersicon esculentum cell wall hydroxyproline-rich glycoprotein,accession number M11759,Smith- Waterman Score=74.
ctatatctccaggcttaactcatactgagaggtgacaacgtgctggcagtcctcacggccgtcgctccctctcggcgcctcgtctgcctgggctcccactttggcggcacttgaggagcccttcagcccgccgctgcacttgtggaagcccctttctgggctgggccagcagctgctgtgctcaatttctccccgggccttagctgccttcccgtggggcagggctcgggacctgcagcccgccatgcctgaacctccccccgctcctccgtgggctcctgtgcggcctgagcctccccgacgagcgccgccccctgctccacgcacccagtcccatcgaccacccaagggctgaggagtgcgggcgcacagcctgggactggcaggcagctccacctgcagctctcctgcgggatccactgggggaagccagctgggcttctgagtctggtggggacggtagagaacctttatgtctagctcagggattgtaaatacaccaatgggcactctgtatctagcttttccatctctgtaaacagctctaccatcgacccagttaccaaagccagaagcctgagagtcattcttgacttctccctttccgtcatcccccacatccaattcatcagcaggccctgtcaattctctctccaaaatatacctcat

SEQ ID NO: 10000 - DNA, 801 bp, Homo sapiens; identical to SEQ ID NO: 6226
  SIMILAR (1)..(168): 1001254mologous to Homo sapiens Neuron-associated protein,accession number B01398,Smith-Waterman Score=298.

SEQ ID NO: 10001 - DNA, 1278 bp, Homo sapiens; identical to SEQ ID NO: 68
  SIMILAR (905)..(594): 341254mologous to Plasmodium falciparum merozoite surface protein 2,accession number AF217014,Smith-Waterman Score=118.

SEQ ID NO: 10002 - DNA, 3918 bp, Homo sapiens
atagaccaataacaggagctgaaattgtggcaataatcaatagcttaccaaccaaaaagagtccaggactagatggattcacagccgaattctaccagaggtacaaggaggaactggtaccattccttctgaaactattccaatcaatagaaaaagagggaatcctccctaactcattttatgaggccagcatcattctgataccaaagccgggcagagacacaacaaaaaaagagaattttagaccaatatccttgatgaacattgatgcaaaaatcctcaataaaatactggcaaaccgaatccagcagcacatcaaaaagcttatccaccatgatcaagtgggcttcatccctgggatgcaaggctggttcaatatacgcaaatcaataaatgtaatccagcatataaacagaaccaaagacaaaaaccacatgattatctcaatagatgcagaaaaagcctttgacaaaattcaacaacccttcatgctaaaaactctcaataaattaggtattgatgggacgtatttcaaaataataagagctatctatgacaaacccatagccaatatcatactgaatgggcaaaaactggaagcattccctttgaaaactggcacaagacagggatgccctctctcaccactcctattcaacatagtgttggaagttctggccagggcaattaggcaggagaaggaaataaagggtattcaattaggaaaagaggaagtcaaattgtccctgtttgcagatgacatgattgtatatctagaaaaccccattgtctcagcccaaaatctccttaagctgataagcaacttcagcaaagtctcaggatacaaaatcaatgtacaaaaatcacaagcattcttatacaccaacaacagacaaacagagagccaaatcatgagtgaactcccattcacaattgcttcaaagagaataaaatacctaggaatccaacttacaagggatgtgaaggacctcttcaaggagaactacaaaccactgctcaaggaaataaaagaggatacaaacaaatggaagaacattccatgctcatgggtaggaagaatcaatattgtgaaaatggccatactgcccaaggtaatttacagattcaatgccatccccatcaagctaccaatgactttcttcacagaattggaaaaaactactttaaagttcatatggaaccaaaaaagagcccacatcgccaagtcaatcctaagccaaaagaacaaagctggaggcatcacactacctgacttcaaactttactacaaggctacaataaccaaaacagcatggtactggtaccaaaacagagatatagatcaatggaacagaacagagccctcagaaataacgccgcatacctacaactgtctgatctttgacaaacctgagaaaaacaagaaatggggaaaggattccctatttaataaatggtgctgggaaaactggctagccatatgtagaaagctgaaactggatcccttccttacaccttatacaaaaatcaattcaagatggattaaagatttaaacgttagacctaaaaccataaaaaccctagaagaaaacctaggcattaccattcagaacataggcatgggcaaggacttcatgtccaaaacaccaaaagcaatggcaacaaaagacaaaattgacaaatgggatctaattaaactaaagagcttctgcacagcaaaagaaactaccatcagagtgaacaggcaacctacaaaatgggagaaaattttcgcaacctactcatctgacaaagggctaatatccagaatctacaatgaactcaaccaaatttacaagaaaaaaacaaacaaccccatcaaaaagtgggcaaaggacatgaacagacacttctcaaaagaagacatttatgcagccaaaaaacacatgaaaaaatgctcatcatcactggccatcagagaaatgcaaatcaaaaccacaatgagataccatctcacaccagttagaatggcaatcattaaaaagtcaggaaacaacaggtgctggagaggatgtggagaaataggaacacttttacattgttggtgggactgtaaactagttcaaccattgtggaagtcagtgtggcgattcctcagggatctagaactagaaataccatttgacccagccatcccattactgggtatatacccaaatgactataaatcatgctgctataaagacacatgcacacgtatgtttattgcggcattattcacaatagcaaagacttggaaccaacccaaatgtccaacaatgatagactggattaagaaaatgtggcacatatacaccatggaatactatgcagccataaaaaatgatgagttcatgtcctttgtagggacatggatgaaattggaaatcatcattcttagtaaactatcacaagaacaaaaaaccaaacaccgcatattctcactcataggtgggaattgaacaatgagatcacatggacacaggaaggggaatatcacactctggggactgtgtaacaagttttgtgcagattgccagtctaaaggtagcgcatcccacctggcgggccaggggtccagccgcgccggggtggtgggggtgggctgcgtgatgagccagatctgcctcagctgtggccatccgtcagcgtaaggttgctctggtggtcgtcttcagtttgtccagctcttccccttatcccccatcctccctgctgaggtgtgtgggcgcacagcgcgggactggcgggcagctccacctgcagccccagtgcgagatccactggatgaagccagctgggctcctgagtctggtggggccttggagaacctttatgtctagctcagggattgtaaatacaccagtcggcactctgtgaatctgggggtgcacatatccagggtaaagtcagttaacctcgaccagtggactcaagaacagattcaggtacttagcccaagagtgagtcagctgcttccatatatctatgtaaaaggaattccagatgaatttgtttttgagaaggtgaaaatggtaagttgggaagtatttgcactgtatggacagcctcaggtatgtgtatatttgtgaaagggaatggatttgttgggccttggtaagagttggacttttcagcttccatgttcttacaaattttgataaattctcagtgaccctggtctgttggcctctgttccatccccttcttcttccggttccagaaaggtgagtcttgtgggctcctcaggattaaagaacattctgaaatgggtgattttgatatcttaatcggagccagggagcaaatcagaagaaataggcaagaaacagctctctaaagactccattctttcactgtatggatcccagacgcctcaaatgcctactcaaggtagatttcatgggtgtcatggccatgtgccaggtagagacatgagggcttccatgcaggaattacctcctaacagcataatggggagcatgatgcctccaccagtaggcatggttgctcagccaggagcttctgggatggttgcccccatggccatgcctgcaggctatatgggtggcatgcaggcatcaatgatgggtgtgccgaatggaatgatgaccacccagcaggctggctacatggcaggcatggcagctatgccccagactgtgtatggggtccagccagctcagcagctgcaatggaaccttactcaggtaagctaccccattttacttgcagcaagagttttgagccttcctcaagtttttctcggtttgtcaatgagtggcggaaatggacaggcagcaaatcagactctcagtcctcagatgtggaaataaaaacaaaacacctgtatggctgccattctcttcagccctcgctctcccctttccacagcctcca

SEQ ID NO: 10003 - DNA, 722 bp, Homo sapiens
  SIMILAR (356)..(475): 801254mologous to Homo sapiens unnamed protein product,accession number AK000673,Smith-Waterman Score=172.
aatagttggtttgctagtcacattgctacgtcttattgcatttttggtcagacgctgtcattgatgctctaatgggtctgtgccctatggtctgtaacccaaagcctgcccacacaacccggtcagaatgcagggactgctgcgctttgaagatcaagactctgcacgtggggatcagaacattgccatgttctatccaacctccacccaaatggtaatggtagattatttaaacaaaattccagtaattagtatttctaaggttcaccggataacacagtgttgcctctctgttaagaaataattaaatatttgaagtacagtttgctgttttcttcttaggtttatcggcgggggcttcaggcacatccctcttagtgttgacctttggatacattatataaaaatcttaaaagaaacattggaccctggtgatcctgagacaaacaatacaataagagggtatgtggaacattgatactgaaatgttttttatgatataaataattattctgatgttgataatagagctcatgaaagctaagctggaagtttaacttctattccattgttaaaaaaatgatacatgtaataaacttaagctttatgatttgaaaatgcagataataaagccctcctacagtccatgcctcttatgtccccaattccactcctcaaggttaatagcttggggtgtgttctttcagatatatgtataagta

SEQ ID NO: 10004 - DNA, 812 bp, Homo sapiens
  SIMILAR (639)..(788): 901254mologous to Homo sapiens Human secreted protein, SEQ ID NO: 7141,accession number G03060,Smith-Waterman Score=235.
gtgcctcctctgcctgggctcccactttggcggaaattgaggagaccttcagcccaccgctgcactgtgggagcccctttctgggctggccaaggccggagcccgctcccttagcttgcagggaggtgtggggggagaggcacgagcgagaaccagggctgcgcgtggcgcttgcgggccagctgcagctccgggtgggcatgggcttggcggccacgcactcggagcagccggccggccctgctggccctgggcaggttagggacctgcagcctgccatgcctgagcctcccaccctctccgtgggctcctgtgccgcccgagcctccccgatgagtgccgccccatgctccagggcgcccagtcccatcggccacccaaaggctgaggagtgcgggcgcacagcgcaggactggcaggcagctccacctgtagccccagtgcgggatccactgggtgaagccagctgggctcctgagtctgggtttgtgaatgcaccaatcggcactctttatctagctactctggtagggccttggagaacctttatgtctagctcagggattgtaaatacaccaatcggcactctgtatctagctcaagtctgcagcttcactcctgaagccagcgagaccacgagcccaccgagaggaacgaacaactccagacgcaccgccttaagagctgtaacactcactgcgaaggtctgcagcttcactcctgagccagcgagaccacgaacccaccagaaggaagaaactccgaacacatccgaacatcagaaggaacaaactccagacgtgctaccttaa

SEQ ID NO: 10005 - DNA, 477 bp, Homo sapiens
  misc_feature (1)...(477): n = a,t,c or g
gagtgcaccagtcgacactctgtatctagctgctctggtggggcctcggagaacctttatatctagctcagggattgtaaatacacccatcggcactgtgtatctagctcaaggtttataaacacaccaatcaacaccctgtgtctagctcagggtttgtgagtgcaccaatcaacactctgtatctagctgctctgggtggggggccttgggagnaacttttgtgttcaatactctgtatctaactaatctgatggggacgtggagaacctttgtatctagctcagggattgtaaatgtaccaatcagcaccctgtcaaaacaggccacttcggctctaccaatcagcaggatgtggggtggggccagattaagagaataaaagcagggctgcccgagccagccagtggcaactcgctcgggtccccttccacgctgtgggagctttgttctttgcaataaatcttgctactgctc

SEQ ID NO: 10006 - DNA, 4537 bp, Homo sapiens
  SIMILAR (829)..(1029): 541254mologous to Escherichia coli 2,4-dienoyl-CoA reductase,accession number U93405,Smith-Waterman Score=179.
cggagaaagctccaaaagcaagccctgggccctgaacaaaatctagagacattattaaacctggcaacctcggtgttctataatagggaccaagaggaacaggtccaaaaggaaaagcgagatcagagaaaggccgcagccttagtcatggccctcagacaaacaaaccttggtggttcagagaggacagaacatgaagcaggccaatcacctggtaaggcttgttatcagtgtggtttactgggacactttaaaaaagattgtccaatgagaaacaagctgccccctcgtccgtgtccactatgctgaggcaatcactggaaggtgcactgccccagaggatgaaggttccctgggtcagaagcccccagccagacgatccaacaacaggactgagggtgcctggggcaagcgccagctcatgtcatcaccctcactgagccccgggtatgtttaactattgagggccaggaaattgacttcctcctggacactggcgcggccttctcagtgttaatctcctgtcctggacgactctcctcaacctccgttaccatccaaggaatcctgggacagcctgtaaccaggtatttctcccacctcctcagttgtaattgggagactttgctcttttcacatgcctttcttcttatgcctgaaagacccacagggttattagggagggatatattagccaaggctggagctattatctacatgaatatggggaacaagttacccatttgttgtcccctacttgaggagggaatcaaccctgaagtctgggcattggaaggacaatttggaagggcaaaaaatgcccacccagtccaaatcaggttaaaagatcccaccacttttccttatcaaaggcaatatccctaaggcctgaagctcataaaggattacagaatattgttaaacatttgaaagctcaaggcttagtaaggaaatgcagcagtccctgcaacaccccaattctggaagtacaaagaccgagactagtgcaagatcttagactcattaatgaggcagtaatttcactatatccagttgtacccaacccctataccctgctctctcaaataccagaggaagcagaatggttcacagttctggacctcaaggatgccttcttctgtgttcccctgcactctgattcacagttcctctttgcttttgaggatcccacaaaccacacatcccaacttacatggatggtcttgccccaagggtttagggatagccctcatctgtttggtcaggccctagccaaagatctaggccacttctcaagtccaggcactctggtccttcaatatgtggatgatttacttttggctaccagttaggaagccttgtgccagcaggctactctagatctcttgaactttctagctaatcaagggtacaaggtgtctatgtcgaaggcccagctttgcctacagcaggttaaatatctaggcctaatcttagccaaagggaccagggccctcagcaaggaatgaatacagcctatactggcttatcctcgccctaagacattaaaacagttgagggagttccttggaattaccagcttttgccgactatggatccctggatacagcgagacagccaggcccctctaatcaaggaaacccagagggcaaatactcatctagttgagtgggaaccagaggcagaaacaaccttcaaaaccttaaagcaggctctagtacaagctccagctttaagccttcccacaggacagaatttctctttatatgtcagagagagagccaggatagctcttggagtcctcactcaaactcatgggacaaccccacaaccagtggcatacctaagtaaggaaattgatgtagtagcaaaaggctggcctcactgtttaagggtagttgcagcagtggccgtcttagcatcagaggctatcaaaataatacaaggaaaggatctcactgtctagactacttatgatgtaaatggcatactaggtgccaaaggaagtttatggctatcagacaactgcctacttagataccaggcactactccttgagggaccagtgcttcaaatatgcacatgcatggccctcaaccctgccacttttctcccagaggatggggaaccaatcaagcatgactgccaacaaattatagtccagacttatgccgcccgagatgatctcttagaagtccccttaactaatcctgaccttaacctatatactgatggaagttcatttgtggagaatgggatacgaaggttagtgatgtaaccatacttgaaagcaagcctcttcccccagggaccagtgcccagttagcggaactagtggcacttacctgggccttagaactgggaaagggaaaaagaataaatgtgtatacagatagcaagtatgcttatctaatcctacatgcccatgctgcaatatggaaagagagggagttcctaacctctgtaggaacccccattaaataccacaaggaaattatagagttattgcacgcaatgcaaaaacacaaagaggtgggaatcttacactgacaaagccatcagaataggaaggagaggggagaacagcagcataagcagctggcagaggcagcagaaaggaaagaaagagacaggaagtcaaagaaagagacagagaggaagagacaagaagttagagagaaagagggacagacacagaagtcaaagagagggtaaaaaagagaggaagagacaaagaagaagtcaaagagagagatggaagtagtaaagaaaaaacagtgtacctattcctttaaaagccagggtaaatttctctctacccacgcaaggcaattctctattggatctcaacccatatctgcctctcaaacagttgaagaaataatgaaatctatccttactttacaatcccaaataagactctttggcagcagtgactctccaaaaccgctgaggcctagatctcctcactgctgaaaaaggaggactctgcaccttcttaggggaagagtgttgtttttacactaaccagtcagggatagcatgagatgccacccagcgtttacaggaaaaggcttctgaaatcagacgcctttcaaattcttataccaacctctggagttgggcaacatggcttctcccctttctaggtcccgtggcagccatcttgctgttactcgcctttgggccccgtatttttaaccttcttgtcaaatttgtttggtctagaatcgaggccatcaagctacagatggtcttacaaatcgaaccccaaatgagttcaactaacaacttctaccgaggacccctggactgaccagctggcacttcccctggcctagagagttcccctctgaaggacactacaactgcaaagccccttcttcgcccctatccagcaggaagtagctagagcagtcatcggccaaattcccaacagcagttggggtgtcctgttgattgaggggtgacagcatgctggcagtcctcacagccctcactcgctcgctcactctcggcacctcctctgcctgggctcccactttggcagcacttgaggagcccttcagcccgccactgcactgtgggagcccctttcagggctggccaaggccggagccggctccctcagcttgcggggaggtgtggagggagaggcgcggtgggaaccagggctgcacgcggtgcttgcgggccagcgcgagttccgggtgggcgtgggctctgtgggccccgcactcggagccgccggctagccccgccagcctgggcagtgaggggcttagcacctggaccagcagctgctgtgctcgatttctcactgggccttagctgccttcctgcggggcagggctggggacctgcagcccgccatgcctgagcctcccccctcccctccgtgggttcctgcgcagtccgagcctccccgatgagcgccgccccgctgctccatggcacccagtcccatcggaggcccaagggctgaggagtgcctttggagcagggcacgggactggcaggcagctctacctgcagcccctgtgcaggatccactgggtgaaagccagctgggctcctgagtctggtggggacttggagaacctttatgtctagctaagggattgtaaataaaccaattggcactctgtatctagctcaaggtttgtaaacacaccaatcagcaccttgtgtctagctcagggtttgtgaatgcaccaatagacactctgtatctagctactctggtggggacttggaaaacctttttgtcaacactctgtatctagttaatctggtggggacatggagaacctttgtgtctagctcagggattgtaaacgcaccaatcggcaccctgtcaaaacagaccacttgactctctgtaaaatggaccaatcagcaggatgtgggtggggcgagacaagagaataaaagcaggctgcctgagccagcagtgacaacccccctcgggtcccctcccacgccgtggaagctttgttctttcgctctttgcaataaatcttgctgctgctcacaa

SEQ ID NO: 10007 - DNA, 5254 bp, Homo sapiens
cgcagtcgtccttccgccccagagaccgatgatagtcgagttgggggcattatgagaggagagaaaaactactacttccgtggagctgcgggggaccacggttcctgccccactacaacttcgcctctggcctcggccctcttgatgccctcggaggcagtctcaagcagctggtctgagtctggaggcggtttgtcagggggagatgaagaggacactcggctccttcaactcctccgcactgcccgggatccttctgaggccttccaggctttgcaagctgctttgccgcggcggggcggtcgacttggcttcccccgacgcaaggaagctttgtatcgggcactgggccgagtgcttgtggaaggaggtagtgatgagaagcggctctgcttgcaacttctctcggacgttctccggggtcagggggaggcaggccagcttgaagaggcctttagcttagcacttttgcctcaactagttgtctcgttacgggaagagaatccagccctgcggaaagatgcgctgcagatccttcatatatgtctgaaacgtagtcctggagaggtgctgagaacgcttatacaacaaggactggaaagtaccgatgcccgacttagagcttccacagcactactgcttcccatcttgcttactactgaggacttgttgcttggtctggatctcaccgaggtgataatatccctagcccgaaagcttggtgatcaggagacagaagaagaatctgagacagctttctccgcacttcaacaaattggggagcgacttggccaagacaggtttcaatcttacatttctcgtctgccctctgccctgaggagacactacaatcgccgcctggagtcccagtttggaagtcaggttccttattatttggaacttgaagcctctggatttcctgaagatccccttccctgtgcagtgactctttccaacagcaatcttaaatttgggattattcctcaggagctgcattcacgattattggatcaggaagactataagaaccggacccaggccgtcgaagaactaaagcaggtgctgggaaaatttaaccctagttctactcctcattctagtcttgttggcttcattagtttgctatataatttgttagacgattctaacttcaaagtggtgcatggcacacttgaagtcctgcatttactggttattcgccttggagagcaggtacagcagttcttgggaccagttatagcagcttctgtcaaagtgctggcggacaacaagttggtgatcaaacaagaatacatgaaaatcttcctcaagctaatgaaggaagtaggacctcagcaggtgctttgtttactcctgaaacatctcaaacataagcattccagagtgagagaggaggtggtgaacatttgcatctgctccctgctgacctatcctagtgaggattttgacttgcccaaactgtcctttgatcttgccccagctcttgtagatagcaaacgcagggtacgccaagcagctttagaagcttttgccgtattggcatcatcaatgggctcaggtaaaaccagcatcctttttaaagctgtggatacagttgaactgcaagataatggagatggagtgatgaatgctgtgcaggccagattggctaggaaaaccttaccaaggctcacagagcagggatttgtggaatatgcagtactgatgccatcttctgccgggggtaggtcaaaccatttggcacatggagcagatacggactggcttttggctggtaacagaactcagagtgcacactgtcactgtggtgaccacgtgagggatagcatgcacatttatggatcttacagcccaactatctgtacccgaagggtattaagtgcaggaaaaggaaaaaataaattaccatgggaaaatgagcaacctggaatcatgggagaaaaccagacctccacttccaaggatatagagcagttttcaacatatgatttcatcccatctgcaaaattaaagctttctcaaggaatgccagtcaatgatgatttatgttttagcagaaaaagagtatcaagaaacttatttcagaatagtcgggattttaacccagattgtcttcctttatgtgctgctggtactactgggactcatcaaacaaatctttctgggaaatgtgcacaacttggattttcacaaatatgtggtaaaactggcagtgtgggttctgacttacaattcctagggacaactagcagtcatcaagaaaaagtgtatgctagcctcaattttggcagtaagacacagcaaacatttggtagtcaaacagagtgtacttcctcaaatggtcaaaatccaagtccaggagcttacatccttccatcctatcctgtctcatcacctcgaactagtccaaagcatacatctcctcttattatatctccaaagaagtctcaagataattctgttaatttctcaaattcctggcctcttaaaagcttcgaaggactatcaaagccaagtccacagaagaagcttgtcagccaaaaatcgtctgatcctacgggtagaaatcatggagaaaattctcaagaaaaacctccagttcagcttacacctgccttggtgagatcgccatcttcccgacgaggtctaaatgggacaaagcctgttcctcccataccaaggggaataagccttttgcctgataaagctgatttaagcacagtgggacacaaaaagaaagagcctgatgatatttggaagtgtgaaaaagatagtcttccaattgatctttcagaattaaatttcaaggataaagatttggatcaagaagagatgcatagctctcttaggtcccttcgtaatagtgcagctaagaaaagagcaaaactgagtggcagtactttagatcttgaaagccctgattctgcaatgaagctcgacttgacgatggactccccgtctctgtcttcctcaccaaacatcaattcttacagtgaaagtggagtttacagccaagaatcattgacttcttctctgtctacaactccccaggggaagagaataatgtcagacatatttccaacatttgggtcaaaaccttgtccaacaagactttcttctgcaaagaaaaaaatttctcatattgctgaacaaagccccagtgcagggtcatcatcaaatccacagcaaatttccagttttgacttcacaaccacaaaggctttatcagaagactcagtagtagttgttggaaaaggcgtatttggaagtttaagttcagcaccagcaacctgcagccaatcagtgatatcttctgtggaaaatggggatacattttcaattaaacaaagtattgaaccaccatcagggatttatggaagatcagtccagcaaaatatttcatcatatcttgatgttgagaatgaaaaagatgctaaagtttctatttctaaatctacttataacaagatgagacaaaagagaaaagaagagaaagaactgtttcacaataaagattgtgaaaagaaggaaaaaaattcctgggaacgaatgagacatacaggaactgagaaaatggcatctgaaagtgaaacacctactggagctatttcacagtataaagaaaggatgccttctgtcactcatagtccagaaataatggatctgtcagaactacgaccattctctaaaccagaaatagcactgacagaagccctgaggcttttggctgatgaggattgggagaagaaaattgagggactgaattttattagatgcttagctgcttttcattctgagatactgaacacaaagttgcatgaaacaaattttgcagttgttcaagaggtgaaaaatttacgttctggagtttctcgtgctgctgtggtctgtttaagtgatcttttcacttatttgaaaaagagcatggatcaagagctagataccacagtaaaagttttgttgcacaaggctggtgaatcaaatacatttataagagaagatgttgacaaagcattgagagctatggttaataatgtaactcctgcacgtgcagttgtttctcttatcaatggtggacaaaggtattatggtcgaaagatgctgttcttcatgatgtgtcatcctaactttgaaaaaatgcttgaaaagtatgtcccatctaaagatttgccatatattaaggactctgttagaaacttacagcaaaagggtttgggggagataccattagatactccttcagcaaaaggaagacgatctcatactggcagtgttggaaatacaagatcatcatctgtttctagagatgctttcaattcagctgaaagagctgtaactgaagttcgtgaagtcaccagaaaatcagtccctcgtaattccttagaaagtgctgagtaccttaaactcataactggcttattaaatgcaaaagactttcgtgatcgtattaatgggattaagcagcttttatcagatacagaaaataatcaagaccttgttgttggaaacattgtgaagatttttgatgcttttaaatctcgacttcatgattctaatagtaaagtaaatctggtggctctggaaacaatgcacaaaatgattcctctacttagagaccacttatctcctataatcaacatgctaattccagcaatagtggataacaatctgaattccaagaatccaggcatctatgcggctgctacaaatgttgttcaggcactgagtcagcatgtagacaattacttacttctacagccattttgcacaaaagctcagtttttaaatggaaaagcaaaacaggacatgacggaaaagcttgctgatattgttacggaactttatcaaaggaagccgcatgccacagagcagaaagtgttggttgttttatggcatctcttaggaaatatgacaaatagtggctctctgcctggagctggaggaaatatacgaacagccacagctaaattatcaaaagcactctttgcacagatgggtcagaatctgttaaatcaggctgcatctcaaccaccacatatcaaaaagagtttggaggaattactcgatatggacaattttaaatgaattatgaatcttcgataaaatactgtatgatgaacaaaagtgtttacatgatgacaaatggaactttctaaaagttatgttatcagcgcctgcacttcacatccagcaaattaagtcaatggctatttttatttgcagcctatgagtacacatctgtcctatatcaacc

SEQ ID NO: 10008 - DNA, 2457 bp, Homo sapiens
  SIMILAR (746)..(366): 751254mologous to Escherichia coli Rod protein flgF,accession number D90744,Smith-Waterman Score=418.
tgaaattcttctctgtccatccttacccttcaactgtcagtatattcttgttcttcttggaagcagaataagagctcgggaaccgccaatggcagtacaagctgtaacacagggtccaccaaaatatactaaatctgttctgaaaaagggagataaaaccaactttcccaaaaagggagatgttgttcactgctggtatacaggaacactacaagatgggactgtttttgatactaatattcaaacaagtgcaaagaagaagaaaaatgccaagcctttaagttttaaggtcggagtaggcaaagttatcagaggacatgtagctaggaagtttttagatgatgaagcagaactttctgaagaagatgcagaatatgtttcatcagatgaaaatgatgagtcagaaaatgaacaagattcctcattacttgactttttaaatgatgaaactcaactttcacaggctataaatgcttggtttgcctgtaaatcaccatcaatcatctgtgtagatgatgaagttgtatcttctgtatgtgctttcttttcctctggttcttctgatctatataaaacgtcagaatggaaactttcaaaactcccacagtttcttgcagaacataaattattaggaaacattaaaaatgtggccaagacagctaacaaggaccacttggttacagcctataaccatctttttgaaactaagcgttttaagggtactgaaagtataagtaaagtgtctgagcaagtaaaaaatgtgaagcttaatgaagataaacccaaagaaaccaagtctgaagagaccctggatgagtttattcagttgcgaagggaattagcttctgtaaatggtcatagtggtgatgatggtcctcctggtgatgatctaccatcgggaattgaagacataaccgatcctgcaaaggtaaccagtcttattctaaagttcgtcagtggccagctaattacagaaatagaaaacatgagacatagaatcattgagattcatcaagaaatgtttaattataatgagcatgaagttagtaaaaggtggacatttgaagaaggtattaaaagaccttactttcatgtgaaacctttggaaaaggcacaactaaaaaactggaaagaatacttagaatttgaaattgaaaatgggactcatgaacgagttgtggttctctttgaaagatgtgtcatatcatgtgccctctatgaggagttttggattaagtatgccaagtacatggaaaaccatagcattgaaggagtgaggcatgtcttcagcagagcttgtactatacatctcccaaagaaacccatggtgcatatgctttgggcagcttttgaggaacagcagggtaatattaatgaagccaggaatatcttgaaaacatttgaagaatgtgttctaggattggcaatggttcgtttacgaagagtaagtttagaacgacggcatggaaatctggaagaagctgaacatttgcttcaggatgccattaagaatgccccatcatatatatgagatcttcattttatgctgtcaaactagcccggcatcttttcaaaatacagaaaaaccttccaaaatcaagaaaggtgcttttggaagcaatcgaaagagacaaagagaacacaaagttatacctcaatttacttgaaatggaatatagtggtgacctcaaacaaaatgaagaaaatatcctaaattgttttgacaaagctgtacatggttcattacctattaaaatgagaattacattttctcagagaaaagtggaatttcttgaagattttggttccgatgttaataaagctgtaactgaagttcgtgaagtcaccagaaaatcagtccctcgtaattccttagaaagtgctgagtaccttaaactcataactggcttattaaatgcaaaagactttcgtgatcgtattaatgggattaagcagcttttatcagatacagaaaataatcaagaccttgttgttggaaacattgtgaagatttttgatgcttttaaatctcgacttcatgattctaatagtaaagtaaatctggtggctctggaaacaatgcacaaaatgattcctctacttagagaccacttatctcctataatcaacatgctaattccagcaatagtggataacaatctgaattccaagaatccaggcatctatgcggctgctacaaatgttgttcaggcactgagtcagcatgtaggagacacatcaaggatgtttaggagaacaaagagctatgacagcctgctgactaccttaattggcgctggaatccgaattcttttcagttcctgccaagaagaaaccgcagatttgctaaaggaactgtctttagtggaacaaagaaagaatgttggtattcatgttccaacagtggtgaatagtaataaaactcacttcaagaaatctccatgtatgcacaagtaa

SEQ ID NO: 10009 - DNA, 3414 bp, Homo sapiens
  SIMILAR (2593)..(3372): 981254mologous to Homo sapiens unnamed protein product,accession number AK001990,Smith-Waterman Score=1319.
gtcgactctagaggatccccgggtaccgagctcgaattctccaaatttacagatgacactacatacttctgggtagtgagatgccaagtcacagggatgaacttcatgaaaacggcacaagactgtgtgagtgggcagaaaagtggcagaagaacttcattatgggcaaatgtaaggtattatggtcgaaagatgctgttcttcatgatgtgtcatcctaactttgaaaaaatgcttgaaaagtatgtcccatctaaagatttgccatatattaaggactctgttagaaacttacagcaaaagggtttgggggagataccattagatactccttcagcaaaaggaagacgatctcatactggcagtgttggaaatacaagatcatcatctgtttctagagatgctttcaattcagctgaaagagctgtaactgaagttcgtgaagtcaccagaaaatcagtccctcgtaattccttagaaagtgctgagtaccttaaactcataactggcttattaaatgcaaaagactttcgtgatcgtattaatgggattaagcagcttttatcagatacagaaaataatcaagaccttgttgttggaaacattgtgaagatttttgatgcttttaaatctcgacttcatgattctaatagtaaagtaaatctggtggctctggaaacaatgcacaaaatgattcctctacttagagaccacttatctcctataatcaacatgctaattccagcaatagtggataacaatctgaattccaagaatccaggcatctatgcggctgctacaaatgttgttcaggcactgagtcagcatgtagacaattacttacttctacagccattttgcacaaaagctcagtttttaaatggaaaagcaaaacaggacatgaccggaaaagcttgctggatattgttacggaactttatcaaaggaagccgcatgccacagagcagaaagtgttggttgttttatggcatctcttaggaaatatgacaaatagtggctctctgcctggagctggaggaaatatacgaacagccacagctaaattatcaaaagcactctttgcacagatggggtttgtgaatgcaccaatcgacactctgtatctagctactctggtggggccttggagaacctttatgtctagctcagggattgtaaatacaccaatcggcactctgtatctagctcaagggacactgacgcatgcgcatcgtgccctggaccaggcggccgtggcgcgggtggcggctgctgtgctggctgtggggacggaggcggtgaagtgccatcttcggctaggtcgtcacaggctccggctcatggcatcaagtggcatccatcataagatatggtcaaatccaagatcgttaactgaagacaatatgcaaaattctcacatggatgaatacagaaattctagtaatggcagcacaggcaacagttcagaggtagtggtagaacatcctactgatttcagtactgagattatgaacgttacagaaatggaacagtcacctgatgactctcccaatgtgaatgcatctacagaagaaactgaaatggcaagtgctgtggaccttccagtgacgctgacagaaacagaagcaaatttccctccagaatatgaaaaattttggaaaactgtagaaaataatcctcaggattttacaggctgggtatatttgcttcaatatgtagaacaggagaatcacttgatggctgccaggaaggcatttgacagatttttcatacactatccgtattgctatggttactggaaaaagtatgcagaccttgaaaagcggcacgacaacattaaaccatcagatgaggtttatcggcgggggcttcaggcaatacctcttagtgttgacctttggatacattatataaacttcttaaaagaaacattggaccctggtgatcctgagacaaacaatacaataagaggaacttttgagcatgctgttctagctgcaggaacagatttccgttctgacagactgtgggaaatgtatataaactgggaaaatgagcagggaaacctgagagaagttacagctatatatgatcgtattcttggtattccaacacagctgtatagtcatcattttcagagatttaaagaacatgtacagaataatttgcctagagatcttttaactggtgaacagtttattcagttgcgaagggaattagcttctgtaaatggtcatagtggtgatgatggtcctcctggtgatgatctaccatcgggaattgaagacataaccgatcctgcaaagctaattacagaaatagaaaacatgagacatagaatcattgagattcatcaagaaatgtttaattataatgagcatgaagttagtaaaaggtggacatttgaagaagagaattaaaagaccttactttcatgtgaaacctttggaaaaggcacaactaaaaaactggaaagaatacttagaatttgaaattgaaaatgggactcatgaacgagttgtggttctctttgaaagatgtgtcatatcatgtgccctctatgaggagttttggattaagtatgccaagtacatggaaaaccatagcattgaaggagtgaggcatgtcttcagcagagcttgtactatacatctcccaaagaaacccatggtgcatatgctttgggcagcttttgaggaacagcagggtaatattaatgaagccaggaatatcttgaaaacatttgaagaatgtgttctaggattggcaatggttcgtttacgaagagtaagtttagaacgacggcatggaaatctggaagaagctgaacatttgcttcaggatgccattaagaatgccaaatcaaataatgaatcttcattttatgctgtcaaactagcccggcatcttttcaaaatacagaaaaaccttccaaaatcaagaaaggtgcttttggaagcaatcgaaagagacaaagagaacacaaagttatacctcaatttacttgaaatggaatatagtggtgacctcaaacaaaatgaagaaaatatcctaaattgttttgacaaagctgtacatggttcattacctattaaaatgagaattacattttctcagagaaaagtggaatttcttgaagattttggttccgatgttaataagcttctgaatgcttatgatgaacatcaaacactcctgaaagaacaggattctttaaaaaggaaagcagaaaatggatcagaagaaccagaggaaaagaaagcacatacagaagatacaacttcatcatctacacagatgattgatggtgatttacaggcaaaccaagctgtatataattatagtgcgtggtatcaatacaattatcagaatccttggaattatggacaatattatcctccccctccaacctga

SEQ ID NO: 10010 - DNA, 908 bp, Homo sapiens
  SIMILAR (226)..(555): 371254mologous to Hydra sp. mini-collagen,accession number X61047,Smith-Waterman Score=133.
atgaagcacatcccggtcctcgaggacgggccgtggaagaccgtgtgcgtgaaggagctgaacggccttaagaagctcaagcggaaaggcaaggagccgcggcgcgcgaacggctataaaactttccgactggacttggaagcgcccgagccccgcgccgtagccaccaacgggctgcgggacaggacccatcggctgcagcggtcccggtaccggtccggtgccagtcccagtggcgccggccgttcccccaagagggggcacggacacagccggggagcgcgggggctctcgggcgcacgaggtctccgacgcgcggaaacgctcgttgccctaggcgcagtggggccaggactccccacgccgccgccgccgccgcctcctgcgccccagagccaggcacctgggggcccagaggcacagcctttcgggagccgggtctgcgtcctcgcatcttgctgtgcgcaccgcccgcgccccgcgccgtcagcacccccagcaccgccagcgcccccggagtccactgtgcgccctgcgcccccgacgcgccccggggaaagttcctactcgtcaatttcacacgcatttacagctacaaatttcccttttggcacagcttaagctacaacccggccagagtggggtcaagtggggaccatggaggaggacatgagatcctaacaggcgacctcaaactgctgtacaagcccagcaaccctgaccgctccccaacccacaaccagcaaaggagctcagatgtttggagattgccaatagaagtcaatgtggcagagcttgctctgtttcctgggccgtgggctctgggaactggcatctcagagcctcatggcccgagaagctgtgtagctacccctgttcctattggtgaagccacccagcacccttag

SEQ ID NO: 10011 - DNA, 1264 bp, Homo sapiens
  SIMILAR (237)..(509): 941254mologous to Homo sapiens bA234K24.2 (A novel protein (CGI-23, DKFZP564N1363)),accession number AL121895,Smith-Waterman Score=440.
atggccaccctggctggggaaggaaggccggccgggtgggtgccctggatcagcctccttgccgtgggagtcctgatcatctggaagctatggcctgccccgcccattggaggtgaactccagtttgcttttgtgtgcttcctgctggggaatgtgtacgaggcatttgagcattggaagcggctcctgaacctcctgtgccggtcagaagcagccatgaagaaaacgccacgcgcctgtggatcaacctcatatccatcctgcaccaccagctgggtgagatccccgctgacttcttcgtagacattgtctcccaacacaacttcctcaccagcaccttacaggttttcttttcctctgcctgcagcattgccgtggatgccaccctgagaaagaaagctgaaaagttccaagctcacctgaccaagaagttccggtgggactttgctgaggaacctgaggactgtgccccggtggtggaggagctccctgagggcatcgagatgggctaactcggggagcgctctcagctgcgaggggccccttcccacagggctgcagtcctggcctctccatttacttcttcccatcctgggacctgccagggcagcaatcttttccaggtcctgcaaagatggagccagaattccctttttcactgattaaatatatttctttcatttgccaaagaggctgttacccatcctgaaagggcacatttgtggggtttccccatcagccaggccttggtgctaacctggctgaatttcacacaggctcttacacacacacgctcctaaggagacatcttgcctacacggcaaccatattttcctttggaatgagaaggaatttgaaccaaaagtccaagaaagaactgattgcttgttccataaggagcttaggaaacaaagaaaccctggattgcccagggggtcttgagaagttggttggtgactttttttgcggttaaatgaagggtgatggggagatcagcccgtaattgccgcctgcctcttgctaaataggagcagaggacttggcctgcagctccttgggaccactttgattgggaagagagtttcaagggaggcagctggattcaatctagcaggtggtcagcttcagttttcttccattcgaaatcccatttcttcctgttccagaggcccagtgggtcatctcccaagggtgggtgttggaccctgggccttcagaggccttgcttggtgctgtcacctcccacctgttccattccgaggcc

SEQ ID NO: 10012 - DNA, 2771 bp, Homo sapiens
  SIMILAR (1)..(1566): 991254mologous to Homo sapiens bA425A6.1 (frizzled (Drosophila) homolog 8),accession number AL121749,Smith-Waterman Score=2811.
atggactacatccgcaccgacctaaccaccgccgcgcccagcccgccgcgccgcctggggccgccaccgcccggcgagcagccgccttcgggcagtggccacgtccgcccgccgggggccaggcccccgcaccgaggtggcggcaggggcggtggcggcggggacccggcggcgcccccagctcgcggcggcggcggtggcgggaaggcgcggccccctggcggcggcgcggctccctgcgagcccgggtgccagtgccgcgcgcctatggtgagcgtgtccagcgagcgccacccgctctacaaccgcgtcaagacaggccagatcgctaactgcgcgctgccctgccacaacccctttttcagccaggacgagcgcgccttcaccgtcttctggatcggcctgtggtcggtgctctgcttcgtgtccaccttcgccaccgtctccaccttccttatcgacatggagcgcttcaagtacccggagcggcccattatcttcctctcggcctgctacctcttcgtgtcggtgggctacctagtgcgcctggtggcgggccacgagaaggtggcgtgcagcggtggcgcgccgggcgcggggggcgctgggggcgcgggcggcgcggcggcgggcgcgggcgcggcgggcgcgggcgcgggcggcccgggcgggcgcggcgagtacgaggagctgggcgcggtggagcagcacgtgcgctacgagaccaccggccccgcgctgtgcaccgtggtcttcttgctggtctacttcttcggcatggccagctccatctggtgggtgatcttgtcgctcacatggttcctggcggccggtatgaagtggggcaacgaagccatcgccggctactcgcagtacttccacctggccgcgtggcttgtgcccagcgtcaagtccatcgcggtgctggcgctcagctcggtggacggcgacccggtggcgggcatctgctacgtgggcaaccagagcctggacaacctgcgcggcttcgtgctggcgccgctggtcatctacctcttcatcggcaccatgttcctgctggccggcttcgtgtccctcttccgcatccgctcggtcatcaagcaacaggacggccccaccaagacgcacaagctggagaagctgatgatccgcctgggcctgttcaccgtgctctacaccgtgcccgccgcggtggtggtcgcctgcctcttctacgagcagcacaaccgcccgcgctgggaggccacgcacaactgcccgtgcctgcgggacctgcagcccgaccaggcacgcaggcccgactacgccgtcttcatgctcaagtacttcatgtgcctagtggtgggcatcacctcgggcgtgtgggtctggtccggcaagacgctggagtcctggcgctccctgtgcacccgctgctgctgggccagcaagggcgccgcggtgggcgggggcgcgggcgccacggccgcggggggtggcggcgggccggggggcggcggcggcgggggacccggcggcggcggggggccgggcggcggcgggggctccctctacagcgacgtcagccactggcctgacgtggcggtcgggcacggcgagctccgtgtcttatccaaagccagatgccattgtcccaggtttgagcggaggggagggggcgcccaggaaggggtggggaggggggcgagaagaaacccaagtgcaagcgaagggacacttgatgggctgaggttcccaccccttcacagtgttgattgctattagcatgataatgaactcttaatggtatccattagctgggacttaaatgactcacttagaacaaagtacctggcattgaagcctcccagacccagccccttttcctccattgatgtgcggggagctcctcccgccacgcgttaatttctgttggcctgaggagggtggacctctgcgggcgtttcccagaaccccgaggattttggagccctcccctggctgcacttggctgggtttgcagtccagatacacagatttcaccctgggagaacccctttttctccctcgactcttcctacgtaaactcccacccctgacttaccctgggaggaggggttaccgccacctgatgggattgcacggttttgggtattctttaatgaccatggcaaatgccttaagtaaacaaacaagaaatgtcttaattatacaccccacggtaaatacgggtttcttacattagaggatgtatttatataattatttgttaaattgtaaaaaaaaaaagtgtaaaatatgtatatatccaaagatatagtgtgtacatttttttgtaaaaagtttagaggcttacccccctgtaagabacagatataaagtattctattttgtcgaataaaatgacttttgataaatgatttaaccattgccctctcccccgccttttttgagctgtcacctttaaagtgcttgctaaggacgcatggggaaaatggacattttctggcttgtcattctgtacactgaccttaggcatggagaaaattacttgttaaactctagttcttaagttgttagccaagtaaatatcattgttgaactgaaatcaaaatgagtttttgcaccttccccaaagacggtgtttttcatgggagctcttttttgatccatggataacaactctcactttagtggatgtaaatggaacttctgcaaggcagtaattccccttaggccttgttatttatcctgcatggtatcactaaaggtttcaaaaccctgaaaaaaaa

SEQ ID NO: 10013 - DNA, 475 bp, Homo sapiens
  SIMILAR (21)..(473): 941254mologous to Homo sapiens 40-kDa keratin protein,accession number J03607,Smith-Waterman Score=710.
cgcacagctcgttgaattccgtggacaaggcgcgcgccctggaggcggacaacggcgagctagaggtgaatattcgcgactggtaccagaagcaggggcctggggcctcccgcgactacagccactactacacgaccatccaggacctgcgggacaagattcttggcgccaccattgagaactccaggattgtcctgcagatcgacaacgcccgtctggctgcagatgacttccgaaccaagtttgagacggaacacgctctgcgcatgagcgtggaggccgacatcaacggcctgcgcagggtgctggatgagctgaccctggccaggaccgacctggagatgcatatcgaaggcctgaaggaagagctggcctacctgaagaagaaccatgaggaggaaatcagtacgctgaggggccaagtgggaggccaggtcactgtgtaggtggattccgctccgggcaccgatctcgg

SEQ ID NO: 10014 - DNA, 1326 bp, Homo sapiens
  SIMILAR (313)..(885): 671254mologous to Mus musculus keratin 19,accession number M36120,Smith-Waterman Score=618.
atggctatagtcaaaacgacagacaatatcaagtgtagaatgggatgtggagcaactggaaccccctcataccccagagatgggaagaaaagttccagtcccccagcaggcacaggggctccagcagccgcggcgtgtccttgtcctccttcggggggctacagcggcatcctgtctgggtccaacggattgcttgcgggcaacgagaagctcaccatgcataacctcaacaactgcctggcctcctacctggacaaggtgcacgccctggaggcagccaacagcaagctggagtttggtttgagtgtttgggtgctggatgaggtgaccctggccaggactgatctggaggcacagatcaaaggcctgaaggaagagctggcctacctgaagaagaagcatgaggaggaaatcaatgccctgaggggccaagtgggagaccaggtccatatcctgagtgacaggcaaagccaatatgagatcatggccaagcagaactggaaggatgctgaagcctggttcaccagctggactgaggaactgaaccaggaggtcactggccacatagagcagctccagataagcaggtctgaggtcactgacctgcagtgcaccctccagggtcttgagattgagctgcactcgcagctcagcgtgaaagctcccttagaaggcacactggcagaaacagaggcatgctttggagcccagctggtgcagatccaggcactgatcagcagtattgaagcccagctgggcgatgtgcgagctgatggtgagtggcagaatcaggagtaccagcggctcctggagcaggagatcgccacctatcgcagcctgcttgagggccaggaagatcattacaacaacctgtccacctccaaggtccagatcccagagtgtactgtatccaacgtgcctgtggctagcgtgtgtctacagactctggaaccacactccttggcttccaaccctggctccagcacatactctgtgacttttggccagtacattaacctttctgtgtctccatttctccttctggaagccaccattgcaggggccaagaaggcagccactggaaacaactcgacccagttttcaccccctgcagagaggcagctgtgcattttcacatgccccaggacaattccactgaccacagctagtcatgcaggtagttatgggccaaagctagtgaagtacacatccctcagacccctgcctatggctgctcccactgaaagcaaccctgccctccccagtagcagggccacagcacacaggctgctgcctgcacctggccatttccccagtggcctatag

SEQ ID NO: 10015 - DNA, 462 bp, Homo sapiens
  SIMILAR (2)..(124): 971254mologous to Homo sapiens hook2 protein,accession number AF044924,Smith-Waterman Score=213.
ggacaaagctgagctatgcgggtctctgctcacctggttacagacgttccacgttccgtctccctgtgccagccctcaggacctgagcagcggccttgccgtagcctatgtgctgaaccagatgtgagtggagctgaaggggaggatcccaaaagtgtcccccagtctgctcatcccaccttctcgcccccagagacccctcctggttcaacgaggcatggctccagggcatctcggaagaatccaggtcccaactggaagctgaaggtgacaagtggactcctgattagaggacagactggtgaagagatgaccagggacgggccagctaggcacatgtcctgggtgatgggcaggaagagggacagatgtctggtgatcaaccatttgttcatccattcatctatggagtactcaccctgtgccaggcctgggcattcagcaaggaataacacagacaag

SEQ ID NO: 10016 - DNA, 2545 bp, Homo sapiens
  SIMILAR (1)..(1515): 751254mologous to Homo sapiens Human protein transport molecule (PTAM) SEQ ID NO:5,accession number Y82321,Smith-Waterman Score=1708.
atgagcgtggacaaagctgagctatgcgggtctctgctcacctggttacagacgttccacgttccgtctccctgtgccagccctcaggacctgagcagcggccttgccgtagcctatgtgctgaaccagatagacccctcctggttcaacgaggcatggctccagggcatctcggaagatccaggtcccaactggaagctgaaggtcagcaatctgaagatggtcttacggagcctagtagagtactcccaggatgtcctggcgcatcctgtgtcagaagagcatctcccagatgtgagcctcattggagagttctcagacccggcagagctcggcaagctgcttcagctggtgctgggctgtgccatcagttgcgagaaaaagcaggaccacatccagagaatcatgacgctggaagaatcggttcagcatgtggtgatggaagccatccaagagctcatgaccaaagacacttccttgactccctgtcaccagagacgtatggcaactttgacagccagtcccgcaggtactatttcctaagtgaggaggctgaggagggggacgaattacagcagcgctgtctggatctggagcggcagctgatgctcctgtcagaggagaagcagagcctggcgcaagagaatgcagggctgcgggagcggatgggccggcctgaaggcgagggtaccccaggtctcactgccaagaagctgctgctgctgcaatcccagctggagcagttgcaggaggagaacttcaggctggagagtggcagggaggatgagcgcctgcgctgtgccgagctggagagggaggttgcggagcttgcagcaccggaaccaggcgctgactagcctggcccaggaggcacaggccctgaaggatgagatggatgaactacggcagtcttcggagcgtgctgggcagctggaggccacgctgaccagttgccggcgccgcttgggcgagctgagggagctgcggcggcaggtgcggcagctggaggaacgcaacgccggccacgccgagcgcacgcgacaactggaggatgagctacgccgagcgggctccctgcgcgcccagctggaggcgcagcggcggcaggtgcaggaactgctaggccagcggcaggaggaggccatgaaggccgagaaatggctatttgaatgccgcaacctggaggaaaagtatgagtcggtgacaaaggagaaggagcggctgttggcggagcgggactccttgcgggaggccaatgaggagctgcgctgcgcccagctgcagccgcgggggttgacccaggccgatccctcactggatcccacctccacacccgtggataacttagccgcagagatcctgcctgcggagctcagggagacgctcctgcggctttcatcttggagaacaagcggctgtgcaggcaggaggcggccgaccgggagcggcaggaaggaagctgcagcgccacctggaggatgccaacccgcgcgcgccacgggtttggagacgcagccaccggctgaaccagcaagcagcttattccgagctgcgggcccaggtggaggacctgcagaaagccctgcaggagcaggggggcaagactgaagatgccatttccattttgctgaaaaggaagctggaggaacatttgcagaagcttcatgaggcagatctggagttgcagaggaagcgggagtacattgaggagctggagccacccactgacagcagcacagccctggcggatcgaggagctgcagcataacttgcagaagaaggacgcggacttgcgggccatggaggagcgataccgccgctacgtggacaaggcccgcatggtcatgcagaccatggaacccaagcagcggccagctgcgggggcacctccagaactccattccctgaggacacagctccgagaacgggatgtccgcatccgacacctggagatggactttgagaaaagccgaagtcagcgggagcaggaagaaaagctgctcatcagtgcctgggtataatatgggcatggccttgcaagcagcgagctggggagggagccggcgcctgccccatgccccagtcatttcctgggcacagcagcgggctggcaaccaaattctcgcccgtggacccttgggacgcctggcatctctgaaccttcgccccactgacaagcactgacagacctcacaatcaagccagcctgggctccacccaccctggcttcctccagctcacatggcgcccagcactgggcttcagccaggtgctcgagagctttgaggccatgatctctgctcttccctctcccaagattggtggggagggagggcgggaggtagatatagcgcctgttctttttagcaattgtgattcttgttgttagattctctctctggagttcatgtgctgcctcaggagacatctgattttatatttgagaaaatagaggcgttacaatctcccctcgctgtctctggccacaaggtgagggaaaaaaagggggcccaatatttatcccccttttttttaaaaaaatatt

SEQ ID NO: 10017 - DNA, 690 bp, Homo sapiens
  SIMILAR (94)..(201): 521254mologous to Homo sapiens Human secreted protein, SEQ ID NO: 6613,accession number G02532,Smith-Waterman Score=102.
gcatcattcttaacaaagaagttaaatattggtgggaaaagagtaaaccttgccatatggaaaaaaataatgagagggggggaacaggcgcgcctgccagcacttcccaaccccaagcccgacggatcaccccaggtcaagagcggcacaccagcccacccactatggaaaaatccggtccctacgggaaacccaaaaattagccggcagctaagacaggctgggtctggggaatcaggactgcagaaaagaaaatcaagatgcagcagcagcaagtctgaccagcaggtaatctacctaaaagagcaaaaagttaagggccatggttgctgtgtccatataccaacattgctgtggaatactgaatctgggaatgctgaaccacagactctagcaccagcccaaaatgccaagagcagccttctatcagaagctttgtcttcaaatgtgatggtttatatgctcctgaacttacattcttatgagtcaggaggccagcatcttaacagggacacagccaccaggaagttcaaaccagaaatcttgatgaattcctggaggccaacaagaggccagctccagaatgtgaagctgctggagggtcccataaagggaggtctccccctacccgctccaccctgggcttttcctccaggaaacccacgaggctcccatagggtcaaaggttaa

SEQ ID NO: 10018 - DNA, 1107 bp, Homo sapiens
  SIMILAR (1)..(1005): 881254mologous to Cloning vector pZC320 SopA,accession number U26464,Smith-Waterman Score=1545.
atgaaactcatggaaacacttaaccagtgcataaacgctggtcatgaaatgacgaaggctatcgccattgcacagtttaatgatgacagcccggaagcgaggaaaataacccggcgctggagaataggtgaagcagcggatttagttggggtttcttctcaggctatcagagatgccgagaaagcagggcgactaccgcacccggatatggaaattcgaggacgggttgagcaacgtgttggttatacaattgaacaaattaatcatatgcgtgatgtgtttggtacgcgattgcgacgtgctgaagacgtatttccaccggtgatcggggttgctgcccataaaggtggcgtttacaaaacctcagtttctgttcatcttgctcaggatctggctctgaaggggctacgtgttttgctcgtggaaggtaacgacccccagggaacagcctcaatgtatcacggatgggtaccagatcttcatattcatgcagaagacactctcctgcctttctatcttggggaaaaggacgatgtcacttatgcaataaagcccacttgctggccggggcttgacattattccttcctgtctggctctgcaccgtattgaaactgagttaatgggcaaatttgatgaaggtaaactgcccaccgatccacacctgatgctccgactggccattgaaactgttgctcatgactatgatgtcatagttattgacagcgcgcctaacctgggtatcggcacgattaatgtcgtatgtgctgctgatgtgctgattgttcccacgcctgctgagttgtttgactacacctccgcactgcagtttttcgatatgcttcgtgatctgctcaagaacgttgatcttaaagggtatgcagaatctgtgggagcaaaacattatcatacttcagccaaacagaacaaaggaattgaggaactctttcttgacctttgtaaaaggatgatagaaacagcacaagtggatgagagagcaaaaggcaatggctctagtcagccgggaactgcaaggcgaggtgtacagattattgatgatgaacctcaagcccagaccagtggtggagggtgctgttcttctggataa

SEQ ID NO: 10019 - DNA, 2629 bp, Homo sapiens
  SIMILAR (1960)..(3933): 961254mologous to Mus musculus astrotactin,accession number U48797,Smith-Waterman Score=3420.
atggctgcggccggcggcggcggcggcggggcggcggcggcgggccgagcctactcgttcaaggtggtgctgctgggggaaggctgcgtggggaagacgtcgctggtgctgcgctactgcgagaacaagtttaacgacaagcacatcaccactctgcaggcatcattcttaacaaagaagttaaatattggtgggaaaagagtaaaccttgccatatgggatacggcaggtcaagagagattccatgcattgggtccaatttactacagagattcaaatggagcgattttagtttatgacataacagatgaagattcttttcagaaggtaaaaaactgggtcaaagaattacggaaaatgttgggaaatggaaacctgtttatgtatagttggtaataaaatagacttggaaaaggagagacatgtttccattcaagaagcagagtcgtatgcagaatctgtgggagcaaaacattatcatacttcagccaaacagaacaaaggaattgaggaactctttcttgacctttgtaaaaggatgatagaaacagcacaagtggatgagagagcaaaaggcaatggctctagtcagccgggaactgcaaggcgaggtgtacagattattgatgatgaacctcaagcccagaccagtggtggagggtgctgttcttctggataactgttcacgcctaagaaattaaaagacagaacaaaactgtggatcattgccctcaacatgaagactgccatattccaagtcacattattttaccaatggaattatagaattaacagtattttaaattacgtttataacactgcagagaccttaagtgctaaacttagtggagtttgtgaccagagaattggcattttctacaaatgtttttttttggtttttttttggttttttttgggtttttttgagacggagtctcgctctgtcacccaggctggagtgcactggcttgatctcggctcactgcaagctccacctcccaggttcacgccattcttctgcctcagcctcccgagtaggtgggactacaggcacaccgcaaccatgcccggctaattttgtttttgtattttttagtagagaaggggtttcaccaggatgtgttagccaggatggtctcgatctcttgacctcgtgatcccgcccggctttgggcctcccaaagtgctcggattacaggcatgagccactgcacctgaccaaccataacaatttttttttttgagacggagtcttgctctgtcgcccaggctggagtgcagtggcgcgatctcggctgactgcaagctccacctcccaggttcgtgccattcttctgcctcagcctcccgagtagctgggactacaggcgcccaccaccatgcctagctaattttttgtattttttttttagtagagacagggtttcaccgtgttagccgggatggtctcgatctcctgacctcgtgatccgcctgcctcggcctcccaaagtgctgagattacaggcatgagccatcgtctgcgcttctatttcgatcaccaagatgtggctcggaatgcggggcttacttcttccatgaattggccaaggagaagcgcaagcttggaccaggagttgctaccttgtgcggagaacgtgtggtgcataagaaaaccgagcctctgctcttcgaaaatgtatattctggccagggcgaggccagccagcgcacaactgcagggggcgccgttcccacagcagccctgcaaaggagtgtgcctgagaaacttccgcctcccctgcacccagccctgtttaggcacgaggctgaatcaatggggtcatcccgcttcaagccagtgcctcttcccagctcccatggggaccaccgaagccagctccggatggaaaacgtggacgtgaaggaggaatggcaggacgaagatttcccaggacctctggcagccccgtgcaaatgttctgcccggaatggaatatttcccagggtagccaaggagccagtgccctgggtcaaactcgggcagcacgggctgcggcttcaagaagtgatctgggccggagacacccccgtggccaccgccaagaacatgcccggggacagcgcggatcatttggggacggcacgacggaggacggcagcgccgccaacgggcgcctgggcggacagtgatcatcggggagcaagagcaccgtatagacctgcacatatccggccttacatgaaagtggtcacccacggagggggttcgcagtgcccctctctgatgcacggggatgttaagccgtcaactcgcttcggtggacggactgtgggcaaggcgtgcatgggtactacggcgaaggctcaacgccatcatcgtcttcgcagcctgcttccttccagacagcagcctcccgactaccactacatcatggagaacctcttccttccgccaggacagcagacaacacctggaccagtggggctgaccagccagcggcaggagtggaggcaggcagggtcggcaccgcaggtgtcctaccctggacccctccatgttgggtccctgccttctgtgccccgtgagcagtacgtcatcagcagcttagagctcctggtggctgaggactacatgatctgtacctga

SEQ ID NO: 10020 - DNA, 1470 bp, Homo sapiens
  SIMILAR (547)..(819): 951254mologous to Homo sapiens paired related homeobox protein,accession number AF061970,Smith-Waterman Score=444.
atggccctggtctgcctgggcgccgatatcacgaggacgcgccggccgacagcagggcgaggcggcaagagggaccgcagcagcccccgcttccgcacggcccgccgggtcgcgaggaggctgggtcaggagcccgttgccagccctggagatctcccaggagagcggagaggatggggtgtgtgcggccacatcgcgggaacccagtccagggccctgcagcggccccacggcgccccccagggacgagaagcagaggtgcaggagccggagcccccactggtgccccaggctctcctgctggtcagaggccctgctgcggccagggaggaagccgtccagccaccgaaggaagaagtcacacagcgaccgggcggtcactcttccccagatgtgtttgcacatctgaaggggccacgtcctgtcgtcgaaatccgcatcgaggcaggggtgtggctgctggtgttctcagctatctccccggaatctagcactgggcctgccacacaggtgctcagtaaatacgtgttgaagagtgaatggatgggtgagtgtcccagcccggggcgcggtagcgccaccaaacggaagaagaagcagcggcggaaccgcaccacgttcaacagcagccaactgcaggcgctggagcgcgtgttcgagcgcacgcactaccccgacgcctttgtgcgcgaggagcttgcccggcgcgtcaacctcaacgaggcgcgcgttcaggtctggtttcagaaccgccgcgccaagttccgcaggaatgaaagggccatgctggccagccgctctgcctcgctgctcaacacagtgccaccctacagccctgggagctcaggccccgcaaccccaggggtcaacatggccaacagcatcgccagcctccgtctcaaggccaaggagttcagcctgcaccacagccaggtccggggcctaggttggcaggatcccacatctccagatggggcattccgagctgcattctggatgcagtggcggcatggagatctgtcaggtggcacagaactactgccatggctggattccgaggagacgggccatatccccgttttacaaatgaggaaactaactcagcgaggggagacgccgtgtccagggacacacagtaagcaggtggcccaggaggaccccagaacccggctggaggtggcggtggggggcgaggggtgcctgcggaaggagaggaacaggagcagcgggagtccccacagcctacaggggctggaggaggtccagatgccattggaagcatcttcctttgacatccatgaaggcagacctcgaagcctgcctgaggagaaggccgccctgccagtggcgtccgagcgggtgtttgggagtgtcggaaaacggctggagagtttgcccaaagccctgtaccctggggccaaggaggagaccctggccagctcctcgtgttgggactgcgctggcctgtga

SEQ ID NO: 10021 - DNA, 244 bp, Homo sapiens
  SIMILAR (2)..(121): 1001254mologous to Homo sapiens paired-like homeodomain protein PRX2,accession number U81600,Smith-Waterman Score=206.
cacagtgccaccctacagccctgggagctcaggccccgcaaccccaggggtcaacatggccaacagcatcgccagcctccgtctcaaggccaaggagttcagcctgcaccacagccaggtccggggcctaggttggcaggatcccacatctccagatggggcattccgagctgcattctggatgcagtggcggcatggagatctgtcaggtggcacagaactactgccatggctggattccgag

SEQ ID NO: 10022 - DNA, 257 bp, Homo sapiens
  SIMILAR (10)..(144): 361254mologous to Elephantulus edwardii reverse transcriptase,accession number U62039,Smith-Waterman Score=72.
atgtggtccatccgtacagtggaatgtgattcggccttcagaaggaaggagactctgacgcatgctacacgggtgagccctgtagacgtcacattaagtgaaataagacggtcacagaacggcaaatactgtaggattccacttacatacgagatccctaggatgcaagcacttcatcttccgaaatctctggaaaatgaatccacgtgggatcccaaggtttctcctgcagtgaatcctggggttttccaaagcag

SEQ ID NO: 10023 - DNA, 558 bp, Homo sapiens
  SIMILAR (1)..(558): 991254mologous to Homo sapiens paired related homeobox protein,accession number AF061970,Smith-Waterman Score=940.
gcggccgccgccttcgccctggacaagccggcgctgggcccggggccgccgccgcctccacccgcgctggggcccggcgactgcgcccaggcgcgcaagaacttctcggtgagccacctcctggacctggaagaggtggcggcggccgggcggctggcggcgcgccccggggccagggccgaggcgcgggagggcgcagcacgggagccgtccgggggcagcagcggcagcgaggcggcgccgcaggatggtgagtgtcccagcccggggcgcggtagcgccgccaagcggaagaagaagcagcggcggaaccgcaccacgttcaacagcagccaactgcaggcgctggagcgcgtgttcgagcgcacgcactaccccgacgcctttgtgcgcgaggagcttgcccggcgcgtcaacctcagcgaggggcgcgttcaggtctggtttcagaaccgccgcgccaagttccgcaggaatgaaagggccatgctggccagccgctctgcctcgctgctcaagtcctacagccaggaggccgccatcgagcagcccgtggct

SEQ ID NO: 10024 - DNA, 1007 bp, Homo sapiens
  SIMILAR (889)..(344): 501254mologous to Homo sapiens paired related homeobox protein,accession number AF061970,Smith-Waterman Score=353.
tttttttttttttttttggggcttaaaaaaatggttttatttcttaaagacaaaagctttttggttttaatacacaaactaaatgaggtccttggcaggctcttccaccttccggcccaacccctccaagggttgtgggctgcagtctctggtggccaaggacagaagagctgggcccggctgcaggggcctcaacagccctcgtgggctcggggagtccaggctggacagacgggccaggagagctcatccaggagaaggtcacttcctggggcgtctgcccccttttcttattgctgtccacccagggagggcgtctgggtcctggggggactggacttcagttcaccgtaggcacctggctgtggtgcaggctgaactccttggccttgagacggaggctggcgatgctgttggccatgttgacccctggggttgcggggcctgagctcccagggctgtagggtggcactgtgctgtagggggacgaggctgtccaggagagataatctggactcaagggcggtgggccggggagcccacgggctgctcgatggcggcctcctggctgtaggacttgagcagcgaggcagagcggcttgcccagcatggccctttcattcctgcgggactttggcgccgcggttctgaaaccagacgtgatcctcattttccaggtaggcaggtgcctgaacgcgcgcctcgctgaggttgacgcgccgggcaagctcctcgcgcacaaaggcgtcggggtagtgcgtgcgctcgaacacgcgctccagcgcctgcagttggctgctgttgaacgtggtgcggttccgccgctgcttcttcttccgcttggcggcgctaccgcgccccgggctgggacactcacagtatttgccgttctgtgaccgtcttatttcacttaatgtgacgtctacagggctcacccgtgtagcatgcgtcagagtctccttccttctgaaggccgaatcacattccactgtacggatggaccacat

SEQ ID NO: 10025 - DNA, 594 bp, Homo sapiens
  SIMILAR (1)..(438): 721254mologous to Mus musculus fetal globin inducing factor,accession number AF028722,Smith-Waterman Score=542.
atggaaaaagaaaaaggaaatgatgatggaataccagaccaagggaatttcttggatttttccgaacactttaaccaacttgaatttttggaaacacatggacaccttattcctactggtgctcaaagtctttgggtaggcaattctgaagaagacgaagagcaagatgaaaaaaatgaagagtggtatcaattgcaagaaaaaacaatggaaaaagacccaagcaaattgcttctttgggctgctgaaaaaaatcggcttactacagtacagagactactttctgaaaaggctgctcatgtgaacactagggatgaagatgagtatacccctcttcatcgtgcagcctacagtggacaccatgatgcagatatcaatgcccaaacaaaaggcctcttggcccccttgcatcttgctgctgggaacagagacagcaaggataccctagaactcctcctggtgaactgttacatcaagccagggctgaaaaacaacttggaagaaactgcatttgatattgccaggaggacaagtgtctatcactacctctttgaaattgtggaaggctgtgcaaattcttcacctcagtcttaa

SEQ ID NO: 10026 - DNA, 1926 bp, Homo sapiens
  SIMILAR (1957)..(5781): 971254mologous to Homo sapiens putative p150,accession number U93563,Smith-Waterman Score=6519.
cggaagtgagatgcaaggcggcgattttcccttctgtcagatcttgatgaataaagttttcataattcatctctagaaagatttatatcctggcatttgaaatgctttttatttagaatagtagtaaaaaatggaaaaagaaaaaggaaatgatgatggaataccagaccaagagaattccttggatttttctgaacactttaaccaacttgaattgttggaaacacatggacaccttattcctactggtactcaaagtctttgggtaggcaattctgatgaagatgaggagcaagatgacaaaaatgaagagtggtatcgattgcaagaaaaaaaaatggaaaaagacccaagcagattgcttctttgggctgctgaaaaaaatcggcttaccacagtgcggagactgctttctgaaaaggccactcacgtgaacactaagggatgaagatgagtatacccctcttcatcgagcagcctacagtggacacttagatattgttcaggagctcattgcacagggggccgatgttcatgcagtgactgtggatggctggacgcccctgcacagtgcttgtaagtggaataataccagagtggcttctttcttactgcagcatgatgcagatatcaatgcccaaacaaaaggcctcttgacccccttgcatcttgctgctgggaacagagacagcaaggataccctagaactcctcctgatgaaccgttacgtcaaaccagggctgaaaaacaacttggaagaaactgcatttgatattgccaggaggacaagtatctatcactacctctttgaaattgtggaaggctgtacaaattcttcacctcagtcttaacaattctagtaattttcctaagtttctaaataccagtgcctcctgtgtgtgagatgtattcccataatcaaagttgacgtcaaacatcttactaccaaaaattccagtgacattcattataacattcttcccaagtgaattgcctgactttgatgtccaaaatgtatttgaaagtaatttgcatatatctttaattatttctgtggagtttgtgatttttttatcagaaataattttaatgtgtgtatacttaaacacttgacacgggttgtacagaaactggtatttttggtgctgatacaagagaaatgtatttttaaatatcccacatcctggatctttgttgggtatttagtatattgacatatatttttataaggtgaggtaactcagaacttaatttaaaagtcttaaatattctgatacaattcagctgtcttctctaccttaccatagccagttgctttcattttaaaccagagcaagtaacatattagtgacttgaatcttcataagtaaaaggacaaaacatcaaaaaacctagatctttgtcttttagaacacagaccattttcaggaaagcagttagctaagtgtttaattcatgaatattgaatactgcatcccctaccacaatttacacaatcctgtggatagccctacctcaccccggtcaaccctacatgacccttaagcctaatggcgaatcacgatgacccttgtagacatgcacacaactatacctttgtccaacagatcataatatatctgcctatcccaactggttttacctgcctaatcctactgatttgggcactgcttgtatagtctctcaagttcacaggaaatgttgattttctaagggtcctcatttttacagagtatacaggcaaagtgacaggggaaaaggaattagtctaagagtaaggggatgaattattatattgaggctaaaaccacaaagtggctcaggctttaaaaaaaaaaacactgtggataatgacaaaaagcataagtaaaaatatttgagaaaaataaagtacaagttttgaacaacaaaaaaaaaaaaaaaaaa

SEQ ID NO: 10027 - DNA, 395 bp, Homo sapiens; identical to SEQ ID NO: 4149
  SIMILAR (2)..(196): 381254mologous to Human endogenous retrovirus K pol protein,accession number Y17833,Smith-Waterman Score=101.
  misc_feature (1)...(395): n = a,t,c or g

SEQ ID NO: 10028 - DNA, 461 bp, Homo sapiens; identical to SEQ ID NO: 5300
  SIMILAR (74)..(298): 601254mologous to Human endogenous retrovirus K pol protein,accession number Y17832,Smith-Waterman Score=234.
  misc_feature (1)...(461): n = a,t,c or g

SEQ ID NO: 10029 - DNA, 749 bp, Homo sapiens
  SIMILAR (2)..(544): 581254mologous to Human endogenous retrovirus K pol protein,accession number Y10391,Smith-Waterman Score=542.
aggagatcctagtctcactagccattggcaattaacaaaggaggctgaggcagagttacagctgattgaaaagcaagtccataaagctcaaataaatagaatagatccagagaagattccagatttgctaattttttcaactcagcattctactggtgttattgttcaagagcaaggtcttgtagagtggctttttcttccacatactaattcacggactctaactccttatgtggatcaaatcgctactatgataggaaatgggagaactcagattgttaaattacatggatattatcctggaaaaattattgtccctctcatgaaggcacaaatacagcaagcttttataaatagtcttacttggcaaacccatttagctgactttgtggttattctcgataatcattttcctaaaatgaaactgtttcaatttttgaaattaactaattggattctccctaaaataactaaatttaaaccaattaaaggtgctgaaaatgtcttcacagatgggtctagtaatggtaaagcttcttattctgaattgaaaggacttttaactgaagggaatcaagtggctgaacacctagttgctactgcaatatctaatgctagacactttcacaatttaacccatgttaatgccgctggtctcaaacgcagatacagcattacctggaaagaagctaaagctattatccagcaatgtccaacttgccaaatgttgtattcctcatcttttacag

SEQ ID NO: 10030 - DNA, 1339 bp, Homo sapiens
  SIMILAR (238)..(1050): 581254mologous to Human endogenous retrovirus K pol protein,accession number Y18890,Smith-Waterman Score=803.
atgggacaagtgtgggttctggttcattccaccttggaaccttttcacactaataatgaggaggaagcaaagtataacgaagtaacagaagaggtgacagagcaggtttgtttgccagctaaagctaacgcagcaaaggagaaagaggttcatccctacccttctgcacctcttaattattttgaagaaaaggagtggcctgaccctccagatctttcttttctggaggacactggaggagatcctagtctcactagccattggcaattaacaaaggaggctgaggcagagttacagctgattgaaaagcaagtccataaagctcaaataaatagaatagatccagagaagattccagatttgctaattttttcaactcagcattcacctactggtgttattgtccaagaacaggacttagtagagtggttttttcttccacatactgattcatggactctaactccttatttagatcaaatcactactatgataggaattgggagaactcggattgttaaattacatggatatgatcctggaaaaattattgtccctctcatgaaggcacaaatacagcaagcttttataaatagtcttacttggcaaacccatttagctgactttgtgggtattctcgataatcattttcctaaaatgaagctgtttcagtttctgaaattaactaattgcattctccccaaaataactaaatttaaaccaattgaaggtgctgagaatgtttttacagatgggtctagtaatggtaaagcatcttattttggatcaaaacgtaaagttttccagacaccctatacttctgctcaaaaagtggagcttgtagctgtaattgaattattgactgcttttgatatgcctattaatgtgatttctgattcttcatacgtggttcattccacacagttaattgaaaatgctcagttacgatttcatacagaagaaaaactgatgactttatttacccaattgcaaacagcagttagaagtagaatgcaccgattttacatcactcacattagggctcgctcatacacctcttccaggacctttgactgaagggaatcaaatggccgattgcctagttgctactgcagtatctaatgctagacactttcacagtttaacccatgttaatgcctctggtctcaaacacagatacagcattacctggaaagaagctaaagctattatccagcgatgcccaacttgccaagtggtacattcctcatcttttacaggaggagttaatcctagaggactggaacctaactcttttggcaaatggatgtcacacatgttccctcgtttgggagactag

SEQ ID NO: 10031 - DNA, 1268 bp, Homo sapiens
  SIMILAR (416)..(928): 571254mologous to Homo sapiens Gag-Pro-Pol protein,accession number AF164614,Smith-Waterman Score=525.
  misc_feature (1)...(1268): n = a,t,c or g
atgccacagaacagcttagaggagtgtgcattagagcttgggaaaaaatcacttcaggaaaatgtcaataattttcctaaaacaaagctgtttcagtttttgaaattaactaattggattctccctaaaataactaaatttaaaccaattgaaggtgctgagaatgttttcacagatgggtctagtaacggtaaagcttcttattttggattaaaaggtaaagttttccagacgccctatactgcagctcaaaaagtggagctggtagcggtaattgaggtattgactgcttttgatatgcctgttagtatgatttctgattctacatacgtggttcattccacacagttaactgaaaatgctcagttacgacttcatacagatgaacaactgatgactttattttctcaactgcaaacagcagttagaatgttttgcggtgatgggcattccagcttctaggaaaacagataatgtcccaggctatactatccaaactctagctacatttttctctatgtggaatattaaacacattactggtatcccatataattctcaaggacaagccatagtgggaagaataaatctttccctaaaacagcggttgcaaaagcagaaagagggaaatagagaatacagaaccccacagatgcaattgaatctagcattattagctttaatttttttgagcctgtccaaaggccagatgttatcagcagctgaacagcatctccagaaaccacctgcaaagacagaagcagaacaactgatttggtggagagatacaaaaacaagaagttgggaaataggtaaaataataacttgcggtagaggttatgcttgtgtttctccaggccaaaatcaacagccaatttggacaccatcaagacacctgaaaccctatcatgagccagatgccaaggaagagattccgggaggatcccgaggacccccccagttgcagccatgtcaagactgatgctgaggaggaccccaactgtcacgagcaacacccgtcaaacacagccatccacctgaggtcagatcaagaagctgtcacagatggcagaagaaaacctgaggaaagcgggacaaccagtcacaatgaataatttaatggcagctatgatagcggntatcaccactgcctctgcagatgcagatcccgattcctgcaagaagtagctcaccgtgacaaagcagcccttgcttttatctccttacaaatcaaagaagggagagatgttgggagcaagctccccaaa

SEQ ID NO: 10032 - DNA, 786 bp, Homo sapiens
  SIMILAR (138)..(605): 861254mologous to Homo sapiens L-CaBP1,accession number AF169149,Smith-Waterman Score=716.
gactctgtctgttggaccaatttgatgcctgtgcacgctcagggctctctgaaccccgctccttgactctcagggtcccctcttgcggaaagcccctcccgggaccaggagccaggctgggcagggaggtgacaccctgcctctcttttgcatttgcttggtgctggctgaagatgtgccaggaggaacagaccagctacatggtggtgcagacgagcgaggaggggctggcggctgacgccgagctcccgggaccgctcctgatgctggcccagaactgcgcagtcatgcacaacctgctgggccctgcctgcattttcctgcgcaagggcttcgctgagaacaggcagcctgtacagctccgagaggccttcagagaattcgacaaggacaaggatggctacatcaactgccgggatctgggcaactgcatgcgcaccatgggctacatgcccaccgagatggagctcatcgaactgtcccagcagatcaacatgaacctgggtggccatgtagattttgatgacttcgtggagctaatggggcctaaactcctggcggagacagcagatatgattggtgtaaaggaactgcggagatgctttccgagagtttgacaccaatggtgatggggaaataagcaccagtgagctgcgagaggctatgaggaagctcctgggtcatcaggtgggacaccgagacatagaggaaattatccgagatgtggacctcaatggggatggacgagtggactttgaagcacccttccctggttcctcaaactga

SEQ ID NO: 10033 - DNA, 565 bp, Homo sapiens
  SIMILAR (1)..(198): 951254mologous to Homo sapiens Human HLIG-1 protein,accession number Y08008,Smith-Waterman Score=340.
  misc_feature (1)...(565): n = a,t,c or g
cataaggccaggctcaccgtgaatgtgttgccatcattcaccaaacgcccnnacgacataaccatccggaccaccaccatggcccgcctcgaatgtgctgccacaggtcacccaaaccctcagattgcctggcagaaggatggaggcacggatttccccgctgcccgtgagcgacgcatgcatgtcatgccggatgacaggacagctccccgggaaacagagggtgccactgctgttggcaccaaaaagctaggttttgtctacctcagttcttgtcataccaatctctacgggaaagagaggtaggagaggctgcgaggaagcttgggttcaagcgtcactcatctgtacatagttgtaactcccatgtggagtatcagtcgctcacaggacttggatctgaagcacagtaaacgcaagaggggatttgtgtacaaaaggcaaaaaaaagtatttgatatcattgtacataagagttttcagagatttcatatatatcttttacagaggctattttaatctttagtgcatggttaacagaaaaaaattatacaattttgacaat

SEQ ID NO: 10034 - DNA, 449 bp, Homo sapiens
  SIMILAR (39)..(152): 761254mologous to Homo sapiens Human HLIG-1 protein,accession number Y08008,Smith-Waterman Score=126.
ttttttttttctttctctcaacccttcctgtttcgctttccttccctggccttaatttctggatgtttggaaactacaggactctgtttggaaacaagatcaagtctgtggctaagagagcattctcggggctggaaggcctggagcacctgtgagtatctcaccagccctgccctgaggcacagcctgctgaatgcggctgccggggagttctgctagcaatttaatcgcatctttgtaaactgagaaacaggctatttggaaacaccagctgcttccttctcattatgtcagcttcagctttggcctttatgttgcctatgccaggaacagttacagaacatatggccagtggatgtgctcccagttaattcagttggtatttggataaataccctacccgctcctgctgcgcagcctaacccctgcactggctccttcatggaccc

SEQ ID NO: 10035 - DNA, 383 bp, Homo sapiens
  SIMILAR (125)..(253): 1001254mologous to Homo sapiens Human HLIG-1 protein,accession number Y08008,Smith-Waterman Score=224.
catctctctgcacagcgctgatggtcgtcactgggaggatcccctttctgagcttgacagtgaacgtgtgtctgcatttcttgtcactgagaccctggtgttctatttgttctgtctccttgcagatgaaaccgtcgtgccaccagatgttccaagctacctctcttctcaggggaccctttctgaccgacaagaaaccgtggtcaggaccgagggtggccctcaggccaatgggcacattgagagcaatggtaaggcctcagtaaccgtgaagcagagctctgctgtgactgtgtctctgggtgctggaggtggcctccaggtctttacagggcaggtacctggcattagatggggcaaacttggtgaagcccacgcgtccg

SEQ ID NO: 10036 - DNA, 2973 bp, Homo sapiens
  SIMILAR (2)..(1456): 901254mologous to Homo sapiens Human HLIG-1 protein,accession number Y08008,Smith-Waterman Score=2280.
acgcgtccgcaccgtggcccgcctcgaatgtgctgccacaggtcacccaaaccctcagattgcctggcagaaggatggaggcacggatttccccgctgcccgtgagcgacgcatgcatgtcatgccggatgacgacgtgtttttcatcactgatgtgaaaatagatgacgcaggggtttacagctgtactgctcagaactcagccggttctatttcagctaatgccaccctgactgtcctagagaccccatccttggtggtccccttggaagaccgtgtggtatctgtgggagaaacagtggccctccaatgcaaagccacggggaaccctccgccccgcatcacctggttcaagggggaccgcccgctgagcctcactgagcggcaccacctgacccctgacaaccagctcctggtggttcagaacgtggtggcagaggatgcgggccgatatacctgtgagatgtccaacaccctgggcacggagcgagctcacagccagctgagcgtcctgcccgcagcaggctgcaggaaggatgggaccacggtaggcatcttcaccattgctgtcgtgagcagcatcgtcctgacgtcactggtctgggtgtgcatcatctaccagaccaggaagaagagtgaagagtacagtgtcaccaacacagatgaaaccgtcgtgccaccagatgttccaagctacctctcttctcaggggaccctttctgaccgacaagaaaccgtggtcaggaccgagggtggccctcaggccaatgggcacattgagagcaatggtgtgtgtccaagagatgcaagccactttccagagcccgacactcacagcgttgcctgcaggcagccaaagctctgtgctgggtctgcgtatcacaaagagccgtggaaagcgatggagaaagctgaagggacacctgggccacataagatggaacacggtggccgggtcgtatgcagtgactgcaacaccgaagtgggactgttactccaggggacaagccttccacccccagcctgtgtccagagacagcacacagccaagtgcgccaaatggcccggagccgggtggggagtgaccaagagcatttttccacattcaccagttgcagcaggactgccgctgggtcctgccccagagtgccaagggtcgctctaccccagtaaccacgatagaatgctgacggctgtgaagaaaaagccaatggcatctctagatgggaaaggggattcttcctggactttagcaagggtgtatcacccggactccacagagctacagcctgcatcttcattaacttcaggcagtccagagcgcgcggaagcccagtacttgcttgtttccaatggccacctccccaaagcatgtgacgccagtcccgagtccacgccactgacaggacagctccccgggaaacagagggtgccactgctgttggcaccaaaaagctaggttttgtctacctcagttcttgtcataccaatctctacgggaaagagaggtaggagaggctgcgaggaagcttgggttcaagcgttcactcatctgtacatagttgtaactcccatgtggagtatcagtcgctcacaggacttggatctgaagcacagtaaacgcaagaggggatttgtgtacaaaaggcaaaaaaaagtatttgatatcattgtacataagagttttcagagatttcatatatatctttttacagaggctattttaaatctttagtggcatggtttaacagaaaaaaattattacaattttggacaatattatttttcgtatccggttgctgtttaattttgggagggggtggggaaatagttctggtgccttaacgcatggctggaatttatagaggctacaaccacatttgttcacaggagtttttggtgcggggtgggaaggatggaaggccttggatttatattgcacttcatagacccctaggctgctgtgcggtgggactccacatgcgccggaaggagcttcaggtgagcactgctcatgtgtggatgcccctgcaacaggcttccctgtctgtagagccaggggtgcaagtgccatccacacttgcagtgaatggcttttccttttaggtttaagtcctgtctgtctgtaaggcgtagaatctgtccgtctgtaaggcgtagaatgagggttgttaatccatcacaagcaaaaggtcagaacagttaaacactgcctttcctcctcctcttattttatgataaaagcaaatgtggccttctcagtatcattcgattgctatttgagacttttaaattaaggtaaaggctgctggtgttggtaacctgtggatttttctatactgatgttttcgttttgccaatataatgagtattacattggccttgggggacagaaaggaggaagttctgacttttcagggctaccttatttctactaaggacccagagcaggcctgtccatgccattccttcgcacagatgaaactgagctgggactggaaaggacagcccttgacctgggttctgggtataatttgcacttttgagactggtagctaaccatcttatgagtgccaatgtgtcatttagtaaaacttaaatagaaacaaggtccttcaaatgttcctttggccaaaagctgaagggagttactgagaaaatagttaacaattactgtcaggtgtcatcactgttcaaaaggtaagcacatttagaattttgttcttgacagttaactgactaatcttacttccacaaaatatgtgaatttgctgcttctgagaggcaatgtgaaagagggagtattacttttatgtacaaagttatttatttatagaaattttggtacagtgtacattgaaaaccatgtaaaatattgaagtgtctaacaaatggcattgaagtgtctttaataaaggttcatttataaatgtcaaaaaaaaattttttaaaaattaaaaaaaaaaaaaaaaa

SEQ ID NO: 10037 - DNA, 2436 bp, Homo sapiens
  SIMILAR (3)..(1643): 991254mologous to Homo sapiens Human HLIG-1 protein,accession number Y08008,Smith-Waterman Score=2814.
gcctggccgagctgagcagcctgagtgtcctgcgtctcagccacaattccatcagccacattgcggagggtgccttcaagggactcaggagcctgcgagtcttggatctggaccataacgagatttcgggcacaatagaggacacgagcggcgccttctcagggctcgacagcctcagcaagctgactctgtttggaaacaagatcaagtctgtggctaagagagcattctcggggctggaaggcctggagcacctgaaccttggagggaatgcgatcagatctgtccagtttgatgcctttgtgaagatgaagaatcttaaagagctccatatcagcagcgacagcttcctgtgtgactgccagctgaagtggctgcccccgtggctaattggcaggatgctgcaggcctttgtgacagccacctgtgcccacccagaatcactgaagggtcagagcattttctctgtgccaccagagagtttcgtgtgcgatgacttcctgaagccacagatcatcacccagccagaaaccaccatggctatggtgggcaaggacatccggtttacatgctcagcagccagcagcagcagctcccccatgacctttgcctggaagaaagacaatgaagtcctgaccaatgcagacatggagaactttgtccacgtccacgcgcaggacggggaagtgatggagtacaccaccatcctgcacctccgtcaggtcactttcgggcacgagggccgctaccaatgtgtcatcaccaaccactttggctccacctattcacataaggccaggctcaccgtgaatgtgttgccatcattcaccaaaacgccccacgacataaccatccggaccaccaccatggcccgcctcgaatgtgctgccacaggtcacccaaaccctcagattgcctggcagaaggatggaggcacggatttccccgctgcccgtgagcgacgcatgcatgtcatgccggatgacgacgtgtttttcatcactgatgtgaaaatagatgacgcaggggtttacagctgtactgctcagaactcagccggttctatttcagctaatgccaccctgactgtcctagagaccccatccttggtggtccccttggaagaccgtgtggtatctgtgggagaaacagtggccctccaatgcaaagccacggggaaccctccgccccgcatcacctggttcaagggggaccgcccgctgagcctcactgagcggcaccacttgacccctgacaaccagctcctggtggttcagaacgtggtggcagaggatgcgggccgatatacctgtgagatgtccaacaccctgggcacggagcgagctcacagccagctgagcgtcctgcccgcagcaggctgcaggaaggatgggaccacggtaggcatcttcaccattgctgtcgtgagcagcatcgtcctgacgtcactggtctgggtgtgcatcatctaccagaccaggaagaagagtgaagagtacagtgtcaccaacacagatgaaaccgtcgtgccaccagatgttccaagctacctctcttctcaggggaccctttctgaccgacaagaaaccgtggtcaggaccgagggtggccctcaggccaatgggcacattgagagcaatggtaaggcctcagtaactgtgaagcagagctctgctgtgactgtgtctctgggtgctggaggtggcctccaggtctttacagggcaggtacctggcattagatggggcaaacttggtgaagtagaaggcggtgtgtgtccaagagatgcaagccactttccagagcccgacactcacagcgttgcctgcaggcagccaaagctctgtgctgggtctgcgtatcacaaagagccgtggaaagcgatggagaaagctgaagggacacctgggccacataagatggaacacggtggccgggtcgtatgcagtgactgcaacaccgaagtggactgttactccaggggacaagccttccacccccagcctgtgtccagagacagcgcacagccaagtgcgccaaatggcccggagccgggtgggagtgaccaagagcattctccacatcaccagtgcagcaggactgccgctgggtcctgccccgagtgccaagggtcgctctaccccagtaaccacgatagaatgctgacggctgtgaagaaaaagccaatggcatctctagatgggaaaggggattcttcctggactttagcaaggttgtatcacccggactccacagagctacagcctgcatcttcattaacttcaggcaggtccagagcgcgcggaagcccagtacttgcttgtttccaatggccacctccccaaagcatgtgacgccagtcccgagtccacgccactgacaggacagctccccgggaaacagagggtgccactgctgttggcaccaaaaagctag

SEQ ID NO: 10038 - DNA, 602 bp, Homo sapiens
  SIMILAR (1)..(162): 961254mologous to Mus musculus SCHIP-1,accession number AF145716,Smith-Waterman Score=267.
  misc_feature (1)...(602): n = a,t,c or g
cggaaccagggccaggcgaggaccaactccacctccgcacagaaaaatgagagagagtctatcagacagaagttggcacttggaagcttctttgatgatggcccaggaatttataccagctgtagcaaaagtgggaagccaagcctttcctcccggcttgaatgaagagttggtccagctgcttctcatccgagatgagctgcacacagagcaggatgccatgctggtggacattgaagacttgaccagacatgctgaaagtcagcagaagcacatggcagagaaaatgcctgcaaagtgaaaagaagccattcaaccagagaacaagctagaatttattttgcttctgtggttgtaaaaatgctgttgctaaaggtgggcgcagaaacaaatatcagtgttagtcattgataatgtctgaagcttaatgtccagtgattggcctttgcttcttaatttattttaattttttacttgtgccacttaatatcaggcattttaataaaatattgttacaaaaaatgtacagtactgacaccaccacnaatcatgggntaataaaagagagtagttttaactttatttttatttggttagagatt

SEQ ID NO: 10039 - DNA, 566 bp, Homo sapiens
  SIMILAR (428)..(565): 1001254mologous to Homo sapiens SCHIP-1-D22/253,accession number AF145714,Smith-Waterman Score=229.
cagaaaacagcagctgcccggtgccagagcaaggaaaggccagggaggctgggcggggcagtgtctgtgggacagagtggggcaagaacacacacggccgggcacagcctcttagccagctctccatgtcagtatgagcagtaaccagggaactgggcaattggcacatcagcctatcagaattcatgggaggttatttcttaagtgaaattctaaagagttaaaggatgaatttggacagtgatggaatggatgacatcatcagtcaagaatcctcattggatatggaggggaattataaaaaggcacagaaaaatgagagagagtctatcagacagaagttggcacttggaagcttctttgatgatggcccaggaattttataccagctgtagcaaaagtgggaagccaagcctttcctcccggcttgaatgaagagttggtccagctgcttctcatccgagatgagctgcacacagagcaggatgccatgctggtggacattgaagacttgaccagacatgctgaaagtcagcagaagcacatggcagagaaaatgcctgcaa

SEQ ID NO: 10040 - DNA, 1787 bp, Homo sapiens
  SIMILAR (3)..(410): 981254mologous to Homo sapiens SCHIP-1-D241/253,accession number AF145715,Smith-Waterman Score=741.
agcgcgaccagcgagggtaccgggatgaccgctctccggcccgggaaccgggggacgtaagcgccaggacccgcagcggcggcggcgggggcaggagcgccaccaccgccatgccgcccccggtgcccaacggcaacctccaccagcacgacccccaggacctcaggcacaatggcaacgtggtggtggctggccggccgagctgttcccggggcccccgccgggcgatccaaaagccccagccggctgggggccggcgcagtggccgcggcccggcggctggggggctctgccttcagcccccagacggcgggacgtgcgtccccgaagagcccccggtgccacctatggattgggaggcgctggagaagcatctggccgggctgcagttccgggagcaggaggtacggaaccaggggccaggcgaggaccaactccacctccgcacagaaaaatgagagagagtctatcagacagaagttggcacttggaagcttctttgatgatggcccaggaatttataccagctgtagcaaaagtgggaagccaagcctttcctcccgactgcagagtgggatgaacttgcagatatgctttgtcaacgacagtgggcagtgataaggacagtgatgctgatgacagtaagactgaaaccagcttggacacccccttgtctcccatgagcaaacagagttcttcctattcttgatagagacactacttgaagaggagtctgaatccttgggatggacatgggacttcctttacaagggcaaaagaaatttgcaagctgaagccaaaatggcccttgccatggccaaaccaatggccaaaatgcaagtagaagtggagaaacagaacaggaaaaagtctcccgtcgctgatcttctgccacacatgcctcatataagtgaatgcttgatgaaaagaagtttaaaacccacggaccttagagaccattataatggggcagttacaagtaatagtcaatgatttcatttcccagtataaaaagcttgaatgaggagtgggtccagctgcttctcatcccaggatgagctgcacacagagcaggatgccatgctggtggacattgaagacttgaccagacatgctgaaagtcagcagaagcacatggcagagaaaatgcctgcaaagtgaaaagaagccatttcaaccagagaacaagctagaatttattttgcttctgtggttgtaaaaatgctgttgctaaaggtggcgcaaaaacaaatatcagtgttagtcattgataatgtctgaagcttaatgtccagtgattggcctttgcttcttaatttattttaattttttacttgtgccacttaatatcaggcattttaaataaaatattggttacaaaaaatgtacagtactgacacccacccacaaatcatgggttaatagaagagagtagtttttaactttatttttatttgtttagagattttaagttgggaacagtattttccccattgactacttttcattcttcactgtagttttaaagaagaactagtaaatgacggtgcgtatacaagtcaaaaaaatacaatgccctgcctcgtaagtgaaagttgtaggctctccgtaagtaatgtatattttactcaggttttcatacattttgtagaatagttgacatacctgaaagttcctttttagatgtgctattaacattctgttggattcagagggttccttgaaagttttatgtataaatatgtaaaataaaaattaaaactttgtttcataaaaaaaaaaaaaaa

SEQ ID NO: 10041 - DNA, 567 bp, Homo sapiens
  SIMILAR (99)..(416): 411254mologous to Caenorhabditis elegans Similar to cuticle collagen,accession number U55366,Smith-Waterman Score=139.
cgcggtcctcgaaccgaaccgcaggacccctgctgtccccgggcagcggccggagcgcgtccctcgggtcctgggaagacctgccgcgtctgcggctgcctgggagcccaggcgccccgggtgctgggggaggagccggcacggccgctgggcgaaaggggcccgggctccctgaggaggcggctgcggacggggcctggcgactcggagaaggctgggcggcggcgagtgaggagcccgcaccacccggcccacacacgagccaacgtggagcgagccctccgcagccaggttgggcccgggccgctggactctccaaccaacccacgaaagacagaatatttggaggaagccataaagccgctccgcaggcctctgcagacagcccaacatctcttcaatgcggggctgcggggcactgtcccaaagccagccgcagggctttgggagacaatcctgaaacagaagcaacttcctccctttctcctactgaatggctacaatgaggatgtaatggctggagctcaagcagccatgttggaccatgaagtagatgccatgtggtga

SEQ ID NO: 10042 - DNA, 429 bp, Homo sapiens; identical to SEQ ID NO: 3963

SEQ ID NO: 10043 - DNA, 767 bp, Homo sapiens; identical to SEQ ID NO: 2960
  SIMILAR (4)..(111): 801254mologous to Homo sapiens Human secreted protein HCHPF68, SEQ ID NO:163,accession number Y86248,Smith-Waterman Score =152.

SEQ ID NO: 10044 - DNA, 693 bp, Homo sapiens
  SIMILAR (108)..(482): 541254mologous to Mus musculus retinitis pigmentosa GTPase regulator,accession number AF286473,Smith-Waterman Score=266.
atgacctttttcccatttgacaaaagagagacagacatacttctcatcctgaattttagtatggagcattgtaccagagggcaagatcctctggggtaccaaacaacaaagaagggattcaaggacacagagactcctgaaaaagagtccctggagagcaaagcagagtgtttgggaagaagaagaaagaagaagaataaggaggagaaagaggagaaggagaagaaggagaaggagaagaaggagaaggagaaggagaagaagaggaagaagaagaggaagaagaagaagaagaagaagaagaagaagaagaagaagaagaagaagaagaagaagaagaagaaggaggaggaggaggaggaggaggaggatgaggaagaggaggaggaggaggaggagaagaagaagaaggagaaggaggagaaggtgaaggagaagaagaaggaggagaagaagaagaagagaaggaggaggagaacaagaagaagagaaggaggaggaggagaaggaggagaaaagcagcagcagcaagtattcactcttagactctgttcctactctactaataagcctctgggttattctgaatactctgccagaactgctgcaaccagcataagcagcaaaatggaaggtgcaaatcctgcaagtagctccagatgtgcagttccacagagggaattcatggcttaa

SEQ ID NO: 10045 - DNA, 5976 bp, Homo sapiens; identical to SEQ ID NO: 5415
  SIMILAR (1957)..(5781): 971254mologous to Homo sapiens putative p150,accession number U93563,Smith-Waterman Score=6519.
  misc_feature (1)...(5976): n = a,t,c or g

SEQ ID NO: 10046 - DNA, 1535 bp, Homo sapiens
  SIMILAR (42)..(1388): 951254mologous to Homo sapiens putative p150,accession number U93574,Smith-Waterman Score=2253.
ggaagcattccctttgaaaactggcacaagacagggatgccctctctcaccgctcctattccatagtgttggaagttctggccagggcaatcaggcagaagaaggaaataaagggtattcaattaggaaaagaggaagtcaaattgtccctgtttgcagacgacatgattgtttatctagaaaaccccattgtctcagcccaaaatctccttaagctgataagcaacttcagcaaagtctcaggatacaaaatcaatgtacaaaaatcacaagcattcttatacaccaagaacagacaaacagagagccaaatcatgagtgaactcccattcacaattgcttcaaagagaataaaatacctaggaatccaacttacaagggatgtgaaggacctcttcaaggagaactacaaaccactgctcaaggaaataaaagaggacacaaacaaatggaagaacattccatgctcatgggtaggaagaatcaatatcgtgaaaatggccatactgcccaaggtaatttacagattcaatgccatccccatcaagctaccaatgactttcttcacagaattggaaaaaactactttaaagttcatatggaaccaaaaaagagcccgcatcgccaagtcaatcctaagccaaaagaacaaagttggaggcatcacactacctgacttcaaactatactacaaggctacagtaaccaaaacagcatggtactggtaccaaaacagagttatagatcaatggaacagaaaagagccctcagaaataacaccgcatacctacaactatctgatctttgacaaacctgagaaaaacaagcaatggggaaaggattccctatttaataaatggtgctgggaaaactggctagccatatgtagaaagctgaaactggatcccttccttacaccttatacaaaaatcaattcaagatggattaaagatttaaatgttagacctaaaaccataaaaaccctagaagaaaacctaggcattaccattcaggacataggcatgggcaaggacttcatgtccaaaacaccaaaagcaatggcaacaaaagccaaaattgacaaatgggatctaattaaactaaagagcttctgcacagcaaaagaaactaccatcagagtgaacaggcaacctacaacatgggagaaaattttcacaacctactcatctgacaaagggctaatatccagaatctacaatgaactcaaacaaatttacaagaaaaaaacaaacaaccccatcaaaaagtgggtgaaggacatgaacagacacttctcaaaagaagatatttatgcagccaaaaaacacatgaaaaaatgctcatcatcactggccatcagagaaatgcaaatcaaaagcttccagaggaaggatcaggcagcaatatttgctattctgcagcctccactggtgataaccaggcaaacagggtctggagtggacctgaagcaaactccaacagacctgaagctgagggacctaactgttagaagaaaaatgaacaaacagaaagaa

SEQ ID NO: 10047 - DNA, 1494 bp, Homo sapiens
  SIMILAR (6)..(1289): 951254mologous to Homo sapiens putative p150,accession number U93572,Smith-Waterman Score=2085.
acgcaataaaaaatgataaaggggatatcaccaccaatcccacagaaatacaaactaccatcagagaatactacaaacacctctatgcaaataaactagaaaatctagaagaaatggataaattcctcgacacatgcactttcccaagactaaaccaggaagaagttgaatatctgaaaagaccaataacaggatccgaaattgtggcaataatcagtagcttaccaaccaaaaaaagtccaggaccagatggattcacagccgaattctaccagaggtacaaggaggaactggtaccattccttctgaaactattccaatcaatagaaaaagagggaatcctccctaattcattttatgaggccagcatcatcctgataccaaagccgggcagagacacaaccaaaaaagagaattttagaccaatatccttgatgaacattgatgcaaaaatcctcaacaaaatactggcaaaccgaatccagcagcacatcaaaaagcttatccaccatgaacaagtgggcttcaaccctgggatgcaaggctggttcaatatacgcaaatcaacaaatgtaatccagcatataaacagaaccaaagacaaaaaccacatgattatctcaatagatgcagaagaggcctttgacaaaattcaacaacccttcatgctaaaaactctcaataaattaggtattgatgggacatatttcaaaataataagagctatctatgacaaacccacagccaatatcatactgaatgggcaaaaactggaagcattccctttgaaaactggcacaaggcagggatgccctctctcaccactcctattcaacatagtgttggaagttctggccagggcaattaggcaagagaaggaaataaagggtattcaattaggaaaagaggaagtcaaactgtccctgtttgcagatgacatgactgtatatctagaaaatcccattgtctcagcccaaaatctccttaagctgataagcaacttcagcaaagtctcaggatacaaaatcaatgtacaaaaatcacaagcattcttatacaccaacaacagacaaacagagagccaaatcatgagtgaactcccattcacaattgcttcaaagagaataaaatacctaggaatccaacttacaagggatgtgaaggacctcttcaaggagaactacaaaccactgctcgaggaaataaaagaggatccaaacaaatgtaagaacattccatgctcatgggtaggaagaatctatatcgtgaaaatggccatactgcccaagtgctcaagctctgctaagggacagactgcctctgcaagtgggtccctgacccccctgcctcctgatggggagagacctcccaaaacgggtcgacagacacctcatacaggagagctccggctggcatcagggcagtaccctgcagggatggagcttccagaggaaggagcaggcagcaatctttgctgctctgcagccaccactg

SEQ ID NO: 10048 - DNA, 617 bp, Homo sapiens
  SIMILAR (300)..(617): 1001254mologous to Homo sapiens putative p150,accession number U93563,Smith-Waterman Score=542.
cattaagccttatgcacactttcaaaaatagattaggcaatatcattcaggacataggcatgggcaaggacttcacgactaaaacagcaaaagcaatggcaacaaaagccaaaattgacaaatgggatctaattaaactaaagagcttctgcagagcaaaagaaactaccatcagagtgaacaggaaacctacagaatgggagaaaatttttgcaatctacccatctgacaaagggctaatatccagaatatacaaagaatttaaacaaatttacaagaaaaaaacaaccccatcaaaagcccaaaatctccttaagctgataagcaacttcagcaaagtctcaggatacaaaatcaatgtacaaaaatcacaagcattcttatacaccaataacagacaaacagagagccaaatcatgagtgaactcccattcacaattgcttcaaagagaataaaatacctaggaatccaacttacaagggatgtgaaggacctcttcaaggagaactacaaaccactgctcaaggaaataaaagaggatacaaacaaatggaagaacattccatgctcatgggtaggaagaatcaatatcgtgaaaatggccatactgcccaag

SEQ ID NO: 10049 - DNA, 1142 bp, Homo sapiens
  SIMILAR (3)..(863): 921254mologous to Homo sapiens putative p150,accession number U93568,Smith-Waterman Score=1343.
aactagaaaagcaagagctaacacattcaaaagctagcagaaggcaagaaataactaagatcagagcagaactgaaggaaatagagacacaaaaaacccttcaaaaaattaacgaatccaggagctggttttttgaaaagatcaacaaaattgatagaccgctagcaagactaataaagaagaaaagagagaagaatcaaacagacacaataaaaaatgataaaggggatatcatcaccgatcccacagaaatacaaactaccatcagagaatactataaacacctctacacaaataaactagaaaatctagaagaaatggataagttcctggacacatacgtcctcccaagactaaaccaggaagaagttgaatctctgaatagaccaataacaggctctgaaattgaggcaataatcaatagcttaccaaccaaaaaaagtccaggaccagatggattcacagccgaattctaccagaggtacaaagaggagctagtaccattccttctgaaactatcccaatcaatagaaaaagagagaatcctccctaactcatcttatgaggccagcatcatcctgattccaaagcctggcagagacacaaccaaaaaagagaattttagaccaatatccttgatgaacatcgatgcaaaaatcctcaataaaatattggcaaacagaacccagcagcacatcaaaaagcttatccaccatgagcaagtgggctgcatccctgggatgcaaggctggttcaacatacgcaaatcaataaatgtaatccagcatataaatagaaccaaagacaaaaaccacatgattatctcaatagatgcagaaaagctgataagcaaattcagcaaagtctcaggacacaaaatcaatgtacaaaaatcacaagcattcttatacaccgataacagacaaacagagagccaaatcatgagtgaactcccattcacaattgcttcaaagagaataaaatacctaggaatccaacttacaagggatgtgaaggacctcttcaaggagaactacaaaccactgctcaatgaaataaaagaggatacaaacaaatggaagaacattccatgctcatgggtaggaagaatcaatattgtgaaaatggccctactgcccaag

SEQ ID NO: 10050 - DNA, 2151 bp, Homo sapiens; identical to SEQ ID NO: 4456
  SIMILAR (1)..(1362): 891254mologous to Homo sapiens putative p150,accession number U93565,Smith-Waterman Score=2008.

SEQ ID NO: 10051 - DNA, 1461 bp, Homo sapiens; identical to SEQ ID NO: 8627
  SIMILAR (433)..(1446): 921254mologous to Homo sapiens putative p150,accession number U93572,Smith-Waterman Score=1645.

SEQ ID NO: 10052 - DNA, 1251 bp, Homo sapiens; identical to SEQ ID NO: 5395
  SIMILAR (154)..(1245): 961254mologous to Homo sapiens putative p150,accession number U93563,Smith-Waterman Score=1846.

SEQ ID NO: 10053 - DNA, 1641 bp, Homo sapiens; identical to SEQ ID NO: 7833

SEQ ID NO: 10054 - DNA, 1419 bp, Homo sapiens; identical to SEQ ID NO: 5408
  SIMILAR (697)..(1416): 951254mologous to Homo sapiens putative p150,accession number U93572,Smith-Waterman Score=1254.

SEQ ID NO: 10055 - DNA, 2265 bp, Homo sapiens; identical to SEQ ID NO: 2285
  SIMILAR (946)..(2256): 951254mologous to Homo sapiens putative p150,accession number U93574,Smith-Waterman Score=2181.

SEQ ID NO: 10056 - DNA, 1794 bp, Homo sapiens; identical to SEQ ID NO: 7841
  SIMILAR (529)..(1758): 951254mologous to Homo sapiens putative p150,accession number U93574,Smith-Waterman Score=2078.

SEQ ID NO: 10057 - DNA, 1659 bp, Homo sapiens; identical to SEQ ID NO: 5397
  SIMILAR (1)..(3411): 961254mologous to Homo sapiens ORF2, encodes a reverse transcriptase homolog,accession number U09116,Smith-Waterman Score= 5709.

SEQ ID NO: 10058 - DNA, 1599 bp, Homo sapiens; identical to SEQ ID NO: 8949
  SIMILAR (16)..(270): 821254mologous to Escherichia coli o463,accession number L10328,Smith-Waterman Score=321.

SEQ ID NO: 10059 - DNA, 1725 bp, Homo sapiens; identical to SEQ ID NO: 7071
  SIMILAR (2)..(424): 921254mologous to Escherichia coli threonyl-tRNA synthetase (thrS; EC 6.1.1.3),accession number V00291,Smith-Waterman Score= 682.

SEQ ID NO: 10060 - DNA, 3171 bp, Homo sapiens; identical to SEQ ID NO: 7867
  SIMILAR (1179)..(559): 901254mologous to Escherichia coli close match to PS00043: HTH_GNTR_FAMILY; similar to E. coli hypoth. 30 kDa protein adjacent to suc operon,accession number L19201,Smith-Waterman Score=970.

SEQ ID NO: 10061 - DNA, 1086 bp, Homo sapiens
  SIMILAR (376)..(1083): 971254mologous to Homo sapiens putative p150,accession number U93574,Smith-Waterman Score=1168.
atgaaaaggaatgaacaaaacctcaaagaactgtggaactatgtaaaagaccaaacctatgactgcttggactacctgaaagagacaaggagaatggagccacgttgggaaaacacacttcaagatatcatccaggagaacttccccaacctagcaagacaggccaacattcaaattcaggaaatccagagaaccccagtaagatactccacaagaaaatcaaccctcaagacacatagtcatcagattctccaagatcaaaatgaaggaaaaaatgttaaaggcagccagagacaagggcaggtcacctacaaggggaagcccgtcagactaaccgtgggcctctcagcagaaaccctacaagccagaagacagttggtgttggaagttctggccagggcaattaggcaggagaaggaaataaagggtattcaattaggaaaagaggaagtcaaattgtccctgtttgcagatgacatgattgtatatctagaaaaccccattgtctcagcccaaaatctccttaagctgataagcaacttcagcaaagtctcaggatacaaaatcaatgtacaaaaatcacaagcattcttatacaccaacagacaaacagagagccaaatcatgagtgaactcccattcacaattgcttcaaatagaataaaatacctaggaatccaacttaccagggatgtgaaggacctcttcaaggagaactacaaaccactgctcaaggaaataaaagaggatacaaacaaatggaagaatattccatgctcatgggtaggaagaatcaatatcgtgaaaatggccatactgcccaaggtaatttacagattcaatgccatccccatcaagctaccaatgactttcttcacagaattggaaaaaactactttaaagttcatatggaaccaaaaaagagcccacatcgccaaggcaatcctaagccaaaagaacaaagctggaggcatcacactacctgacttcaaactatactacaaggctacagtaaccaaaacagcatggtaccggtaccaaaacagagatatagatcaatggaacagaacagagccccagaaataa

SEQ ID NO: 10062 - DNA, 1023 bp, Homo sapiens
  SIMILAR (1)..(492): 931254mologous to Homo sapiens putative p150,accession number U93570,Smith-Waterman Score=760.
atgggagctatttatgacaaacccacagccaatatcatactgaatgggcaaaaactggaagcattccctttgaaaactggcataagacagggatgccctctctcactactcctattcaacatagtgttggaagttctggccagggcaatcaggcaagagaaggaaataaaggttattcaagtaggaaaagaggaagtcaaattgtccctgtttgcagatgacatgattgtgtatctagaagaccccatcatctcagccccaaatctccttaagctgataagcaacttcagcaaagtctcaggatacaaaatcaatgtgcaaaaatcacaagcattcttatacaccaataacagacaaacagagagccaaatcatgagtgaactcccattcacaattgcttcaaagagaataaaatacctgggaatccaacttacaagggatgtgaaggacctcttcaaggaaaactacaaaccactgctcaaggaaataagaggatacaaacaaatggaagaacattccatgctcatgggtaggaagaatcaatatagtgaaaatggccatactgcccaagccatatgtagaaagctgaaactggaccccttccttacaccttatacaaaaattaattcaagatggattaaagacttaaatgttagacctaaaaccataaaaaccctagaagaaaacctaggcaataccattcaggacataggcatggacaaggacttcacgtctaaaacaccaaaagcaatggcaacaaaagccaaaattgacaaatgggatataattaaactaaagagcttctgcacagccaaagaaactaccatcagagtgaacaggcaacctacagaatgggagaaaatttttgcaatctactcatctgacaaagggctaatatccagaatctacaatgaactcaaacaaatttacaagaaaaaatcaaacaaccccatcaaaaagtgggcaaaggatatgaacgacacttctcaaaagaagatatttatgcagccaaaagacacatga

SEQ ID NO: 10063 - DNA, 1569 bp, Homo sapiens
  SIMILAR (145)..(1566): 941254mologous to Homo sapiens putative p150,accession number U93572,Smith-Waterman Score=2430.
atggataaatttctcgacacatacactctcccaagactaaaccaggaagaagttgaatctctgaatagaccaataacaggagctgaaattgtggcaataatcaatagcttaccaaccaaaaagagtccaggaccagatggattcacagctgaattctaccagaggctgataagcaacttcagcaaagtctcaggatacaaaatcaatgtacaaaaatcacaagcattcttatacaccaacaacagacaaacagagagccaaatcatgagtgaactcccattcacaattgcttcaaagagaataaaatacctaggaatccaacttacaagggatgtgaaggacctcttcaaggagaactacaaaccactgctcaacgaaataagagaggatacaaacaaatggaagaacattccatgctcatgggtaggaagaatcaatatcgtgaaaatggccatactgcccaaggtaatttacagattcaatgccatccccatcaagctaccaatgactttcttcacagaattggaagaaactactttaaagttcatatggaaccaaaaaagagcccgcatcgccaagtcaatcctaagccaaaagaacaaagctggaggcatcacgctacctgacttcaaactatactacaaggctacagtaaccaaaacagcatggtactggtaccaaaacagagatagagaccaatggaacagaacagagccctcagaaataatgccacatatctacaactatctgatctttgacaagcctgagaaaaacaagcaatggggaaaggattccctatttaataaatggtgctgggaaaactggctagccatatgtagaaagctgaaactggatcccttccttacaccttacacaagaattaattcaagatggattaaagacttacatgttagacgtaaaaccataaaaaccctagaagaaaacctaggcaataccattcaagacataggcatgggcaaggacttcatgtctaaaacaccaaaagccatggcaacaaaagccaaaattgacaaatgggatctaattaaactcaagagcttctgcacagcaaaagaaactaccatcagagtgaacaggcaacctacaaaatgggagaaaatttttgcaacctactcatctgacaaagggctaatatccagaatctacaatgaactcaaacaaatttacaagaaaaaaacaaacaaccccatcaaaaagtgggcgaaggatatgaacagacacttctcaaaagaagacatttatgcagccaaaaaacacatgaaaaaatgctcatcatcactggccatcagagaaatgcaaatcaaaaccacaatgagataccatctcacaccagttagaatggcgatcattaaaaagtcaggaaacaacaggtgctggagaagatgtggagaaataggaacacttttacactgttggtgggactgtaaaccagttcaaccattgtggaagtcagtgtggcgattcctcagggatctagaactagaaataccatttgacccagccatcccattactgggtatatacccaaagggttataaatcatgctga

SEQ ID NO: 10064 - DNA, 2406 bp, Homo sapiens; identical to SEQ ID NO: 6554
  SIMILAR (841)..(1782): 971254mologous to Homo sapiens putative p150,accession number U93563,Smith-Waterman Score=1639.

SEQ ID NO: 10065 - DNA, 2481 bp, Homo sapiens; identical to SEQ ID NO: 4454
  SIMILAR (784)..(2460): 871254mologous to Homo sapiens putative p150,accession number U93563,Smith-Waterman Score=2393.

SEQ ID NO: 10066 - DNA, 1259 bp, Homo sapiens
  SIMILAR (231)..(1244): 921254mologous to Homo sapiens putative p150,accession number U93563,Smith-Waterman Score=1646.
aaataccaactaccatcagagaatactgtaaagacctctatgcaaataaagtagaaaatctagaagaaatggataaattcctcgacacatacaccctcccaagactaaaccaggaagcagttgaatctctgaatagaccaataacaggctctgaaattgaggcaataattaatagcctacaaccaaaaaaagttcaggaccagatgaattcaaagccgaattctaccagagtgttggaagttctggccagggcaatcaggcaggagaaagaaataaagtgtattcgattaggaaaagaggaagtcaaattgtctctgtttgcagatgacatgattgtatatttagaaaaccccattgtctcagcccaaaatctccttaagctgataagcaacttcagtaaagtctcaggatacaaaatcaatgtgcaaaaatcacaagcattcttatacaccaataccagacaaacagagagccaaatcatgagtgaactcccattcacaattgcttcaaagagaataaaatacctaggaatccaacttacaagggatgtggaagacctcttcaaggagaactacaaaccactgctcaatgaaataaaagaggacccaaacaaatggaagaacattccatgctcatggataggaagaatcagtatcctgaaaatggccatactgcccaaggtaattgatagattcaatgccatccccatcaagctaccaatgactttcttcacagaattggaaaaaactactttaaagttcatatggaaccaaaagagagcccacattgccaagacaatcctaagccaaaagaacaaagctggaggcatcatgctacctgacttcaaacaatactacaaggctacagtaaccaaaacagcatggtactggtaccaaaacagagatagagaccaatggaacagaacagagccctcagaaataataccacacatatacaaccatctggtctttgacaaacctgacaaaaacaagcaatggggaaaggattccctatttaataaatggtgctgggaaaactggctagccatgtgtagaaagctgaaactggattccttccttacaccttatacaaaaattaattcaagatggattaaagacttaaatgttagacctaaaaccataaaaaccctagaagaaaacctaggcaataccattcaggacataggcatgggcaaggacttcatgtctaaaacaccaaaagcaatggcaacaaagccaaaattgacaaatgggatctaa

SEQ ID NO: 10067 - DNA, 997 bp, Homo sapiens
  SIMILAR (152)..(892): 891254mologous to Homo sapiens putative p150,accession number U93563,Smith-Waterman Score=1149.
actaaaccacgaagaacttgaatccctgaatagaccaataacaggttctgaaattcaggcaattattaatagcctaccaaccaaaaaaagtccagaatcagatggattcacagccaaattctaccagagccaatatcatactgaatgggcaaaaactggaagcattccctttgaaaaccggcacaaaacaggatgccctctctcaccactactattcaacatagtggtggatgttccggctagggcaatcaggcaggagaaagaaataaagggtattcaattaggaaaagaggaagccaaattgtccctgtttgcagatgacatgaatgtatatttaaaaatccccatcgtctcagtccaaaatctccttaagctgataagcaacttcagcaaagtctcaggatacaaaatcaatgtgcaaaaatcacaagcattcctatacactaataacagacaaacagagagccaaatcatgagtgaactcccattcacaattgcttcaaagagaataaaatacctaggaatccaacttacaagggatgtgaaggacctcttcaaggagaactacaaaccactgctcaacgaaataaaagaggacacaaacaaatggaagaacattccatgctcatggataggaagaatcaatatcatgaaaatggccatactgcccaaggtaatttatagattcaatgccatccccatcaagctaccaatgactttcttcacagaattggagaaaactgctttaaagttcatatggaaccaaaaaagagcctgcattgccaagacaatcctaagccaaaagaacaaagctggaggtatcacactacctgacttcaaactgtactacaaggctacagtagccaaaacagcatggtactggtaccaaaacagcatggtactggtaccaaaacagagatatagaccagtggaacagaatagagcccttggaaataataccatacacctacaaccatctgatcttcgaaaaacctga

SEQ ID NO: 10068 - DNA, 1126 bp, Homo sapiens
  SIMILAR (362)..(1030): 971254mologous to Homo sapiens putative p150,accession number U93563,Smith-Waterman Score=1104.
gagctggttttttgaaaagatcaacaaaattgatagaccactagcaagagtaataaagaagaaaagagagaagaatcaaatagacgcaataaaaaatgataaagaggatatcaccaccaatcccacagaaatacaaactatcatcagagaatactacaaacacctctacccaaataaactagaaaatctagaagaaatggatacattcctcgacacatacaccttcccaagactaaaccaggaagaagttgaatctctgaatacatcaataacaggctctgaaattgtggcaataatcagtatagcataccaaccaaaaaaagtccaggaccagatggatccacagccgaattctaccagagtgttggaagttctggccagggcaattaggcaggagaaggaaataaagggtattcaattaggaaaagaggaagtcaaattgtccctctttgcagatgacatgattgtatatctagaaaaccccattgtctcagcccaaaatctccttaagctgataagcaacttcagcaaagtctcaggatacaaaatcaatgtacaaaaatcacaagcattcttatacaccaacaacagacaaacagagagccaaatcatgagtgaactcccattcacaattgcttcaaagagaataaaatgcctaggaatccaacttacaagggatgtgaaggacctcttcaaggagaactacaaaccactgctcaaggaaataaaagaggatacaaacaaatggaagaacattccatgctcatgggtaggaagaatcaatatcgtgaaaatggccatactgcccaaggtaatttacagattcaatgccatccccatcaagctaccaatgactttcttcacagatttggaaaaaactactttaaatttcatatggaaccaaaaaagagcccgcatcaccaagtcaatcctaagccaaaagaacaaagccggaggcatcacactacctgacttcaaactatactacacggctacagtaaccaaaacagcatggtactggtaccaaaacagcatggtactggtaccaaaacagagatatagatcaatggaacagaacagagccctcagaaataacgccgcatgtctacaactatctgatctttga

SEQ ID NO: 10069 - DNA, 2061 bp, Homo sapiens; identical to SEQ ID NO: 5423
  SIMILAR (25)..(1092): 951254mologous to Homo sapiens putative p150,accession number U93569,Smith-Waterman Score=1723.

SEQ ID NO: 10070 - DNA, 891 bp, Homo sapiens
  SIMILAR (2)..(442): 891254mologous to Homo sapiens putative p150,accession number U93563,Smith-Waterman Score=671.
accaataacaggatctgaaattgtggcaataatcaatagcttaccaatcaaaaagagtccaggaccagatggattcacagccaaattctaccagaggtacaaggaggaactggtaccattccttctgaaactattccaatcaatagaaaaagagggaatcctccctaactcattttatgaggccagcatcatcctgataccaaagctgggcagagacacaaccaaaaaagagaattttagaccaatatccttgatgaacattgatgcaaaaatcctcagcaaaatactggcaaaccgaatccagcagcacatcaaaaagcttatccaccatgatcaagtgggcttcatccctgggatgcaaggctggttcaatatacgcaaatcaataaatgtaatctagcatatcaccaacaacagacaaacagagagccaaatcatgagtgaactcccattcacaattgcttcaaagagaataaaatacctaggaatccaacttacaagggacgtgaaggacctcttcaaggagaactacaaaccactgctcaaggaaataaaagaggatacaaacaaatggaagaacattccatgctcatgggtaggaagaatcaatatcgtgaaaatggccatactgcccaaggtaatttacagattcaatgccatccccatcaagctaccaatgactttcttcacagaattggaaaaaactactttaaagttcatacggaaccaaaaaagagcctgcatcgccaagtcaatcctaagccaaacaaagctggaggcatcacgctacctgacttcaaactatactacaaggctacagtaaccaaaacagcatgatactggtaccaaaacagagatatagatcaatggaacagaacagagccctcagaa

SEQ ID NO: 10071 - DNA, 1515 bp, Homo sapiens
  SIMILAR (100)..(915): 741254mologous to Homo sapiens putative p150,accession number U93568,Smith-Waterman Score=975.
atgctctttgaaaccaaggagaacaaagacacaacataccagaatctccgggacgcattcaaagcagtgtgtagagggaaatttatagcactaaatgcccacaagagaaagcaggaaagatccaaaattgacaccctaacatcacaattcaaagaactagaaaagcaagagccaatacattcaaaagctagcagaaggcaagaaataactaaaatcagagcagaactgaagatcaacaaaattgatagactgctagcaagactaataaagaaaaagagagagaagaatcaaatagacgcaataaaaaatgataaaggggatatcaccaccgatcccacagaaatacaaactaccatcagagaatactacaaacacctctatgcaaataaactagaaaatctagaagaaatggataaattcctcaacacatacactctcccaagactaaaccaggaagaagttgaatctctgaatagaccaataacaggatctgaaattgtggcaataatcaatagcttaccaaccaaaaagagtccaggaccagatggattcacagccgaattctaccagaggtacaaggaggagctggtaccattccttctgaaactattccaatcaatagaaaaagagggaatcctgcctaactcattttatgaggccggcatcattctgataccaaagctgggcagagacacaaccaaaaaagagaattttagaccaatatccttgatgaacattgatgcaaaaatcctcaataaaatactggcaaaccgaatccagcagcacatcaaaaagcttatccaccatgatcaactgataagcaccttcagcaaagtctcaggatacaaaatcaatgtgcagaaatcacaagcattcttatgcaccaacaacagacaaacagagagccaaatcatgagtgaactcccattcacaattgcttcaaagagaataaaatacctaggaatccaacttacaagggatgtgaaggaccccttcaaggagaactacaaaccactgctcaaggaaataaaagaggagacaaacaaatggaagaacattccatgctcatgggtaggaagaatcaatattgtgaaaatggccatactgcccaagaaatacttacgactgggaaatttacaaagaaaagaggttttattggctcatggttctgcaggctatacaggaagaaaagcagcttccgctcggctgctggggaagcctcagaaaacttttactcaaggcgaaggcaaagccagagcagtcacatcacatggcccaagcaggaaagagaaaaagtcgggaggctgcacaggaagtgtggtatctccttctcatgagggcctcaggaagcttacaatcattcaagaagccaaaggtggagccagtgtgttagatggtgagagtgggagcaagagagagaagaggagcagccagggttgtttcaacaaccagctctcctgtgaactgaggaagaacccacttgtcactaaggagatagtgctaaatgattcatga

SEQ ID NO: 10072 - DNA, 992 bp, Homo sapiens
  SIMILAR (1)..(861): 961254mologous to Homo sapiens putative p150,accession number U93572,Smith-Waterman Score=1418.
atgaacattgatgcaaaaatcctcaataaaatactggcaaaacgaatccagcagcacatcaaaaagcttatccaccatgatccagtgggcttcatccctgggattcaaggctggttcaatatatgcaaatcaataaatgtaatccagcatataaacagaaccaaagacaaaaaccacatgattatctcaatagatgcagaaaaagcctttgacaaaattcaaaaacccttcatgctaaaaactctcaataaattaggtattgatgggacgtatttcaaaataataagagctatctatgacaaacccacagccaatatcatactgaatgggcaaaaactggaagcattccctttgaaaactggcacaagacagggatgccctctctcaccactcctattcaacatagtgttggaagttctggccagggcaatcaggcaggagaaggaaataaagggtattcaattaggaaaagaggaagtcaaattgtccctgtttgcagatgacatgattgtatatctagaaaaccccactgtctcagcccaaaatctccttaagctgataagcaacttcagcaaagtctcaggatacaaaatcaatgtacaaaaatcacaagcattcttttacaccaacaacagacaaacagagagccaaatcatgagtgaactcccattcacaattgcttcaaagagaataaaatacctaggaatccaacttacaagggatgtgaaggacctcttcaaggagaactacaaaccactgctcaaggaaataaaagaggatacaaacaaatggaagaacattccatgctcatgggtaggaagaatcaatattgtgaaaatggccatactgcccaaggtccttctatatgatccactctttgactggaccatgaatcctttgaaagctttgtatttacagcagaggccggaagatgaaactgagcttcaccctactctgaatgcagatgaccaagaatgcaaacgaaatctcag

SEQ ID NO: 10073 - DNA, 2019 bp, Homo sapiens
  SIMILAR (802)..(1995): 921254mologous to Homo sapiens putative p150,accession number U93563,Smith-Waterman Score=1937.
atgacacttctgagaaattcatcaggctgtgaagcgcgccgtgatgaatatcgaacagagtttaccacagctttgcagcgcgttgacttattcatgggtcaattcagcgaagtcctcttaacatctatatccaccttcattaaaggagacctcaccatagctaatcttgggacatcagagggtcgcttcatgcaggttgtggtttctcgatcaggaccatcaacccctcatgtgaattttctcctggactcccatccagtgtctccagaagtgattgtggagcatacattaaaccaaaatggctacacactggttatcactgggaagaagatcacgaagatcccattgaatggcttgggctgcagacatttccagtcctgcagtcaatgcctctctgccccaccctttgttcagtgtggctggtgccacgacaaatgtgtgcgatcggaggaatgcctgagcgggacatggactcaacagatctgtctgcctgcaatctacaagatgagactgaagattatttcccggggtgaggtgggcaaggcaagtggagggtcaacacccatgggtggctgtgagtcttccttcagtgttcccagaaaaaaaagcaaaggctcaacggatgactatactaacatctatacttctagagcagcaaatcccccagcacagtgctctagctctgctaagggacagattgcctcttcaagtgggcccctgacccctgtgcctcctgactgggagacacctcccagcaggggtcgacagacacctcacacaggagagctctggctggcatctgtgttggaatttctggccaggacaaacaggcaggagaaagaaataaagggtattcaattaggaaaagaggaagtcaaattgtccctgtttgcagatgacatgattgtatatttagaaaactccatcgtctcagcccaaagtctccttaagctgataagcaactttagcaaagtctcaggatacaaattcaatgtgcaaaaatcacaagcatttttatacaccaataacagacaaacagagagccaaatcatgagtgaactcccattcacaattgcttcaaagagaataaaatacctaggaatccaacttacaagggatgtgaaggacctcttcaaggagaactacaaaccactgctcaaggaaataaaagaggatacaaacaaatggaagaatattccatgctcatggataggaagaatcaatatcatgaaaatggccatactgcccaaggtaatttatagattcaatgccatccccatcaagctaccaatgactttcttcacagaattggaaaaaactactttaacgttcatatggacccaaaaaagagcctgcattgtcaagtcaatactaagccaaaagaacaaagctggaggcatcatgctacctgacttcaaactatactacaaggctacagtaaccaaaacagcatggtactggcaccaaaacagagatatagatcaatggaacagaacagagccctcagaaataataccacacatctacaactatctgatctttgacaaacctgacaaaaacaaggtatggggaaaggattctctatttaacaaatggtgctgggaaaactggctagccatatggagaaagctgaaactggatcccttccttacaccttatacaaaaatttattcaagatggattaaagatgtaaatgttagacctaaaactataaaaaccttagaagaaaacctaggcaataccattcaggacataggcgtgggcaaggacttcatgtctaaaacaccaaaagcaatggcaacaaaagccaaaattgacaaatgggatctaattaaactaaagagcttctgcacagcaaaagaaactaccatcagagtgaacaggcaacctacagaatgggagaaaatttttgcaatctactcatctgacaaagggctaatatccagaatctacaaagaactcaaaccaatttacaagaaaaatctaacaaccccatcaacaagtaggcaaaggatatga

SEQ ID NO: 10074 - DNA, 1206 bp, Homo sapiens; identical to SEQ ID NO: 3886
  SIMILAR (538)..(1203): 901254mologous to Homo sapiens putative p150,accession number U93563,Smith-Waterman Score=1042.

SEQ ID NO: 10075 - DNA, 1911 bp, Homo sapiens
  SIMILAR (1)..(1173): 971254mologous to Homo sapiens putative p150,accession number U93572,Smith-Waterman Score=1933.
gacacatacactctcccaagactaaaccaggaagaagttgaatctctgaatagaccaataacaggatctgaaattgtggcaataatcaatagcttaccaaccaaaaagagtccaggaccagatggattcacagccgaattctaccagaggtacaaggaggaactggtaccattccttctgaaactattccaatcaatagaaaaagagggaatcctccctaactcattttatgaggccagcatcatcctgataccaaagccgggcagagacacaaccaaaaaagagaattttagaccaatatccttgatgaacattgatgcaaaaatcctcaataaaatactggcaaaccgaatccagcagcacatcaaaaagcttatccaccatgatcaagtgggcttcatccctgggatgcaaggctggttcaatatacgcaaatcaataaatgtaatacagcatataaacagaaccaaagacaaaaaccacatgattatctcaacagatgcagaaaaggcctttgacaaaattcaccaacccttcatgctaaaaactctcaataaattaggtattgatgggacgtatttcaaaataataacagctatctatgacaaacccacagccaatatcatactgaatgggcaaaaactggaagcattccctttgaaaactggcacaagacagggatgccctctctcaccactcctattcaacatagtgttggaagttctggccagggcaattaggcaggaggaaataaaaggcattcatttaggaaaagaggaagtcaaattgtccctgtctgcagacgacatgatagtatatctagaaaaccccactgtctcagcccaaaatctccttaaactgataagcaacttcagcaaagtctcaggatacaaaatcaatgtacaaaaatcacaagcattcttatacaccaacaacagacaaacagagagccaaatcatgagtgaactcccatccacaattgcttcaaagagaataaaatacctaggaatccaacttacaagggatgtgaaggacctcttcaaggagaactacaaaccactgctcaaggaaataaaagaggatacaaacaaatggaagaacattccatgctcatgggtaggaagaatcaatatcgtgaaaatggccatgctgcccaaggtaatttacagattcattacccaagcccttttcagaccaaaagataaagatccctatggaggagtggaacacccctctggctcccaatatcaaagattagatacagacaagccctgtctagagcccaccagctctagatgccagaccacaaagggctcctcagaaagcatgattctcccccactcccctggtgtgcttagcagcagacacgtggctcaccagtgtaactctacccccaccccaatgcatctaagggcagtccttcctctgctgcctgaatacagccctcagaagctggcttctccacgtgctccaggcagaagtaatggttccctcaaatcattcagtttgtacttctctgtgaaaggctgtatggaagagggaaaatcacagggacttgagagtcagagaaacctgggttagtatctttgtggggacccagaacaggagaaggttctgccacaggtccaggttgctgtgcaagctgctctgccatttgggccacatgatccagcaaatccaatggtgtttgaagaggctcctataagtgaattgcagtgcaggcctttgagatttgggagcaaggccctgccatcattcacaggtaactactgtccttctgtgacagcagcccgaagtatggctgtatcctgcaaagccacagggcatgagctgcctaaggccatgggactctacctcttgcatcagtgtgacctggctgtgagacatggagtctaaggagatgattttgga

SEQ ID NO: 10076 - DNA, 2956 bp, Homo sapiens
atgcaccaagcggacctaatagacatctacagaactctccaccccaaatcaacagaatatacatttttttcagcaccacatcacacctattccaaaattgaccacatagttggaagtaaagctctcctcagcaaatgtaatagaacagaaattataacaaactgtctctcagaccacagtgcaatcaaactagaactcaggatcaagaatctcactcaaagccgctcaactacatggaaactgaacaacctgctcctgaatgactactgggtacataacgaaatgaaggcagaaataaagatgttctttgaaaccaacgagaacaaagacacaacataccagaatctctgggacgcattcaaagcagtgtgtagagggaaatttatagcactaaatgcccacaagagaaagcaggaaagatccaaaattgacaccctaacatcacaattaaaagaactagaaaagcaagagcaaacacattcaaaagctagcagaaggcaagaaataactaaaatcagagcagaactgaaggaaatagagacacaaaaaacccttcaaaaaatcaatgaatccaggagctggttttttgaaaggatcaacaaaattgatagaccgctagcaagactaataaagaaaaaaagagagaagaatcaaatagacacaataaaaaatgataaaggggatatcaccaccaatcccacagaaatacaaactaccatcagagaatactacaaacacctctacgcaaataaactagaaaatctagaagaaatggatacattcctcgacacatacactctcccaagactaaaccaggaagaagttgaatctctgaatagaccaataacaggagctgaaattgtggcaataatcaatagtttaccaaccaaaaagagtccaggaccagatggattcacagccgaattctaccagaggtacaaggaggaactggtaccattccttctgaaactattccaatcaatagaaaaagagggaatcctccctaactcattttatgaggccagcatcattctgacaccaaagccgggcagagacacaaccaaaaaagagaattttagaccaatatccttgatgaacattgatgcaaaaatcctcaataaaatactggcaaaccgaatccagcagcacatcaaaaagcttatcccccatgatcaaagccaaagacaaaagcacatgattatctcaatagatgcagaaaaagcctttgacaaaattcaacaacacttcatgctaaaaactctcaataaattaggtattgatgggacatatttcaaaataataagagctatctatgacaaacccacagccaatatcatactgaatgggcaaaaactggaagcattccctttgaaaactggcacaagacagggatgccctctctcaccgctcctattcaacatagtgttggaagttctggccagggcaatcaggcgggagaaggaaataaagggtattcaattaggaaaagaggaagtcaaattgtccctgtttgcagacgacatgattgtttatctagaaaaccccatcgtctcagcccaaaatctccttaagctgataagcaacttcagcaaagtctcaggatataaaatcaatgtacaaaaatcacaagcattcttatacaccaacaacagacaaacagagagccaaatcatgagtgaactcccagtcacaattgcttcaaagagaataaaatacctaggaatccaacttacaagggatgtgaaggacctcttcaaggagaactacaaaccactgctcaaggaaataaaagaggatacaaacaaatggaagaacattccatgctcatgggtaggaagaatcaatatcgtgaaaatggccatactgcccaaggtaatttacagattcaatgccatccccatcaagctaccaatgactttcttcacagaattggaaaaaactactttaaagttcatatggaaccaaaaaagagcccgcatcgccaagtcaatcctaagccaaaagaacaaaactggaggcatcacactacctgacttcaaactatactacaaggctacagtaaccaaaacagcatggtactggtaccaaaacagagatatagatcaatggaacagaacagagccctcagaaataacaccccatatctacaactatctgatctttgacaaacgtgagaaaaacaagcaatggggaaaggattccctatttaataaatggtgctgggaaaactggctagccatatgtagaaagctgaaactggatcccttccttacaccttatacaaaaatcaattcaagatggattaaagatttaaacgttagacctaaaaccataaaaaccctagaagaaaacctaggcattaccattcaggacataggcgtgggcaaggacttcatgtccaaaacaccaaaagcaatggcaacaaaagccaaaattgacaaatgggatctaattaaactgaagagcttctgcacagcaaaagaaactaccatcagagtgaacaggcaacctacaacgtgggagaaaattttcgcaacctactcatctgacaaagggctaatatccagaatctacaatgaactcaaacaaatttacaagaaaaaaacaaacaaccccatcaaaaagtgggcgaaggacatgaacagacagttttcaaaagaagacatttatgcagccaaaaaacacatgaaaaaatgctcatcatcactggccatcagagaaatgcaaatcaaaaccactatgagatatcatctcacaccagttagaatggcaatcattaaaaagtcaggaaacaacaggcggtggcagtggcacaaatccttaggatctcaggaccacccactacacctggtttcttcttatatctctgaagagcagagaactgaaccaggaactaataggcattactgcattacttgtaaagatttcaaggaagtatttttagcttggaggaaag

SEQ ID NO: 10077 - DNA, 1986 bp, Homo sapiens; identical to SEQ ID NO: 4451
  SIMILAR (1)..(855): 1001254mologous to Escherichia coli tartrate dehydratse,accession number U28379,Smith-Waterman Score=1461.

SEQ ID NO: 10078 - DNA, 3156 bp, Homo sapiens
  SIMILAR (421)..(765): 1001254mologous to Escherichia coli DNA polymerase III beta- subunit,accession number L10328,Smith-Waterman Score=598.
atgggagactttaacaccccactgtcaacattagacagatcaatgagacagaaagtcaacaaggatacccaggaattgaactcagctctgcaccaagcagacctaatagacatctacagaactctccaccccaaatcaacagaatatacatttttttcagcaccacaccacacctattccaaaactgaccacatagttggaagtaaagctctcctcagcaaatgtaaaagaacagaaattataacaaactgtctctcagaccacagtgcaatcaaactagaactcaggattaagaatctcactcaaaaccgctcaactacatggaaactgaacaaccagctcctgaatgattactgggcgcataacgaaatgaaggcagaaataaagatgttctttgaaaccaacgagaacaaagacacaacataccagaatctctgggacacattcaaagcagtgtgtagagggaaatttatagcactaaatgcccacaagagaaagcaggaaagatccaaaattgacaccctaacatcacaattaaaagaactagaaaagcaagagcaaacacattcaaaagctagcagaaggcaagaaataactaaaatcagagcagaactgaaggaaatagagacacaaaaaatccttcaaaaaattaatgaatccaggagctggttttttgaaaggatcaacaaaattgatagaccgctagcaagactaataaagaaaaaaagagagaagaatcaaatagacgcaataaaaaatgataaaggggatatcaccaccgatcccacagaaatacaaaataccatcagagaatactataaacacctctacacaaataaattagaaaatctagaagaaatggataaattcctggacacatacactctcccaagattaaaccaggaagaagttgaatctctgaatagaccaataacaggacctgaaattgtggcaataatcaatagcttaccaaccaaaaagagtccaggaccagatggattcacagccaaattctaccagaggtacaaggaggaactggtaccattccttctgaaattattccaatcaatagaaaaagagggaatcctccctaactctttttatgaggccagcatcattctgataccaaagccaggcagagacacaacaaaaaaagagaattttagaccaatatccttgatgaacattgatgcaaaaatcctcaataaaatactggcaaaacgaatccagcagcacatcaaaaagcttatccaccatgatcaagtgggcttcatccctgggatgcaaggctggttcaatatacacaaatcaataaatgtaatccagcatataaacagacccaaagacaaaaaccacatgattatctcaatagatgcagaaaaagcctttgacaaaattcaacaacccttcatgctaaaaactctcaataaattaggtattgatgggacgtatttcaaaataataagtgctatctatgacaaacccacagccaatatcatactgaatgggcaaaaagtggaagcattccctttgaaaactggcacaagacagggatgccctctctcaccactcctattcaacatagtgttggaagttctggccagggcaattaggcaggagaaggaaataaagggtattcaattaggaaaagaggaagttaaattgtccctgtttgcagacgacatgattgtatatctagaaaaccccatcgtctcagcccaaaatctccttaagctgataagcaacttcagcaaagtctcaggatacaaaatcaatgtacaaaaatcacaagcattcttatacaccaacaacagacaaacagagagccaaatcatgagtgaactcccattcacaattgcttcaaagagaataaaatacctaggaatccaacttacaagggatgtgaaggacctcttcaaggagaactacaaaccactgctcaaggaaataaaagaggatacaaacaaatggaagaacattccatgctcatgggtaggaagaatcaatatcgtgaaaatggccatactgcccaaggtaatttacagattcaatgccatccccatcaagctaccaatgactttcttcacagaattggaaaaaactactttaaagttcatatggaacgccctcatcaccaagtcaatcctaagccaaaagaacaaagctggaggcatcacactacctgacttcaaactatactacaaggctacagtaaccaaaacagcatggtactggtaccaaaacagagatatagatcaatggaacagaacagagccctcagaaataacgccgcatatctacaactatctgatctttgacaaacctgagaaaaacaagcaatggggaaaggattccctattgaataaatggtgctgggaaaactggctagccatatgtagaaagctgaaactggatcccttccttacaccttatacaaaaatcaattcaagatggattaaagacttaaacgttagacctaaaaccataaaaaccctagaagaaaacctaggcattaccattcaggacataggcatgggcaaggacttcatgtctaaaacaccaaaagcaatggcaacaaaagccaaaattgacaaatgggatctaattaaactaaagagcttctgcacagcaaaacaaactaccatcagagtgaacaggcaacctacaaaatgggagaaaattttcgcaacctactcatctgacaaagggctaatatccagaatctacaatgaactcaaacaaatttataagaaaaaaacaaacaaccccatcaaaaagtgggcgaaggacatgaacagacacttctcaaaagaagacatttatgcagccaaaaaacacatgaaaaaatgctcatcatcactggccatcagagaaatgcaaatcaaaaccacaatgagataccatctcacaccagttagaatggcaatcattaaaaagtcaggaaacaacagaacttgggaatataacatactttgttctcttgtgcctctcctgtgttccctcttgtggctgcacctgactgaccatcacctaaaagaggacagaacaaaacacttgacagctagtgataaccttgaaaaaacagaactcagcagatggaaggagagagccctactgtatgagcatcgtgtgctgagacctgctattgactcccag

SEQ ID NO: 10079 - DNA, 3325 bp, Homo sapiens
  SIMILAR (552)..(4): 971254mologous to Escherichia coli 37KD protein, similar to YI22-ECOLI,accession number D85613,Smith-Waterman Score=971.
atgggagactttaacaccccactgtcaacattagacagatcaacgagacagaaagtcaacaaggatacccaggaattgaacttagctctgcaccaagcggacctaatagacatctacagaactctccaccccaaatcaacagaatatacatttttttcagcaccacaccacacctattccaaaattgaccgcatagttggaagtaaagctctcctcagcaaatgtaaaagaacagaaattataacaaactatctctcacaccacagtgcaatcaaactagaactcaggattaagaatctcactcaaaaccgctcaactacatggaaactgaacaacctgctcctgaatgactactgggtacatagcgaaatgaaggcagaaataaagatgttctttgaaaccaacgagaacaaagacacaacataccagaatctctgggacacattcgaagcagtgtgtagagggaaatttatagcactaaatggccacaagagaaagcaggaaagatccaaaattgacaccctaacatcacaattaaaagaactagaaaagcaagagcaaacacattcaaaagctagcagaaggcaagaaataactaaaatcagagcagaactgaaggaaatagagatacaaaaaacccttcaaaaaattaatgaatccaggagctggttttttgaaaggatcaacaaaattgatagaccactagcaagactaataaagaaaaaaagagagaagaatctaatagacgcaataaaaactgataaaggggatatcaccaccaatcccacagaaatacaaactaccatcagagaatactacaaacacctctacgcaaataaactagaaaatcgagaagaaatggataaattcctcgacacatacactctcccaagactaaaccaggaagaagttgaatctctgaatagaacaataacaggatctgaaattgtggcaagaatcaatagcttaccaaccaaaaagagtccaggaccagatggattcacagctgaattctaccagaggtacaaggaggaactggtaccattccttctgaaactattccaatcaatagaaaaagagggaatcctccctaactcattttatgaggccagcatcattctgataccaaagccaggcagagacacaaccaaaaaagagaattttagaccaatatcgttgatgaacattgatgcaaaaatcctcaataaaatactggcaaaaggaatccagcagcacatcaaaaagcttatccaccatgatcaagtgggcttcatccctgggatgcaaggctggttcaatatacacaaatcaataaatgtaatccagcatataaacagagccaaagacaaaaaccacatgattatctcaatagatgcagaaaaagcctttgacaaaattcaacaaccctttatgctaaaaactctcaataaattaggtattgatgggacgtatttcaaaataataagagctatctatgacaaacccacagccagtatcatactgaatgggcaaaaactagaagcattccgtttgaaaactggcacaagacagggatgccctctctcaccactcctattcaacatagtgtttgaaattctggcccgggcaattaggcaggagaaggaaataaagggtattcaattaggaaaagaggaagtcaaattgtccctgtttgcaggcgacatgattgtatatctagaaaaccccattgtctcagcccaaaatctccttaagctgataagcaacttcagcaaagtctcaggatacaaaatcaatgtgcaaaaatcacaagcattcttatacaccaataacagacaaacagagagccaaatcatgagtgaactcccattcacaattgcttcaaagagaataaaatacctaggaatccaacttacaagggatgtgaaggacctcttcaaggagaactacaaaccactgctcaaggaaataaaagaggatacaaacaaatggaagaacattccatgctcatgggtaggaagaatcaatatcgtgaaaatggccatactgcccaaggtaatttatagaatcaatgccatccccatcaagctaccaatgcctttcttcacagaattggaaaaatctactttaaagttcatatggaaccaaaaaagagcccgcatcgccaagtcaatcctaagccaaaagaacaaagctggaagcatcacactacctgacttcaaactatactacaaggctacagtaaccaaaacagcatggtactggtaccaaaacagagatatagatcaatggaacagaacagagccctcagaaataacaccgcatatctacaactatctgatctttgacaaacctgagaaaaacaagcaatggggaaaggattccctatttaataaatggtgctgggaaaactggctagccatatgtagaaagctgaaactggatcccttccttacaccttatacaaaaatcaattcaagatggattaaagacttaaacgttagacctaaaaccataaaaaccctagaagaaaacctagggattaccattcaggacataggcataggcgacgacttcatgtctaaaacaccaaaaacaatggcagcaaaagacaaaatcgacaaatgggatctaattaaactaaagagcttctgcacagcaaaagaaactaccatcagagtgaacaggcaacctacaaaatgggagaaaattttcgcaacctactcttctgacaaagggctaatatccagaatctacaatgaactcaaacaaatttttaagaaaaaaacaaacaaccccatcaaaaagtgggtgaaggacatgaacagacacttctcaaaaggagacatttatgctgccaaaaaacacatgaaaaaatgctcatcatcactggccatcagagaaatgcaaatcaaaaccacaatgagataccatctcacaccagttagaatggcaatcattaaaaagtcaggaaacaacaggtgctggaggggatgtggagaaataggaacacttttacactgttggtgggactgtaaactagttcaaccattgtggaagtcagtgtggcgattcctcagggatctagaactggaaataccatttgacccagccatcccattactgggtatatacccaaaggactataaatcatgctgctataaagacacatgcacactaacttggatggagctagaagccattattctaagtgaagtactcaggaatggaaaaaccaaaaaccgtatgttctcacttataagtgggaaccaagatacgggtatgcaaaggcatacagaattctatgatggactttggcgactcagaagagggagggttgaggggg

SEQ ID NO: 10080 - DNA, 1870 bp, Homo sapiens; identical to SEQ ID NO: 9122
  SIMILAR (1)..(1665): 961254mologous to Homo sapiens putative p150,accession number U93563,Smith-Waterman Score=2751.

SEQ ID NO: 10081 - DNA, 1449 bp, Homo sapiens
  SIMILAR (475)..(1404): 971254mologous to Homo sapiens putative p150,accession number U93563,Smith-Waterman Score=1618.
atggcgtccccaggacctgcacccacagccagtcccaaaatccactctgagctgttaacagcaaccagagaagctcagagacatcatcctgtgccccgtggtcaagacctagtgacctcagaatcattctcgctctccttctgcttctcagctgccatcttcatttttgaacttttgggttcaaactcagaaggagtcacagatcttagactgtggctatgccagccagcgcccaggtgcggggagtggacctacaaccccttggagcagtgctgtgatgacggtgtcatcctagacttgaaccagacccggctctgcggctccagctgcaccttctggccctgcttccagcactgctgcctggagtctttgggctctcagaaccagacagttgtgaggttcaaggtcccaggcatgaagccagattgcaagtcctcccctatcaccaggatctgtgcccaggctggagtgcaaataagcaacttcagcaaagtctcaggatacaaaatcaatgtacaaaaatcacaagcattcttatacaccaacaacagacaaacagagagccaaatcatgagtgaactcccattcacaattgcttcacagagaataaaatacctaggaatccaacttacaagggatgtgaaggacctcttcaaggagaactacaaaccactgctcaaggaaataaaagaggatacaaacaaatggaagaacattccatgctcatgggtaggaagaatcaatatcgtgaaaatggccatactgcccaaggtaatttacagattcaatgccatccccatcaagctaccaatgactttcttcacagaattggaaaaaactactttaaagttcatatggaaccaaaaaagagccctcatcgccaagtcaatcctaagccaaaagaacaaagctggaggcatcacactacctgacttcaaactatactataaggctacagtaaccaaaacagcatggtactggtaccaaaacagagatatagatcaatggaacagaacagagccctcagaaataacgccgcatatctacaactatctgatctttgacaaacctgagaaaaacaagcaatggggaaaggattccctatttaataaatggtgctgggaaaactggctagccatatgtagaaagctgaaactggatcccttccttacaccttatacaaaaatcaattcaagatggattaaagacttaaacgttagacctaaaaccataaaaaccctagaagaaaacctaggcattaccattcaggacataggcatgagcaaggacttcatgtctaaaacaccaaaagcaatggcaacaaaagacaaaattgacaaatgggatctaattaaactaaagagcttctgcacagcaaaagaaactaccatcagagttgaacaggcaacctacaaaatgggagaaaatttttgcaacctactcatctga

SEQ ID NO: 10082 - DNA, 2313 bp, Homo sapiens
  SIMILAR (10)..(1644): 571254mologous to Homo sapiens zinc finger protein (583 AA),accession number X51760,Smith-Waterman Score=1660.
atgtttcaggacccagtggcctttgatgatgttgctgtgaacttcacccaggaggagtgggctttgctggatatttcccagaggaaactctacaaggaagtgatgctggaaactttcaggaacctgacctctgtaggaaaaagttggaaagaccagaacattgaatatgagtaccaaaaccccaggagaaacttcaggagtctcatagaaaagaaagtcaatgaaattaaagatgacagtcattgtggagaaacttttacccaggttccagatgacaggctgaacttccaggagaagaaagcttctcctgaaataaaatcatgtgacagctttgtgtgtggagaagttggcctaggtaactcatcttttaatatgaacatcagaggtgacattggacacaaggcctatgagtatcaggaatatggaccgaagccatgtaagtgtcaacaacctaaaaaagccttcagatatcacccctcctttagaacaccacaaagggatcacactggagagaaaccctatgcttgtaaagaatgtggaaaaacttttatttcccattcaagcattcaaagacacgtggtaatgcacagtggggatggaccttataaatgtaaattttgtgggaaagccttccattgtctcagtttatatcttatccatgaaagaattcacactggagagaaaccatatgaatgtaaacaatgtggtaaatcctttagttattctgctacccttcgaatacacgaaagaactcacactggagaaaagccttatgaatgtcagcaatgtgggaaagcatttcatagtcccagatgctatcgtagacatgaaaggattcacacgggagagaaggcttatcaatgtaaggaatgtggaaaagcattcacgtgtccccagtatgttcgtatacatgaaaggacccactctaggaaaaaaccctatgaatgtacgcagtgtgggaaagcattatcctctcttacaagttttcaaacacacataagaatgcactctggagaaagaccttatgaatgtaagatatgtgggaaaggcttttgttctgccaattcatttcaaagacatgaaaaaactcacagtggagagaaaccctataaatgcaagcaatgtggtaaagccttcattcattccagttcccttcgttatcatgaaaggattcacactggagagaaaccctatgagtgtaagcaatgtgggaaggccttcagatcttcctcacaccttcaattgcatggtaggactcacactggagagaagccctatgaatgtcaggaatgtgggaaagccttcagatctatgaagaaccttcaaagtcatgaaaggacacaaacacacgtaagaatacactctggagaaagaccttataaatgtaagctatgtgggaaaggcttttattgtcccaaatcattgcaaagacatgaaaaaactcacactggagagaaactctatgaatgcaagcaatgtggtgaagccttcagtagttccagttcctttcgataccatgaaaggactcacactggagagaaaccctataaatgcaagcaatgtgggaaagccttcagagctgcctcagtccttcgaatgcatggtaggactcaccctgaagataaaccctatgagttgttggaagttctggccagggcaatcaggaaggacaaagaactaaagggtattcaagtaggaaaagaggaagtcaaattgtccctgtttgcagatgacatgattgtatatttagaaaaccctatcatctcagcccaaaatctccttaagctgataagcaacttcagcaaagtctcaggatacaaaatcaatgtgcaaaaatcacaagcattcctatacaccaacaacagacaaacagagagccaaatcatgagtgaactcccattcacaattgcttcaaagagaataaaatacctaggaatccaacttacaagggatgtgaaggacctcttcaaagagaactacaaaccactgctcaacgaaatcaaagaggacacaaacaaatggaagaacattccatgctcgtggataggaagaatcaatatcatgaaaatggccatactgcccaaggtaatttgtagattccatgccatccccatcaagctaccgatgactttcttcacagaattggaaaaaactactttaaagttcatatggaaccaaagaagagcccacattgccaagacaatcctaagccaaaagaacaaagctcaaggcattaggctacctgacttcaaactatactacaaggctacagtaaccaaaacagcatggtactggtaccaaacagagatatag

SEQ ID NO: 10083 - DNA, 1296 bp, Homo sapiens; identical to SEQ ID NO: 5429
  SIMILAR (325)..(1266): 981254mologous to Homo sapiens putative p150,accession number U93565,Smith-Waterman Score=1639.

SEQ ID NO: 10084 - DNA, 1041 bp, Homo sapiens; identical to SEQ ID NO: 5430
  SIMILAR (466)..(1038): 941254mologous to Homo sapiens putative p150,accession number U93574,Smith-Waterman Score=948.

SEQ ID NO: 10085 - DNA, 1716 bp, Homo sapiens
  SIMILAR (1)..(669): 951254mologous to Homo sapiens putative p150,accession number U93563,Smith-Waterman Score=1104.
atgaaggcagaaataaagatgttctttgaaaccaacgagaacaaagacacaacataccagaatctctgggacacattcaaagcagtgtgtagagggaaatttatagcactaaatgcccacaacagaaagcaggaaagatccaaaattgacaccctaacatcacaattaaaagaactagaaaagcaagagcaaacatattcaaaagctagcagaaggcaagaaataactaaaatcagagcagaactgaaggaaatagagacacaaaaaacccttcaaaaaattaatgaatccaggagctggttttttgaaaggatcaacaaaattgatagaccactagcaagactaataaagaaaaaaagacaaaagaatcaaatggacacaataaaaaatgataaaggggatatcaccaccgatcccacagaaatacaaactaccgtcagagaatactacaaacacctctatacaaataaactagaaaatctagaagaaatggataaattcctcgacacatacactctcccaagactaaaccaggaagaagttgaatctctgaatagaccaataacaggagctgaaattgtggcaataatcaatagcttaccaaccaaaaagagtccaggaccagatggattcacagccgaattctaccagaggtacaaggaggaactgcctggcagagacacaaccaaagaagagaattttagaccaatatccttgatgaacattgatgcaaaaatcctcaataaaatactggcaaaccaaatccagcagcacatcaaaaagattatccaccatgatcaagtgggcttcatccctgggatgcaaggctggttcaatatacgcaaatcaataaatgtaatccagcatataaacagagccaaagacaaaaaccacatgattatgtcaatagatgcagaaaaggcctttgacaaaattcaacaacccttcatgctaaaaactctcaataaattagtgttggaagttctggccagggcaattaggcgggagaaggaaataaagggtattcaattaggaaaagaggaagtcaaattgtccctgtttgcagaccacatgattgtatatctagaaaaccccattgtctcagcccaaaatctccttaagctgataagcaacttcagcaaagtctcaggatacaaaatcaatgtacaaaaatcacaagcattcttatacaccaacaacagacaaacagagagccaaatcatgagtgaactcccattcacaattgcttcaaagagaataaaatacctaggaatccaacttacaagggatgtgaaggacctcttcagggagaactacaaaccactgctcaaggaaataaaagaggatacaaacaaatggaagaacattccatgctcatgggtaggaagaatcaatatcgtgaaagtggccatactgcccaaggtaatttacagtttcaatgccatccccatcaagataccaatgcctttcttcacagaattggaaaaaactactttaaagttcatatggaaccaaaaaagagcccgcatcgccaagtcaatcctaagccaaaagaacaaagctggagccatcacactacctgacttcaaactatactacaagcctacagtaaccaaaacagcatggtactcataccaaaacagagataatagatcaatggaacagaacagagccctcagaaataacgccgcatatctacaactatctgatatttga

SEQ ID NO: 10086 - DNA, 2274 bp, Homo sapiens
  SIMILAR (766)..(2145): 961254mologous to Homo sapiens putative p150,accession number U93563,Smith-Waterman Score=2329.
atggtgttgtccggctttgttgttccatttctagagcacaagcatactagatttcgcatccttcttaagggccctaggattttcagaatggtgcccactctggccgcacttgaggagcccttcagcccactgctgcactgtgggagccactctctgggctggccaaagccagagccaactccctctgcttgcgagggagtggggaaggacaggtacctgagggaaccggggctgtgccccggccgcactcgcggcacacgcgagttcggggtgggcatcctctccacagaccccacacttggagcggcctgccggcgccactggccccaggcagcctcagccgcctccctgaaaagtaggactcagggcctgcagcctgccatgcccgagcctctccgcctcccccctgtgggctcctgggcagccggagcctccccagtgggagctgtcccctgctctgtggtgcccagtcccatcgaccgcccaggggctgagcagtgcaggcctgcccgcaaagccagcaaggctcctgagtcgggaggagacttggagaacttttatgtctggctggaggattgtatatgcaccaatcagcactctgtgtctagctctgggttcatgtatgcaccaatcagcactctgtgtctagctaatctggtggggacttggagaacttttgtgtctaactcagggattgtaaacgcattaatcagcaccccgtcaaaacggaccaatcagctttctgtaaaatggaccaatcagcaggatgtggtgttggaagttctggccagggcaattaggcaggagaaggaaataaagggtattcaattaggaaaagaggaagtcaaattgtccctgtttgcagacgacatgattgtatatctagaaaaccccattgtctcagcccaaaatctccttaagctgataagcaacttcagcaaagtctcaggatacaaaatcaatgcacaaaaatcacaagcattcttatacaccaacaacagacaaacagagagccaaatcatgagtgaactcccattcacaattgcttcaaagagaataaaatacctaggaatccaacttacaagggatgtgaaggacctcttcaaggagaactacaaaccactgctcaaggaaataacagaggatacaaacaaatggaagaacattccatgctcatgggtaggaagaatcaatatcgtgaaaatggccatactgcccaaggtaatttacagattcaatgctatccccatcaagctaccaatgactttcttcacagaattggaaaaaactactttaaagttcatatggaaccaaaaaagagcccgcatggccaagtcaatcctaagccaaaagaacaaagctggaggcatcacactacctgacttcaaactatactacaaggctacagtaaccaaaacagcatggtactggtaccaaaacagagatgtagatcaatggaacagaacagagccctcagaaataacgccgcatatctacaactatctgatctttgacaaacctgacaaaaacaagcaatggggaaaggattccctatttaataaatggggctgggaaaactggctagccatatgtagaaagctgaaactggatcccttccttacaccttatacaagaattaattcaagatggattaaagatttaaacgttagacctaaaaccataaaaaccctagaagaaaacctagacattaccattcaggacataggcatgggcaaggacttcatgtctaaaacaccaaaagcaatggcaacaaaagccaaaattgacaaatgggatctaattaaactaaagagcttctgcatagcaaaagaaactaccatcagagtgaacaggcaacctacaaaatgggagaaaatttttgcaacctactcacctgacaaagggctaatatccagaatctacaatgaactcaaacaaatttacaagaaaaaaacaaacaaccccatcaaaaagtgggcgaaagacatgaacagacacttctcaaaagaagacatttatgcagccaaaaaacacatgaaaagatgctcatcatcactggccatcagagaaatacaaatcaaaaccacaatgagataccatctcacaccagttagaatggcaatcattaaaaagtcaggaaacaacagttttctgatggcagaagcctggcccatctggttaagctctccgttcctggaaggaggacatagcagggacttcatacgtggggatgaatcaatgtcaaatgaggaaaaatacaaagaccttaattag

SEQ ID NO: 10087 - DNA, 3657 bp, Homo sapiens; identical to SEQ ID NO: 6045
  SIMILAR (163)..(1932): 951254mologous to Homo sapiens putative p150,accession number U93563,Smith-Waterman Score=2945.

SEQ ID NO: 10088 - DNA, 1710 bp, Homo sapiens
  SIMILAR (646)..(1665): 701254mologous to Homo sapiens putative p150,accession number U93563,Smith-Waterman Score=1094.
aatctctgggacacatttaaagcagtgtgtagagggaaatttatagcactaaatgcccacaagagaaagcaggaaatatctaaaattgacaccctaacatcacaattaaaagaactagagaagcaagaacaaacacattcaaaagctagcagaaggcaagaaataactaagatcagagcagaactgaaggagatagagacacaaaaaacccttcaaaaaatcaatgaatccaggagctggttttttgaaaacatcaaaattgatagacagctagcaagactaataaagaagaaaagagagaagaatcaaatagacacaataacaaacaataaaggggatatcaccaccgatcccatagaaatacaaactaccattagagaatactataaatacctctacgcaaataaactagaaaatctagaagaaatggataaattcctggacacatacaccctcccaagactaaaccaggaagaagttgaatccctgaatacaccaataacaggttctgaaattaaggcaataatcaatagcctaccaaccaaaagaagtccaggaccagacagatccacagctgaatctaccacaggtacaaagaggagctggtactattccttctgaaactattccaatccacagaaaaagagggctggcagagacacaacaaaaaaagagaattttagaccaatatccctgatgaacatcgatgcaaaaatcctcaataaaatactggcaaatcgaatccagcagcacatcaaaaagcttatctaccacgaccaagttggcttcatacctgggatgcaaggctggttcaacatatgcaaatcaataaatgtaatcttccaatacaccaataacagacaaacagagagccaaatcatgagtgaactcccattcacgattgcttcaaagagaataaaatacctaggaatccaacttacaagggatgtgaaggacctcttcaaggagaactacaaaccagtgctcaacgaaataagaggacacaaacaaatggaagaacattccatgctcatggataggaagaatcaatattgtgaaaatggccatactgcccaaggtaatttatagattcaatgccatccccatcaagctaccaatgactttcttcacagaattggaaaagaggaagtcaaattgtccctgtttgcagatgacatgattgtatatctagaaaaccccatcatctcagcccaaaatctccttaagctgataagcaacttcagcaaagtctcagcatacaaaatcaatgtgcaaaaatcacaagcattccgatacaccaataacagacaaacagagagccaaatcatgagtgaactcccattcacaattgcttcaaagagaataaaatacctaggaatccaactaacaagggatgtgaaggacctcttcaaggagaactacagaccactgctcaatgaaataaaagaggatacaaacaaatggaagaacattccatgctcatgggtaggaagaatcaatatcgtgataatggccatactgtccaaggtaatttacagattcaatgccaaccccatcaagctaccaatgactttcttcacagaattggaaaaaactactttaaaggtcatatggaaccaaaaaagagcccgcattgccaagtcaatctaagccaaaagaacaaagctggaggcatcatgctacctgacttcaaactatactacaaggcta

SEQ ID NO: 10089 - DNA, 1248 bp, Homo sapiens; identical to SEQ ID NO: 5453
  SIMILAR (181)..(1173): 891254mologous to Homo sapiens putative p150,accession number U93574,Smith-Waterman Score=1585.

SEQ ID NO: 10090 - DNA, 1887 bp, Homo sapiens
atgggagactttaacaacccactgtcaacattagacagatcaaggagacagaaagtcaacaagggtacccaggaattgaactcagctctgcaccaagcagacctaatagacatctacagaactctccaccccaaatcaacagaatatacatttttttcagcaccacaccacacctattccaaaattgaccacatacttggaagtaaagctctcctcagcaaatgtaaaagaacagaaattataacaaactatctctccgactacagtgcaatcaaactagagctcaggattaagaatctcactcaaaactgctcaactacatggaaactgaacaacctgctcctgaatgactactgggtacataacaaagtgaaggcagaaataaagatgttctttgaagccaaccagaacaaagacacaacatgccagaatctctgggacacattcaaagcagtatgtagagggaaaattatagtattaaatgcccacaagagaaagcaggaaagatccaaaattgacaccctaacatcacaattaaaagaactagaaaagcaagagcaaacacattcaaaagctagcagaaggcaagaaataactaaaatcagagcagaactgaaagaaatagagacacacaaaacccttcaaaaaattaatgaatccaggagctggttttttgaaaggatcaacaaaactgatagaacgctagcaagactaataaagaaaaaaagagagaagaatcaaatagacacaataaaaaatgataaaggggacatcaccactgatcccacagaaatacaaagtaccatcagagaatactacaaacacctctatgcaaataaactagaaaatctagaagaaatggataaattcctcgacacatacactctcccaagactaaaccaggaagaagttgaatctctgaatagaccaataacaggatctgaaattgtggcaataatcaatagcttaccaacaaaaaagagtccaggaccagatggattcacagctgaattctaccagaagtacaaggaggaactgcatataaacagaaccaaagacaaaaaccacatgattatctcaatagatgcagaaaaggcctttgacaaaattcaacaatgcttcatgctaaaaactctcaataaattagtgttggaagttctggccagggcaatcaggcaggagaaggaaataaagggtattcaagtaggaaaagaggatgtcaaattctccctgtttgcagatgacatggttgtatatctagaaaaccccattgtctcagcccaaaatctccttaagctgattagcaacttcagcaaagtctcaggatacaaaatcaatgtacaaaaatcacaagcattcttatacaccaacaacagacaaacagagagtcaaatcatgagtgaactcccattcacaattgcttcaaagagaataaaatacctaggaatccaacttacaagggatgtgaaggacctcttcaaggagaactacaaaccactgctcaaggaaataaaagaggatacaaacaaatggaagaacattccatgctcatgggtaggaagaatcaatatcgtgaaaatggccatactgcctaaggtaatttacagattcaatgccatccccatcaagctagcaatgactttcttcacaggattggaaaaaactcctttaaagttcatatggaaccaaaaaagagcccacatcaccaagtcaatcctgagccaaaagaacaaagctggaggcatcacactacctgacttcaaactatactacaaggctacagtaaccaaaacagcatggtcctggtaccaaaacagatatagatcaatggaacagaacagagccctcagaaataacaccgcatatctacaactatctgatctttga

SEQ ID NO: 10091 - DNA, 1143 bp, Homo sapiens; identical to SEQ ID NO: 5454
  SIMILAR (208)..(858): 961254mologous to Homo sapiens putative p150,accession number U93574,Smith-Waterman Score=1047.

SEQ ID NO: 10092 - DNA, 1545 bp, Homo sapiens
  SIMILAR (1)..(867): 981254mologous to Escherichia coli Glycolate oxidase subunit GlcD,accession number D90811,Smith-Waterman Score=1451.
atggggaaaaaacagaacagaaaaactggaaactctaaaaagcagagcgcctctcctcctccaaaggaacgcagttcctcaccagcaaaggaacaaagctggatggagaatgactttgaagagctcagagaagaaggcttcagactatcaaattactctgagctacgggaggacattcaaaccaaaggcaaagaagttgaaaactttgaaaaaaatttagcagtatgtataactagaataaccaatacagagaactgcctaaaggagctaatggagctgaaaaccaaggctcgagaactacgtgaagaatgcagaagcctcaggagccgatgcgatcaactggaagaaaggtggttggaagttctggccagggcaattaggcaggagaaggaaataaagggtattcaattaggaaaagaggaagtcaaattgtccctgtttgcagacgacatgattgtatatctagaaaaccccattgtctcagcccaaaatctccttaagctgataagcaacttcagcaaagtctcaggatacaaaatcaatgtacaaaaatcacaagcattcttatacaccaacaacagacaaacagagagccaaatcatgagtgaactcccattcacaattgcttcaaagagaataaaatacctaggaatccaacttacaagggatgtgaaggatctcttcaaggagaactacaaaccactgctcaaggaaataaaagaggatacaaacaaatggaagaacattccatgctcatgggtaggaagaatcaatatcgtgaaaatggccatactgcccaaggtaatttacagattcaatgccatccccatcaagctaccaatgactttcgtcacagaattggaaaaaactactttaaagttcatatggaaccaaaaaagagcccgcattgccaagtcaatcctaagccaaaagaacaaagctggaggcatcacactacctgacttcaaagtatactacaaggcttcagtaaccaaaacagcatgtgctctgcggaaacctaacattgattcaggtacagggagaaggcgcatgagactcgaaagcgtagctaaatttcattcgccaaaaagcccgatgatgagcgactcaccacgggccacggcttctgactctctttccggtactgatgtgatggctgctatggggatggcgcaatcacaagccggattcggtatggctgcattctgcggtaagcacgaactcagccagaacgacaaacaaaaggctatcaactatctgatgcaatttgcacacaaggtatcggggaaataccgtggtgtggcaaagcttgaaggaaatactaaggcaaaggtactgcaagtgctcgcaacattcgcttatgcggattattgccgtagtgccgcgacgccgggggcaagatgcagagattgccatggtacaggccgtgcggttgatattgccaaaacagagctgtggggggagaagttgtcgagaaagagtgcggaagatgcaaaggcgtcggctattcaaggatgccagcaagcgcagcatatcgcgctgtga

SEQ ID NO: 10093 - DNA, 3303 bp, Homo sapiens
ctcgaaagtaagggattaacactgaatagtaatgcctggatgaacgacactgtcataattgatagtacagtgggaaaggacacgttctttctcatcacatggaacagtctgcctcccagtatttctctctgggatcccagtggaacaataatggaaaatttcacagtggatgcaacttccaaaatggcctatctcagtattccaggaactgcaaaggtgggcacttgggcatacaatcttcaagccaaagcgaacccagaaacattaactattacagtaacttctcgagcagcaaattcttctgtgcctccaatcacagtgaatgctaaaatgaataaggacgtaaacagtttccccagcccaatgattgtttacgcagaaattctacaaggatatgtacctgttcttggagccaatgtgactgctttcattgaatcacagaatggacatacagaagttttggaacttttggataatggtgcaggcgctgattctttcaagaatgatggagtctactccaggtattttacagcatatacagaaaatggcagatatagcttaaaagttcgggctcatggaggagcaaacactgccaggctaaaattacggcctccactgaatagagccgcgtacataccaggctgggtagtgaacggggaaattgaagcaaacccgccaagacctgaaattgatgaggatactcagaccaccttggaggatttcagccgaacagcatccggaggtgcatttgtggtatcacaagtcccaagccttcccttgcctgaccaatacccaccaagtcaaatcacagaccttgatgccacagttcatgaggataagattattcttacatggacagcaccaggagataattttgatgttggaaaagttcaacgttatatcataagaataagtgcaagtattcttgatctaagagacagttttgatgatgctcttcaagtaaatactactgatctgtcaccaaaggaggccaactccaaggaaagctttgcatttaaaccagaaaatatctcagaagaaaatgcaacccacatatttattgccattaaaagtatagataaaagcaatttgacatcaaaagtatccaacattgcacaagtaactttgtttatccctcaagcaaatcctgatgacattgatcctacacctactcctactcctactcctactcctgataaaagtcataattctggagttaatatttctacgctgattatgctagatataaagggtattcaattaggaaaagaggaagtcaaattgtccctgtttgcagatgacatgattgtatatctagaaaaccccattgtctcagcccaaaatctccttaagctgataagcaacttcagcaaagtctcaggatacaaaatcaatgtacaaaaatcacaagcattcttatacaccaacaacagacaaacagagagccaaatcatgagtgaactcccattcacaattgcttcaaagagaataaaatacctaggaatccaacttacaagggacgtgaaggacctcttcaaggagaactacaaaccactgctcaaggaaataaaagaggatacaaacaaatggaagaacatttcatgctcatggataggaagaatcaatatcgtgaaaatggccatactgcccaagagagaaatcacagggagatgtacagcaatggggccatttaagagttctgtgttcatcttgattcttcaccttctagaaggggccctgagtaattcactcattcagctgaacaacaatggctatgaaggcattgtcgttgcaatcgaccccaatgtgccagaagatgaaacactcattcaacaaataaagggggagtacacgtcacaagatgaggaagggagagtcagagagaaactctctcttcccccgtcaaatatacatacacacacaccacacgcacaagctcgtgtgcacacacacacgcccatgcacacacgcagacatacacgcacacacgcacgtcagaaggacatggtgacccaggcatctctgtatctgcttgaagctacaggaaagcgattttatttcaaaaatgttgccattttgattcctgaaacatggaagacaaaggctgactatgtgagaccaaaacttgagacctacaaaaatgctgatgttctggttgctgagtctactcctccaggtaatgatgaaccctacactgagcagatgggcaactgtggagagaagggtgaaaggatccacctcactcctgatttcattgcaggaaaaaagttagctgaatatggaccacaaggtagggcatttgtccatgagtgggctcatctacgatggggagtatttgacgagtacaataatgatgagaaattctacttatccaatggaagaatacaagcaactgccagttttgaggggggtccagaacagaaggctctgcaacaaatccaggctgctgtgcaagctgctctgccacttgggccatatgacccagcaaatccaatggtgcttgaggtgtcagtggcagatagggatactgtttggagcctttggcaggtccccataggtgaatcacagctaggattttggagcaaggccctgccatcttctgcagataactactctccttttgagagacagctcttggcctgttactgggctttggtggaaactgaatatttgactatgggtcatgaagtcaccatgctccctgaactgcctatcatgacctgggtgctttctgatccatctagttataaaaaatggccagatgtgcaattatatactgattcatgggctgtagccaatggtttggctggatggtcagggacttggaagaagcatgattggaaaattggtgacaaagaaatttggggaagaggcatgtggatggagctctctgagtggtcaaaaactgtgaaggtatttgtatcccatgtgagtgctcaccaacgggtgacctctgcagaggaggattttaataatcaagtggacccggtgacccattctgtggacaccactcagcctctttccccagccacctctgtcatcgcccaatggatccatgaacaaagtggccatggtggcagggatggaggttactcatgggctcagcaacatggacttccattcaccaaggctgacctggctatggccactgctgagtgcccaatttgtcagcagaagagacccacactgagccctccatatggcaccattccttggggtgatcagccagctacctggtggcagattgattatattggacctcttttatcatggaaagagcagaggtttttcctccctggatag

SEQ ID NO: 10094 - DNA, 1827 bp, Homo sapiens; identical to SEQ ID NO: 5436
  SIMILAR (247)..(1563): 961254mologous to Homo sapiens unknown protein,accession number M22334,Smith-Waterman Score=2229.

SEQ ID NO: 10095 - DNA, 1026 bp, Homo sapiens
  SIMILAR (631)..(987): 701254mologous to Ralstonia sp. CH34 putative transposase,accession number AJ243722,Smith-Waterman Score=425.
atgagttccaggtgggcgcgggcttggcgggccctgccgtcggagcggctgtccagcgccgccaccctgggctgtgaggggcttagcacctgggccagcagctgcagaggggcagggctcaggacctgcagccggtcatgccggagcctatccccaacccccaccggggctcggcttgttctcaccgaaaaaccgcctgctccccgcagggcgtttttgagggtcgaccgtatttgtgtcaatggcagtgtgtttggaggggcccaaaatctccttaagctgataagcaacttcagcaaagtctcaggatacaaaatcaatgtacaaaaatcacaagcattcttatacaccaacaacagacaagcagagagccaaatcatgagtgaactcccattcacaattgcttcaaagagaataaaatacctaggaatccaacttacaagggatgtgaaggacctcttcaaggagaactacaaaccactgctcaaggaaataaaagaggacacaaacaaatggaagaacattccatgctcatgggtaggaagaatcaatatcgtgaaaatggccatactgcccaaggtaatttacagattcaatgccatccccatcaagctaccaatgactttcttcacagaattggaaaaaactactttaaagttcatatggaaccaaaaaagagcccgcatcaccaagtcaatcctaagccaaaagaacaaagctggaggcatcacactacctgacttcaaactatactacaaggaaacagtaaccaaaacagcatgggattttgccgatttcggaaccaccatcaaacaggattttcgcctgctggggcaaaccagcgtggaccgcttgctgcaactctctcagggccaggcggtgaagggcaatcagctgttgcccgtctcactggtgaaaagaaaaaccaccctggcgcccaatacgcaaaccgcctctccccgcgcgttggccgattcattaatgcagctggcacgacaggtttcccgactggaaagcgggcagtga

SEQ ID NO: 10096 - DNA, 2241 bp, Homo sapiens; identical to SEQ ID NO: 2293
  SIMILAR (723)..(238): 991254mologous to Escherichia coli K12 putative thiosulfate sulfur transferase,accession number AE000270,Smith-Waterman Score= 835.

SEQ ID NO: 10097 - DNA, 2661 bp, Homo sapiens
  SIMILAR (563)..(718): 361254mologous to Homo sapiens MHC class III region complement,accession number S58715,Smith-Waterman Score=69.
atggagctgaaaaccaaggctcgagaactacgtgaagaatgcagaagcctcaggagccgatgcgatcaactggaagaaagggtatcagcgatggaagatgaaatgaatgaaatgaagcgagaagggaagtttagagaaaaaagaataaaaagaaatgagcaaagcctccaagaaatatgggactatgtgaaaagaccaaatctacatctgattggtgtacctgaaactgatggggagaatggaaccaagttggaaaacactctgcaggatattatccaggagaacttccccaatctagcaaggcaggccaatgttcagattcaggaaatacagagaacgccacaaagatactcctcgagaagagcaactccaagacacataattgtcagattcaccaaagttgaaatgaaggaaaaaatgttaagggcagccagagagaaagaaatacaaactaccatcagagaatattacaaacaccttcacgcaaataaactagaaaatctagaagaaatggataaattcctcgacacatacactctcccaagactaaaccaggaaaaagtagaatctttgaatagaccaataacaggagctgaaattgtggcaataatcaatatttaccaaccaaaaagagtccaggaccagatggattcacagccgaattttaccagagagggaatcctccctaactcattttatgaggccagcatcattctgataccaaagctgggcagagacacagccaaaaaagagaattttagaccaatatccttgatgaacattgatgcaaaaatcctcaataaaatactggcaaaacgaatccagcagcacatcaaaaagcttatccaccatgatcaagtgggcttcatccctgggatgcaaggttggttcaatatacgcaaatcaataaatgtaatccagcatgtaaacagaaccaaagacaaaaaccacatgattatctcaatagatgaagaaaaggcctttgacaaaattcaacagcccttcatgctaaaaactctcaataaattaggtattgatgggatgtatttcataataataagagctatctatgacaaacccacagcccatatcatactgaatgggaaaaaactggaagcattccctttgaaaactggcatgagacagggatgccctctctcaccactcctattcaatatagtgttcaaagttctggccagagcaattaggcaggagaaggaaataaagggtattcaattaggaaaagaggaattcaaattgtccctgtttgcagacgacatgattgtatatctagaaaaccccattgtctcagcccaaaatctccttaagctgataagcaacttcagcaaagtctcaggatacaaaatcaatgtacaaaaatcacaaacattcttatacaccaacaacagacaaacagagagccaaatcatgagtgaactcccattcacaattgcttcaaagagaataaaatacctaggaatccaacttacaagggatgtgaaggacctcttcaaggagaactacaaaccactgctcaaggaaataaaagaggatacaaacaaatggaagaacattccatgctcatgggtaggaagaatcaatatcgtgaaaatggccatactgcccaaggtaatttacagattcaatgccatccccatcaaggtaccaatgactttcttcacagaattggaaaaaactactttaaagttcatatggaaccaaaaaagagcctgcatcgccaagtcaatcctgagccaaaagaacaaagctggaggcatcacactacctgacttcaaactatactacaaggctacagtaaccaaaacagcatggtactggtaccaaaacagagatatagatcaatggaacagaacagagccctcagaaataacgccacatatctacaactatctgatctttgacaaacctgagaaaaacaagcaatggggaaaggattccctatttaataaatggtgctgggaaaactggctagccatatgtagaaagctgaaactggatcccttccttacaccttatacaaaaatcaattcaagatggattaaagatttaaatgttagacctaaaaccataaaaaccctagaagaaaacctaggcattaccattcaggacataggcgtgggcaaggacttcatgtccaaaacaccaaaagcaatggcaaccaaagccaaaattgacaaatgggatctaattaaactaaagagcttctgcacagcaaaagaaactaccatcagagtgaacaggcaacctacaacatgggagaaaattttcgcaacctactcatctgacaaagggctaatatccagaatctacaatgaactcaaacaaatttacaagaaaaaagcaagaagccccgtccctaggggagaggggagagcgccacataaagagagcaccccatgggataaaagaatctcaacagcagcgctggagtcccagatcttccctctgacacagtctacccacatgagaaggaacgagaaaaacatttctggtaatgtgacaaaacgagattctttaacacccccaaaagatcacactagttcaccagcaatggatccaaaccaagacaaaatctctgaatcgtcagaaaaagaattcagaatgtcaactattaagctaatcaagaaggcaccagaaaaa

SEQ ID NO: 10098 - DNA, 1107 bp, Homo sapiens
  SIMILAR (568)..(1104): 891254mologous to Homo sapiens putative p150,accession number U93563,Smith-Waterman Score=798.
atggataaattccttgacacatacactctcccaaaactaaaccaggaagaagttgaatctctgaatagaccaataacaggatctgaaattgtggcaataatcaatagcttaccaaccaaaaagagtccaggaccagatggattcacagccgaattctaccagaggtacaaggaggaactgctgataagcaacttcagcaaactctcaggatacaaaatcaatgtacaaaaatcacaagcattcttatacaccaataacagacaaacagagagccaaatcatgagtgaactcccattcacaattgcctcaaagagaataaaatacctaggaatccaacttacaagggatgtgaaggacctcttcaaggagaactacaaaccactgctcaaggaaataaaagaggatacaaacaaatggaagaacattccatgctcatgggtaggaagaatcaatatcgtgaaaatggccatactgcccaaggacaaaacaagtaaatatattgatgttgatgagaatgagggttctcactgtggaaaaaggaaatacaaatatggaatggagaaagcgttggaaattctggccagggcaatcaggcaggagaaagaaataaagggtattcaattaggaaaagaggaagtcaaattgtccctgtttgcagatgacatgattgtacatttagaaaaccccatcatctcagcccaaaatctccttaagctgataagcaacttcagcaaagtctcaggacacaaaatcaatgtacaaaaatcacaaacattcctatacaccaataacagacaaacagagagccaaatcatgagtggactcccattcaaaattgctacaaagagaataaaatacctaggaatccaacttacaagggatgtgagggatctcttcaagaactacaaaccactgctcaacgaattaaaagagggcacaaacaaatggaagaagaacatcctgtcctcatggataggaagaatcaatatcgtgaaaatggccatactgcccaaggtaatttatagattcaatgccatcctcatcaacctaccaatgactttcttcacggaattggaaaaaactactttaaaattcatatggaactaa

SEQ ID NO: 10099 - DNA, 1668 bp, Homo sapiens
  SIMILAR (100)..(1599): 891254mologous to Homo sapiens putative p150,accession number U93563,Smith-Waterman Score=2294.
atggagtcttttcagtgtgccctaaaggaggtgggccttgatgagccactgagacttgctggcttcaggggagactcagcacattaccagctctggtggctacagggcaaaagtaaagaggcaaaagcagaggcaaaagtaaaggcgactttgtcttgcaccttaggtaccaaaaccgccacagtgttggaagttctggccagggcaatcaggcaggagaaggaaataaagggtattcaattaggaaaagaggaagtcaaattgtccctgtttgcagacgacatgattgtttatctagaaaaccccatcgtctcagcccaaaatctccttaagctgataagcaacttcagcaaagtctcaggatacaaaatcaatgtacaaaaatcacaagcattcttatacaccaacaacagacaaacagagagccaaatcatgagtgaactcccattcacaattgcttcaaagagaataaaatacctaggaatccaacttacaagggatgtgaaggacctcttcaaggagaactacaaaccactgctcaaggaaataaaagaggatacaaacaaatggaagaacattccatgctcatgggtaggaagaatcaatatcgtgaaaatggccatactgcccaagggaatttacagattcaatgccatccccatcaagctaccaatgattttcttcacagaattggaaaaaactactttaaagttcatatggaaccaaaaaagagcccgcatcgccaagtcaatcctaagccaaaagaacaaatctggaggcatcacactacctgacttcaaactatactacaaggctacagtaaccaaaacagcatggtactggtcccaaaacagagatatagatcaatggaacagaacagagccctcagaaataacgccgcgtatctacaactatctgatctttgacaaacctgagaaaaacaagcaatggggaaaggattccctatttaataaatggtgctgggaaaactggctagccatatgtagaaagctgaaactggatcccttccttacaccttatacaaaaatcaattcaagatggattaaagatttaaacgttagacctaaaaccataaaaaccctagaagaaaacctaggcattaccattcaggacataggcgtgggcaaggacttcatgtccaaaacaccaaaagcaatggcaacaaaagccaaaattgacaaatgggatctaattaaactaaagagcttctgcacagcaaaagaaactaccatcagagtgaacaggcaacctacaacatgggagaaaattttcgcaacctactcatctgacaaagggctaatatccagaatctacaatgaactcaaacaaatttacaagaaaaaaacaaacaaccccatcaaaaagtgggcgaaggacatgaacagacacttctcaaaagaagacatttatgcagccaaaaatcacacgaaaaaatgctcatcatcactggccatcagagaaatgccaatcaaaaccacaatgagataccatctcacaccagttataatcagcccctacctggctttgcccctcaacaggccctggcagcttaacacaaaagacagaaacttttgggacctctctggccccacccattgcctgaaacaccagaaaacctccccgggtaacataaggcaagcacagatc

SEQ ID NO: 10100 - DNA, 1945 bp, Homo sapiens
  SIMILAR (280)..(1083): 951254mologous to Homo sapiens putative p150,accession number U93563,Smith-Waterman Score=1321.
atgaaggtcatcttcgcctctattactttagacctcaaccaagggtcaatccatagtgaaatacaaactaccatcagagaatattacaaacaccttcacgcaaataaactagaaaatctagaagaaatggataaattcctcgacacatacactctcccaagactaaaccaggaaaaagtagaatctttgaatagaccaataacaggagctgaaattgtggcaataatcaatatttaccaaccaaaaagagtccaggaccagatggattcacagccgaattttaccagagtgttcaaagttctggccagagcaattaggcaggagaaggagggggagggtattcaattaggaaaagtggaattcaaattgtccctgtttgcagacgacatgattgtatatctagaaaaccccattgtctcagcccaaaatctccttaagctgataagcaacttcagcaaagtctcaggatacaaaatcaatgtacaaaaatcacaaacattcttatacaccaacaacagacaaacagagagccaaatcatgagtgaactcccattcacaattgcttcaaagagaataaaatacctaggaatccaacttacaagggacgtgaaggacctcttcaaggagaactacaaaccactgctcaaggaaataaaagaggatacaaacaaatggaagaacattccatgctcatgggtaggaagaatcaatatcgtgaaaatggccatactgcccaaggtaatttatagattcaatgccatccccatcaagctaccaatgacttccttcacagaattggaaaaaactactttaaagttcatagggaaccaaaaaagagcccgcatcgccaagtcaatcctaagccaaaagaacaaagctggaggcatcacactacctgacttcaaactatactacaaggctacagtaaccaaaacagcatggtactggtaccaaaacagagatatagatcaatggaacagaacagagccctcagaaataacgccacatatctacaactatctgatctttgacaaacctgagaaaaacaagcaatggggaaaggattccctatttaataaatgggattctctctgcgttctcatcaaccacgtgagcccagcaagctcttccacggtggctgcagccttggtggggatgcctgggtttatgctcaaggtctcagggaaccccccctggggccgccacaccgtggtcatcaagcacccactgcgagaagtgcccgggaatgtctgcccgtgtccgtggtcacagggcacacaactgactctgcagcaggagggcacacgactgactctgcagcaggagggcacacgactgactctgcagcaggagggcacacgactgactctgcagcaggagggcacacgactgactctgcagcaggagggcacacgactgactctgcagcaggagggcacacgactgactctgcagcaggagggcacacgactgactctgcagcaggagggcacacgactgactctgcagcaggagggcacacgactgactctgcagcaggagggcacacgactgactctgcagcaggagggcacacgactgactctgcagcaggagggcacacgactgactctgcagcaggagggcacacgactgactctgcagcaggagggcacacgactgactctgcagcaggagggcacacgactgactctgcagcaggagggcacacgactgactctgcagcaggagggcacacgactgactctgcagcaggagggcacacgactgactctgcagcaggagggcacacgactgactctgcagcaggagggcacacgactgactctgcagcaggagggctgtgtggatcccctgacctaccatttgcttcattcagcagcacgtgtcacccctcatcatgcaaacaaaccatccgtgcttgcaaagagttccccgggtgtgg

SEQ ID NO: 10101 - DNA, 3303 bp, Homo sapiens
  SIMILAR (1)..(3156): 961254mologous to Homo sapiens putative p150,accession number U93565,Smith-Waterman Score=5371.
atgggagactttaacaccccactgtcaacattagacagatcaacgagacagaaagtcaacaaggatacccaggaattgaactcagctctgcaccaaggggacctaatagacatctacagaactctccaccccaaatcaacagaatatacatttttttcagcaccacaccacacctattccaaaattgaccacatagttggaagtaaagctctcctcagcaaatggaaaagaacagaaattataacaaactatctctcagaccacagcgcaatcaaactagaactcaggattaagaatctcactcaaagccgctcaactacatggaaactgaacaacctgctcctgaatgactactgggtacataacgaaatgaaggcagaaataaagatgttctttgaaaccaacgagaacaaagacacaacataccagaatctctgggatgcattcaaagcagtgtgtagagggaaatttatagcactaaatgcccacaagagaaagcaggaaagatccaaaattgacaccctaacatcacagttaaaagaactagaaaagcaagagcaaacacattccaaagctagcagaaggcaagaaataactaaaatcagagcagaactgaaggaaatagagacacaaaaaacccttcaaaaaatcaatgaatccaggagctggttttttgaaaggatcaacaaaattgatagaccactagcaagactaataaagaaaaaaagagagaagaatcaaatagacacaataaaaaatgataaaggggatatcaccaccgatcccacagaaatacaaactaccatcagagaatactacaaacacctctattcaaataaactagaaaatctagaagaaatggataaattcctcgacacatacactctcccaagactaaaccaggaagaagttgaatctctgaatagaccaataacaggagctgaaattgtggcaataatcaatagtttaccaaccaaaaagattccaggaccagatggattcacagccgaattctaccagaggtacaaggaggaactggtaccattccttctgaaactattccaatcaatagaaaaagagggaatcctccctaactcattttatgaggccagcatcattctgataccaaagccgggcagagacacaaccaaaaaagagaattttagaccaatatccttgatgaacattgatgcaaaaatcctcaataaaatactggcaaaacgaatccagcagcacatcaaaaagcttatccaccatgatgaagtgggcttcatccctgggatgcaaggctggttcaatatacacaaatcaataaatgtaatccagcatataaacagagccaaagacaaaaaccacatgattatctcaatagatgcagaaaaagcctttgacaaaattcaacaacccttcatgctaaaaactctcaataaattaggtattgatgggatgtatttcaaaataataagagctatctatgacaaacccacagccaatatcatgctgaatgggcaaaagctggaagtattccctttgaaaagcagcacaagacaaggatgccctctctcaccactcctattcaacatggtactgaatgttctggccagggcaatcaggcaagagaaagcaataaagggtattcaaataggaagagaggaagtcaaattgtccctgtttgcagatgacgtgattgtttatctagaaaaccccatcgtctcagcccaaaatctccttaagctaataagcaacttcagcaaagtctcaggatacaaaatcaatgtacaaaaatcacaagcattcctatacaccaacaacagacaaacagagagccaaatcatgagtgaactcccattcacaattgcttcaaagagaataaaatacctaggaatccaacttacaagggatgtgaaggacctcttcaaggagaactacaaaccactgctcaaggaaataaaagaggatacaaacaaatggaagaacattccatgctcatgggtaggaagaatcaatatcgtgaaaatggccatactgcccaaggtaatttatagattcaatgccatccccatcaacctaccaatgactttcttcacagaattggaaaaaactactttaaagttcatatggaaccaaaaaagagcccgcatcgccaagtcaatcctaagccaaaagaacaaagctggaggcatcacactacctgacttcaagctatactacaaggctacagtaaccaaaacagcatggtactggtaccaaaacagagatatagatcaatggaacagaacagagccctcagaaataatgctgcatacctacaactatctgatctttgacaaacctgagaaaaacaagcaatggggaaaggattccctatttaataaatggtgctgggaaaactggctagccatatgtagaaagctgaaactggatcccttccttacaccttatacaaaaatcaattcaagatggattaaagatttaaacgttagacctaaaaccataaaaaccctagaagaaaacctaggcattaccattcaggacataggcgtgggcaaggacttcatgtccaaaactccaaaagcaatggcaaccaaagccaaaattgacaaatgggatctaattaaactaaagagcttctgcacagcgggggaaactaccatcagagtgaacaggcaacctacaacatgggagaaaattttcgcaacctactcatctgacaaagggctaatatccagaatctacaatgaactcaaacaaatttacaagaaaaaaacaaacaaccccatcaaaaagtgggcgagggacatgaacagacacttctcaaaagaagacatttatgcagccaaaaaacacatgaaaaaatgctcatcatcactggccatcagagaaatgcaaatcaaaaccactatgagataccatctcacaccagttagaatggcaatcattgaaaagtcaggaaacaacaggtgctggagaggatgtggagaaataggaacacttttacactgttggtgggactgtaaactagttcaaccattgtggaagtcagtgtggcgattcctcagggatctagaactagaaataccatttgacccagccatcccattactgggtatatacccaaaggactataaatcatgctgctataaagacacatgcacacattcacagaccattcttcagaaagtttggaccaacgatgtcaagtttgccattctatctcctgaatgtgtggcaaacatcactagtcagttattgagttctttcctgctgagtgttccagtcagctactgccagttaattcttgag

SEQ ID NO: 10102 - DNA, 1382 bp, Homo sapiens
  SIMILAR (292)..(1200): 941254mologous to Homo sapiens putative p150,accession number U93563,Smith-Waterman Score=1437.
atggagctgaaaaccaaggctcgagaactacgtgaagaatgcagaagcctcaggagccgatgcgatcaactggaagaaagggtatcagcaatggaagatgaaatgaatgaaatgaagcgagaagggaagtttagagaaaaaagaataaaaagaaatgagcaaagcctccaagaaatatgggactatgtgaaaagaccaaatctacgtctgattggtgtacctgaaagtgatggggagaatggaaccaagttggaaaacactctgcaggatattatccaggagaacttccccaatctagcaaggcaggccaaccatataaacagagccaaagacaaaacccacatgattatctcaatagatgcagaaaaagcctttgacaaaattcaacaactcttcatgctaaaaactctcaataaattaggtattgatgggacgtatttcaaaataataagagctatctatgacaaacccacagccaatatcatactgaatgggcaaaaactggaagcattccctttgaaaactggcacaagacagggatgccctctctcaccgctcctattcaacatagtgttggaagttctggccagggcaatcaggcaggagaaggaaataaagggtattcaattagcaaaagaggaagtcaaattgtccctgtttgcagacgacatgattgtttatctagaaaaccccatcgtctcagcccaaaatctccttaagctgataagcaacttcggcaaagtctcaggatacaaaatcaatgtacaaaaatcacaagcattcttatacaccaacaccagacaaacagagagccaaatcatgagtgaactcccattcacaattgcttcaaagagaataaaatacctaggaatccaacttacaagggatgtgaaggacctcttcaaggagaactacaaaccactgctcaaggaaataaaagaggacacaaacaaatggaagaacattccatgctcatgggtaggaagaatcaatatcgtgaaaatggccatactgcccaaggtaatttacagattcaatgccatccccatcaagctaccaatgactttcttcacagaattggaaaaaactactttaaagttcatacagaaccaaaaaggagcctgtattgccaagtcaatcctaagccaaaagaccaaagctggaggcatcacactacctgacttcaaactatactgtaaaggctacagtaaccaaaacagcatggttcacagaaaggcagcaaagtgttgtgtgaaccctggtgctgtggacctcagagactttggccccaccttgctctctggccacctctcctggctgtctcactccctgcacgctctcaccctccgcttggcagctctgatgctcttcgatttatccag

SEQ ID NO: 10103 - DNA, 656 bp, Homo sapiens
  SIMILAR (163)..(303): 821254mologous to Homo sapiens line-1 reverse transcriptase,accession number U83303,Smith-Waterman Score=201.
atgcctcctgtagacgcatcgcgcgaccttcgggaactaaatcccctttccagctataaagcgaagccaaacgaatacctgctgcttgtgcaagttttgtttttgaaccgaaatacaaaagagggcttgatacgacttctagctcggtacccggatgacctccaacaaacagagagccaaatcatgagtgaactcccattcacaattgcttcaaagagaataaaatacccaggaatccaacttacaaaggatgtggaggacctcttcaaagagaactacaaaccactgctcagcaaaataagaggatgcaaacaaatggaagaacattccatgctcatggataggaagaatcaatatcgtgaaaatggccgtactgcccaagaagaaaatctgggtttagtcataaaagtaacacaagacgtagctgaagaccaggtatcgaatctagcgttggcagactgggccaaatggaaggattctaaggtttccttcttagcggtgagtttaactgaatcattaatgcacttttaaagaggcaggaaagacagtgccctgtatagttagaacaagatgctgggagcgagcctctcaagaatcagaggccatcattggagaggcctggattctggcgatttaacgaattcctgatgacatag

SEQ ID NO: 10104 - DNA, 2218 bp, Homo sapiens
  SIMILAR (16)..(1923): 691254mologous to Homo sapiens putative p150,accession number U93565,Smith-Waterman Score=2046.
atggaagatgaaatgaatgaaatgaagcgagaagggaagtttagagaaaaaagaataaaaagaaatgagcaaagcctccaagaaatatgggactatgtgaaaagaccaaatctacatctgattggtgtacctgaaagtgatgtggagaatggaaccaagttggaaaacactctgcaggatattatccaggagaacttccccaatctagcaaggcaggccaacgttcagattcaggaaatacagagaacgccacaaagatactcctcgagaagagcaactccaagacacataattgtcagattcaccaaagttgaaatgaaggaaaaaatgttaagggcagccagagagaaagggcactgtaactctggcaaaagtcacagatccctttgggaacaaaacaagggaatatttaccacatgtatttgtgatgatgccgaggacttacagtctccttcaactgctggaccctggtttggggttctttataccaaaggtggaccctaccctcaggaagacatattcagtgaagaagttcatacaggccctaagttgaggaagaaaattcaagagtaccagttaacaagcaaatggtcaaaaagtgatgttcaggtttctgtggagaggagaatggctggaggaaatccaaaccagtgccatattggggaagttctcctggatggattcacagctgaattctaccggaggtacaaggaggaactggtaccattccttctgaaactattccaatcaatagaaaaagagggaatcctccctaactcattttatgaggccagcatcattctgatacaaaagccaggcagagacacaacaaaaaaagagaattttagaccaatatccttgatgaacattgatgcaaaaatcctcaataaaatactggcaaaacgaatccagcagcacatcgaaaagcttatccaccatgatcaagtgggcttcatccctgtgatgcaaggctggttcaatatatgcaaatcaataaatgtaatccagcatataaacagagccaaagacaaaaaccacatgattatctcaatagatgcagaaaaagcctttgataaaattcaacaacccttcatgctaaaaactctcaataaattaggtattgatgggatgtatttcaaaataataagagctatctatgacaaacctacagccaatatcatactgaatgggcaaaaactggcagcattccctttgaaaactggcacaagacagggatgccctctctcaccactcctattcaacatagtgttggaagtcctggccagggcaatcaggcaggagaaggaaataaagggtattcaattaggaaaagaggaagtcaaattgtccctgtttgcagatgacatgatcgtatatctagaaaaccccattgtctcagcccaaaatctccttaagctgataagcaacttcagcaaagtctcaggatacaaaaaaaaaatcaatgtacaaaaatcacaagcattcttatacaccaataacagacaaacagagagccaaatcatgagtaaactcccattcacaattgcttcaaagagaataaaatacctaggaatccaacttacaagggacgtgaaggacctcttcaaggagaactacaaaccactgctcaaggaaataaaagaggatacaaacaaatggaagaacattccatgctcatgggtaggaagaatcaatatcgtgaaaatggccatactgcccaaggtaatttatagattcaatgccatccccatcaagctaccagtgactttcttcacagaattggaaaaaactactttaaagttcatatggaaccaaaaaagagcccgcatagccaagtcaatcctaagccaaaagaacaaagctggaggcatcacactacctgacttcaaactatactacaaggctacagtaaccaaaacagcatgttcccagtcagctcccatggaattaggcttcaggccaatccctgtggactcagggactaggaccatccctgaaccaggcctgaccccatggacccaggcttcaggatggacaccaaagacatgtgcttcaggcttcttcctacagatccagttgacaagtccactctggtggactccagtactaggcttgcaccacaaacccaggattcaggtctacacagaaggcccaagccccaggccagcgcctttagactcagatgccagctctacccacctgctgactcaggcatcag

SEQ ID NO: 10105 - DNA, 2562 bp, Homo sapiens; identical to SEQ ID NO: 2291
  SIMILAR (1)..(1080): 961254mologous to Homo sapiens putative p150,accession number U93563,Smith-Waterman Score=1780.

SEQ ID NO: 10106 - DNA, 3169 bp, Homo sapiens
  SIMILAR (196)..(3000): 981254mologous to Homo sapiens putative p150,accession number U93569,Smith-Waterman Score=4774.
atgtcaagtgaatgggagtggttgaggtgctcagaagttaaaggtcagagagacgtgaggccagggtgtttggggtgggactttcgtgtgtatattgttgaggacacccaggatgaggacagaacttggagtgtcaaggaagcctgtgagctggtccttagagttcaggaaatgatcatcacaagggtggtagatgctgcaccacaccacacctattccaaaattgaccacatagttggaagtaaagctctcctcagcaaatgtaaaagaacagaaattataacaaactgtctctcagaccacagtgcaatcaaactagaactcaggattaagaatctcactcaaagccgctcaactacatggaaactgaacaacctgctcctgaatgactactgggtacataacgaaatgaaggcagaaataaagatgttctttgaaaccaacgagaacaaagacaccacataccagaatctctgggacgcattcaaagcagtgtgtagagggaaatttatagcactaaatgcctacaagagaaagcaggaaagatccaaaattgacaccctaacatcacaattaaaagaactagaaaagcaagagcaaacacattcaaaagctagcagaaggcaagaaataactaaaatcagagcagaactgaaggaaatagagacacaaaaaacccttcaaaaaatcaatgaatccaggagctggttttttgaaaggatcaacaaaattgatagaccgctagcaagactaataaagaaaaaaagagagaagaatcaaatagacgcaataaaaaatgataaaggggatatcaccaccgatcccacagaaatacaaactaccatcagagaatactacaaacaactctacgcaaataaactagaaaatctagaagaaatggatacattcctcgacacatacactctcccaagactaaaccaggaagaagttgaatctctgaatagaccaataacaggctctgaaattgtggcaataatcaatagtttaccaaccaaaaagagtccaggaccagatggattcacagccgaattctaccagaggtacaaggaggaactggtaccattccttctgaaactattccaatcaatagaaaaagagggaatcctccctaactcattttatgaggccagcatcattctgataccaaagccaggcagagacacaaccaaaaaagagaattttagaccaatatccttgatgaacattgatgcaaaaatcctcaataaaatactggcaaaccgaatccaacagcacatcaaaaagcttatccaccatgatcaagtgggcttcatccctgggatgcaaggctggttcaatatacgcaaatcaataaatgtaatccagcatataaacagagccaaagacaaaaaccacatgattatctcaatagatgcagaaaaggcctttgacaaaattcaacaacccttcatgctaaaaactctcaataaattaggtattgatgggacgtatgtcaaaataataagagctatctatgacaaacccacagccaatatcatactgaatgggcaaaaactggaagcattccctttgaaaactggcacaagacagggatgccctctctcaccgctcctattcaacatagtgttggaagttctggccagggcaatcaggcaggagaaggaaataaagggtattcaattaggaaaagaggaagtcaaattgtccctgtttgcagacgacatgattgtttatctagaaaaccccatcgtctcagcccaaaatctccttaagctgataagcaacttcagcaaagtctcaggatacaaaatcaatgtacaaaaatcacaagcattcttatacaccaacaacagacaaacagagagccaaatcatgggtgaactcccattcacaattgcttcaaagagaataaaatacctaggaatccaacttacaagggatgtgaaggacctcttcaaggagaactacaaaccactgctcaaggaaataaaagaggatacaaacaaatggaagaacattccatgctcatgggtaggaagaatcaatatcgtgaaaatggccatactgcccaaggtaatttatagattcaatgccatccccatcaagctaccaatgactttcttcacagaattggaaaaaactactttaaagttcatatggaaccaaaaaagagcccgcattgccaagtcaatcctaagccaaaagaacaaagctggaggcatcacactacctgacttcaaactatactacaaggctacagtaaccaaaacagcatggtactggtaccaaaacagagatatagatcaatggaacagaacagagccctcagaaataacgccgcatatctacaactatctgatctttgacaaacctgagaaaaacaagcaatggggaaaggattccctatctaataaatggtgctgggaaaactggctagccatatgtagaaagctgaaactggatcccttccttacaccttatacaaaaatcaattcaagatggattaaagacttaaacgttagacctaaaaccataaaaaccctagaagaaaacctaggcaataccattcaggacataggcatgggcaaggacttcatgtctaaaacaccaaaagcaatggcaacaaaagacaaaattgacaaatgggatctaattaaactaaagtgcttctgcacagcaaaagagactaccatcagagtgaacaggcaacctacaaaatgggagaaaattttcgcaacctactcatctgacaaagggctaatatccagaatctacgatgaactcaaacaaatttacaagaagaaaacaaacaaccccatcaaaaagtgggcaaaggacatgaacagacacttctcaaaagaagacatttatgcagccaaaaaacacatgaaaaaatgctcatcatcactggccatcagagaaatgcaaatcaaaaccacaatgagatactatctcataccagttagaatggcaatcattaaaaagtcaggaaacaacagacgcacagcaactttaagtttgctgccagctatacgtcatgaaagggaagcttttcatcaaagggaagaagaaaaggaagggggaagaatcctacttttacaaaacagagtaattctttgctcctgctccctttgcccacatctctcacctgcgtccaaaccaaaacaca

SEQ ID NO: 10107 - DNA, 2107 bp, Homo sapiens
  SIMILAR (1)..(894): 971254mologous to Homo sapiens putative p150,accession number U93563,Smith-Waterman Score=1482.
atgaaggcagaaataaaaatgttctttgaaaccaacgagaacaaagacacaacataccagaatctctgggacgcattcaaagcagtgtgtagagggaaatttatagcactaaatgcccacaagagaaagcaggaaagatccaaaattgacaacctaacatcacaattaaaagaactagaaaagcaagagcaaacacattcaaaagctagcagaaggcaagaaataactaaaatcagagcagaactgaaggaaatagagacacaaaaaacccttcaaaaaatcaatgaatccaggagctggttttttgaaaggatcaacaaaattgatagaccgctagcaagactaataaagaaaaaaagagagaagaatcaaatagacacaataaaaaatgataaatgggatatcaccaccgatcccacagaaatacaaactaccatcagagaatactacaaacacctctacgcaaataaactagaaaatctagaagaaatggataaattcctcgacacatacactctcccaagactaaaccaggaagaagttgaatctctgaatagaccaataacaggatctgaaattgtggcaataatcaatagcttaccaaccaaaaagagtccaggaccagatggattcacagccgaattctaccagaggtacaaggaggaactggtaccattccttctgaaactattccaatcaataggaaaagagggaatcctccctaactcattttatgaggccagcatcattctgataccaaagccaggcagagacacaaccaaaaaagcaaattttagaccaatatccttgatgaacattgatgcaaaaatcctcaataaaatactggcaaaacgaatccagcagcacatcaaaaagcttatccaccatgatcaacatataaacaaagccaaagacaaaaaccacatgattatctcaatagatgcagaaaaagcctttgacaaaattcaacaacccttcatgctaaaaactctcaataaattaggtattgatgggacgtatttcaaaataataagagctatctatgacaaacccacagccaatatcatactgaatgggcaaaaactggaagcattccctttgaaaactggcacaagacagggatgccctctctcaccactcctattcaacatagtgttggaagttctggccagggcaattaggcaggagaaggaaataaagggtattcaattaggaaaagaggaagtcaaattgtccctgtttgcagatgacatgattgtatatctagaaaaccccattgtctcagcccaaaatctccttaagctgataagcaacttcagcaaagtctcaggatacaaaatcaatgtacaaaaatcacaagcattcttatacaccaacaacagacaaacagagagccaaatcatgagtgaactcccattcacaattgcttcaaagagaataaaatacctaggaatccaacttacaagggatgtgaaggacctcttcaagggagaactacaaaccactgctcaaggaaataaaagaggatacaaacaaatggaagaacattccatgctcatgggtaggaagaatcaatatcgtgaaaatggccatactgcccaagggattttgccgatttcggaaccaccatcaaacaggattttcgcctgctggggcaaaccagcgtggaccgcttgctgcaactctctcagggccaggcggtgaagggcaatcagctgttgcccgtctcactggtgaaaagaaaaaccaccctggcgcccaatacgcaaaccgcctctccccgcgcgttggccgattcattaatgcagctggcacgacaggtttcccgactggaaagcgggcagtgagcgcaacgcaattaatggattttgccgatttcggaaccaccatcaaacaggattttcgcctgctggggcaaaccagcgtggaccgcttgctgcaactctctcagggccaggcggtgaagggcaatcagctgttgcccgtctcactggtgaaaagaaaaaccaccctggcgcccaatacgcaaaccgcctctccccgcgcgttggccgattcattaatgcagctggcacgacaggtttcccgactggaaagcgggcagtga

SEQ ID NO: 10108 - DNA, 1692 bp, Homo sapiens
atggtgaggaaatacagggaagtctggtggcacctgagaggacaagggcatagctcaacaaaaggcagcagaaacttctgcagacttaaacatccctgtctgacagctttgaagagagtagtggttctgccagcatggagtctgagatctgagaatggacagactgcctcctcaagtgggtccctgacccccgagaagcctaactgggaggcaccgcccagtaggggccaactgacaactcatacagctgggtgcccctctgagatgaagctttcagagaaacgatcaggcagcaacatttgctgttctgcagtatctgcagttctacagcctctcctggtgatacccaggcaaacagggtctggagtggacctccagcaaactccaacagacctgcagctgagggtcctgactgttagaaggaaaactaacaaacagaaaggacatccacaccaaaacctcatctgtacatcaccatcatcaaacaccaaagagatacaaactaccatcagagaatactataaacaactctatgcaaataaactagaaaatctagaagaaatggataaattcctggacacatacaccctcccaagacttaaccaggaagaagttgaatccgtgaatagaccaataacaggctctgaaattgaggcaataattaaaagcctaccaaccaaaaaaagtccagcaccagacggattcacagccgaattctaccagaggtacaaggaggagctgctgataagcaacttcagcaaagtctcaggatacaaaatcaatgtgcaaaaatcacaagcattcctatacaccaataacagacaaacagagagccaaatcatgagtgaactcccattcacaattgcttcaaagagaataaaatacctaggaatccaacttacaagggatgtgaaggacctcttcaaggagaactacaaatcactgctcaacgaaataaaagaggatgcaaacaaatggaagaacattccatgctcatggataggaagaatcaatatcgtgaaaatggccatactgcccaagaattggaaaaaactacttttatggttcatttggaaccataaaagagcctgtattgccaagacaatcctaagccaaaagaacaaagctggaggcatcacactacctgacttcaaactatactacaaggctacagtaaccaaaacagcatggtactggtaccaaaacatagatatagaccaatggaacagaacagagccctcaaaaataataccacgcatctacaacaatctgatctttgacaaacctgacaaaaacaagaaatggggaaagtactccctatttaataaatggtgcttggaaaactggctagccatatgtagaaagctgaaactggatcccttccttacatcttatacaaaaattaattcaagatggattaaagacttaaatgtcagacctaaaaccataaaaaccctagagggaaacctaggcaataccattcaggacataggcatgggcaaggacttcatgtctaaaacaccaaaagcaatggcaacaaaagccaaaattgacaaatgggatctaaataatctaaagagcttctgcacagcgaaagaaactaccatcagagtgaacatgcaacctacagaatgggagaaaatttttgcaatctacccatctgacaaagggctaatatccacaatctactaa

SEQ ID NO: 10109 - DNA, 2049 bp, Homo sapiens
  SIMILAR (440)..(1195): 981254mologous to Homo sapiens putative p150,accession number U93574,Smith-Waterman Score=1250.
atggggagaaaccagagcagaaaagctgaaaattctaaaaaccagagtgcctcttctcctccaaaggattgcagctcttcgccagcaatggaacaaagctggacagagaatgactttgatgagttgacagaagtaggcttcagaaggtcagtaataacaaacttctctgagctaaaggagcatgttgaaaccaatctcaaggaagctaaacacctagaaaaaaggttagacaaatggttaactagaataaagagtgtagagaagatattaaatgacctgatggagctgaaaaccatggcacaagaacttcatgacacatgcagaagcttcaatagccaatttaatcaagtggaagaaagggtatcagtgattgaagatcaaattaatgaaatgaatattgatggaacatacctcaaaatcataagagctatttatgataaagcctccaagaaatatcatactgaatcagcaaaaactggaagcattccctttgaaaactggcacaagacagggatgccctctctcaccactcctattcaacatagtgttggaagttctggccagggcaattaggcaggagaaggaaataaagggtattcaattaggaaaagaggaagtcaaattgtccctgtttgcagacgacatgattgtatatctagaaaaccccattgtctcagcccaaaatctccttaagctgataagcaacttcagcaaagtctcaggatacaaaatcaatgtacaaaaatcacaagcattcttatataccaacaacagacaaacagagagccaaatcatgagtgaactcccattcacaattgcttcaaagagaataaaatacctaggaatccaacttacaagggatgtgaaggacctcttcaaggagaactacaaaccactgctcaaggaaataaaagaggatacaaacaaatggaagaatattccatgctcatgggtaggaagaatcaatatcgtgaaaatggccatactgcccaaggtaatttacagattcaatgccatccccatcaaactaccaatgactttcttcacagaattggaaaaaactactttaaagttcatatggaaccaaaaaagagcccgcattgccaagtcaatcctaagccaaaagaacaaatctggaggaatcacactacctgacttcaaactatactacaaggctacagtaaccaaaacagcatgctctccacactccattgtcctgcctgccaccatgatggaacagaacagagccctcagaaataataccacacatcatggccgtggctcagatccagcaggtcaagctgctgctgctgcaggggcaacatgccagtagcagattgcagcccacaagcagcacgaagtgtggtggatggactgcgtcctctgcatctccaaggagcatggggctgtcttcctggaagggcaaccttgccagtgccatccattacttcccatgcaagcccttaactttgccttcaaggataagtacaagcagttcttcctgggggtgcagacaagcgcatgcagttctggaggtgcttcgctggccacccggccttgggtggcctggctggcaccacctcactctgcttcatgtaccccctgtgaggatcaccaaatccaatggacccagggcctgtaccagggcttcagcatctcatgcaagacatcatcaatacaaccaagaaccctcactgagtccacttcactccccgctgcctccaccagagcaggtgctggtatccacagctgagagaactgaagacagatcgtatcacaggactctttgcagacactccccatatttcaagaatgaagctgcagaccttaggggtgagggttacagctcttaaagatttgggtcacggacccaaatagtgagccgtagcaaggtttattgtgagggatcccaggaacagcagcaccgattttcctccctctgcggaccaccaggctcccctggcccctcaacattttaacagatctttgtatattcagtttaaaaaaaaaatggggccaggcgcagtggctcacgcctgtaatcgtagc

SEQ ID NO: 10110 - DNA, 2277 bp, Homo sapiens; identical to SEQ ID NO: 5445
  SIMILAR (172)..(1752): 951254mologous to Homo sapiens putative p150,accession number U93564,Smith-Waterman Score=2634.

SEQ ID NO: 10111 - DNA, 3831 bp, Homo sapiens
  SIMILAR (65)..(1660): 821254mologous to Homo sapiens ES/130-related protein,accession number AF007575,Smith-Waterman Score=2202.
atgggagactttaacaccccactgtcaacattagacagagcaacgagacagaaagtcaacaaggatacccaggaattgaactcagctctgcaccaagcagacttaatagacatctacagaactctccaccccaaatcaacagaatatacatttttttcagcaccacaccacacctattccaaaattgaccacatacttggaagtaaagctctcctcagcaaatgtaaaagaacagaaattataacaaactatctctcagaccacagtgcaatcaaactagaactcaggattaagaatctcactcaaaaccgctcaattacatggaaactgagcaacctgctcctgaatgactactgggtacataacgaaatgaaggcagacataaagatgttctttgaaaccaatgagaacaaagacacaacataccagaacctctgggacacattcaaagcagtgtgtagagggaaatttttagcactaaatgcccacaagaaaaagcaggaaagatccaaaattgacaccctaacatcacaattaaaagaactagaaaagcaagagcaaacacattcaaaagctagcagaaggcaagaaataactaaaatcggagcagaactgaaggaaatagagacacaaaaaacccttcaaaaaattaacgaatccaggagctggttttttgaaaggatcaacaaaattgataaaccgctagcaagactaataaagaaaaaaagagagaagaatcaaatagacgcaataaaaaatgataaaggggatatcaccaccgatcccacagaaatacaaactaccatcagagaatacaacaaacacctctatgcaaataaactagaaaatctagaagaaatggataaattcctcgacacatactctctcccaagactaaaccaggaagaagttgaatctctgaatagaccaataacaggagctgaaattgtggcaataatcaatagcttaccaactaaaaagagtccaggaccagatggattcacagccaaattctaccagaggtacaaggaggaatgtaaaatactggcaaaccaaatccagcagcacatcaaaaagcttacccaccaggatcaagtggacttcatccctgggatgcaaggctggttcaatatacgcaaatcaataaatgtaatccagcatataaacagaagcaaagacaaaaaccacatgattatctcaatagatgcagaaaaggcctttgacaaaattcaacaacccttcatgctaaaaactctcaataaattacgtattgatgggacgtatctcaaaataataagagctatctatgacaaacccacagccaatatcatactgaatgggcaaaaactggaagcattccctttgaaaactggcacaagacagggatgctctctctcaccactcctattcaacatagtgttggaagttctggccagggcaattaggcaggagaaggaaataaagggtattcaattaggaaaagaggaagtcaaattgtccctgtttgcagacaacattattgtatatctagaaaaccccattgtctcagcccaaaatctccttaagctgataagcaacttcagcaaagtctcaggatacaaaatcaatgtacaaaaatcacaagcattcttatacaccaacaacagacaaacagagagccaaatcatgagtgaactcccattcacaattgcttcaaagagaataaaatacctaggaatccaacttacaagggatgtgaaggacctcttcaaggagaactacaaaccactgctcaaggaaataaaagaggatacaaacaaatggaagaacatcccatgctcatgggtaggaagaatcaatatcgtgaaaatggccatactgcccaagataatttacagattcaatgccatccccatcaaactaccaatgactttcttcacagaattggaaaaaactactttaaagttcatatggaaccaaaaaagagcccgcattgccaaggcaatcctaagccaaaagaacaaagctggaggcatcacgctacttgacttcaaactatactacaaggctacagtaaccaaaacagcatggtactggtaccaaaacagagatatagatcaatggaacagaacagagccctcagaaataacgctgcatatctacaactttctgatctttgacaaacctgagaaaaacgagcaatggggaaaggattccctatttaataaatggtgctgggaaaactggctagccatatgtagaaagctgaaactggatcccttccttacaccttatacaaaaatcaattcaagatggattaaagacttaaacgttagacctaaaaccataaaaaccctagaagaaaacctaggcattaccattcaggacataggcatgggcaaggacttcatgtctaaaacaccaaaagcaatggcaacaaaagccaaaattgacaaatgggatctaattaaactaaagaacttctgcacagcaaaagaaactaccatcagagtgaacaggcaacctacaaaatgggagaaaattttcacaacctactcatctgacaaagggctaatatccagaatctacaatgaactccaacaaatttacaagaaaaaaacaaacaaccccatcaaaaagtgggcaaaggacatgaacagacacttctcaaaagaagacatttatggagccaaaaaacacatgaaaaaatgctcaccatcactggccatcagagaaatgcaaatcaaaaccacaatgagataccatgtcacaccagttagaatggcaaccattaaaaagtcaggaaacaacaggaccaaactgaatgattccccaagactagaaaagcaacttctggggaaaccatctgaggcagctgttgggtatcccagcccttctagttccccttatctggggccacttccaaccacaccaccagctcttctacctccaccatctccaaaatttcccactccccgaccttcactcttacccctacaggaaatgcacaatggaggtgatgtcactagggaaccaggaggagaaccaggagaaagaaaggaagaaaagggaaggacagaggctctaatagctgctttgaagcctggcaaagtccaggatccccaaggtgcatccactagttgctatcagtgtggcaagtcagggcactttaagaaggagtgtccaggcacaagtgctcaactaactgaactgacagctcttacacttgagttaagcaagggaaaggtaagaaacgccccttcaaagttagatctaagcccttttgagatgctgtatggatggccttttctcaccaatgatttcttattagaccaagagacctctgaattgggcaagcatgtaaactctctggctcgttttcaacaggaattaactcaagtagcagaagcccaaccccaagaagtaggaccacctttatttaacccaggatatttggtattgcccaagcagggagggccttacaccattctcctttcaatgccctcagcagtaaaagttacaggtattgattcctggatacatcatgctcaagttaaagcctggaaaactgagagagcaatccccggcagcccagcggaatgtcttggataccaatgtgaggaaataagagacctgaagctgaaaatcaaaagagataagaaaatgagcaagggctactcatcctactcagttccagtcatccattcagtcatccagtcatccagtctttgtacaactgagcaggtgctggtatccatggctgcaagacctgaagatggatcacatcatgggactccttgcagacaccctcaagtactagcccagagcctggtagcttcactgggtagctag

SEQ ID NO: 10112 - DNA, 3131 bp, Homo sapiens
  SIMILAR (149)..(45): 741254mologous to Homo sapiens Protein of clone CI480_9,accession number W57899,Smith-Waterman Score=137.
gggtcaacagacacctcatacaggagagctccagctggcatctggagggtgtccctctgggacgaagcttccagaggaaggagcaagcagcaatctttgctgttctgcagcctccactggtgataccctggcaaacaggatctggagtggacctcctgcaaactccaccagacctgcagaagagggtcctgactgttagaaggaaaactaacaatcagaaagcaatagcatcaacatcaacaaaaaggacgcccacgcaaaaaccccatccgaaggtcaccaacatcaaagatcaaagaactaatgacaaaaaccagatgattatctcaatagatgcagaaaagcccttcaataaaattcaacttcccttcatgctaaaaactctcaataaattaggtattgatgggacatatttcaaaataataagagctatctatgacaaacccacagccaatatcatactgaatgggcaaaaactggaagcattccctttgaaaactggcacaagacagggatgccctctctcaccgctcctattcaacatagtgttggaagttctggccagggcaatcaggcaggagaaggaaataaaaggtattcaattaggaaaagaggaagtcaaattgtccctgtttgcagacgacatgactgtttatctagaaaaccccatcgtctcagcccaaaatctccttaagctgataagcaacttcagcaaagtctcaggatacaaaatcaatgtaaaaaaatcacaagcattcttatacaccagcaacagacaaacagagagccaaatcatgagtgaactcccattcacaattgcttcaaagagaataaaatacctaggaatccaacttacaagggatgtgaaggacctcttcaaggagaactacaaaccactactcaaggaaataaaagaggatacaaacaaatggaagaacattccatgctcatgggtaggaagaatcaatatcgtgaaaatggccatactgcccaaggtaatttacagattcaatgccatccccatcaagctaccaatgactttcttcacagaattggaaaaaactactttaaagttcatatggaaccaaaaaagagcctgcatcgccaagtcaaccctaagccaaaagaacaaagctggaggcatcacactacctgacttcaaactatactacaaggctacagtaaccaaaacagcatggtactggtaccaaaacagagatatagatcaatggaacagaacagagccctcagaaataacgccgcatacctacaactatctgatctttgacaaacctgagaaaaacaagcagtggggaaaggattccctatttaataaatggtgctgggaaaactggctagccatatgtagaaagctgaaactggatcccttccttacaccttatacaaaaatcaattcaagatggattaaagatttaaacgttagacctaaaaccataaaaaccctagaagaaaacctaggcattaccattcaggacataggcatgggcaaggacttcatgtccaaaacaccaaaagcaatggcaacaaaagacaaaattgacaaatgggatctaattaaactcaagagcttctgcacagcaaaagaaactactatcagagcgaacaggcaacctacaacatgggagaaaattttcgcaacctactcatctgacaaagggctaatatccagaatctacaatgaactcaaacaaatttacaagaaaaaaacaaacaaccccatcaaaaagtgggcgaaggacatgaacagacacttctcaaaagaagacatttatgcagccaaaaaacacatgaaaaaatgctcatcatcactggccatcagagaaatgcaaatcaaaaccactatgagatatcatctcacaccagttagaatggcaatcattaaaaagtcaggaaacaacaggtgctggagaggatgtggagaaataggaacacttttacactgttggtgggactgtaaactagttcaaccattgtggaagtcagtgtggcgattcctcagggatctagaactagaaataccatttgacccagccatcccattactgggtatatacccaaatgactataaatcatgctgctataaagacacatgcacacgaaaaatacgaacaaatgggagaaattgtgccagcaaaaaaggaaacatcaacaaagaagctagaagcctatttaaccactggcccctgcaaaggccaaggcgagtgtatagcctgcacgttctctgtggagacaccgcgttcaggcacggtttgagacctgcccaccatcatccatcattggactgcctgtcctcaacccaccatggagaacaagcttttctaagggaaggacatctgcaggataaaatgggaaaagaggaagagcatcactcttgtctggtgagtccagcgtggttcatcattgcatctggacttcagccagcagcaagtgggaacagatgtccaacagagggacgaagagtcaaaattctctgcattataagaggaattcaggagaagcaccttccaggagggaaggctctagcaacaccagaggaagctgcagctgggaaggaggcagccagggaacagttcttgtctgggcaacaaagtgagatcctgtctcaaaaaaaggaagaggaggagaagaagaagaagaagaagaagaagaagaagaagaaggaggaggaggaggaggaggaggaggaggaggaggaggaggaagagagaagaggaggaggaaaagaaagagtaaggaaagaaggaaggaaggaaagaatgaatgaaggcaggcaggcaggcagggagggaggggagaggaagagagaagaaagaaggagaagaaaagaagaagaagaaggaagaggaggaggaggaaggggagaggaggaggaaaaagaagaagacatgcttagagaactaaggaaggagctgcccttgggacctctccagctaggaaaggatggagggatgggatgtgctttaggggagctgtgctcgggacttctccacctgggcgaggacggaagggtgggatgcgctttagggggccactccatagaacaccatgcagatggtgcccccccgcacgacccccagcatcagagttgtgcactgatggcctgcagatga

SEQ ID NO: 10113 - DNA, 963 bp, Homo sapiens
  SIMILAR (268)..(729): 971254mologous to Homo sapiens putative p150,accession number U93563,Smith-Waterman Score=753.
atggacagtatgtctggagggggacagtataggaagattaatgggaatccaacatcagtgaagtgccctttgctgctgctgccagccattctgactccagagccggtgaataggtggagacaaagctgcaaagcatttgcacggcattctccgcttgctttcagagtgacaatttcaacaagcaccttttttgacggcttgctggtgacaggactatacacatctacaagtgttcaggcatcacagagcattggaggttccagtgctttcggatttgtgttggaagttctggccagggcaattaggcaggagaaggaaataaagggtattcaattaggaaaagaggaaatcaaattgtccctgtttgcaggcgacatgattgtatatctagaaaaccccattgtctcagcccaaaatctccttaagctgataagcaacttcagcaaagtctcaggatacaaaatcaatgtacaaaaatcacaagcattcttatacaccaacaacagacaaacagagagccaaatcatgagtgaactcccattcacaattgcttcaaagagaataaaatacctaggaatccaacttacaagggatgtgaaggacctcttcaaggagaactacaaaccactgctcaaggaaataaaagaggatacaaacaaatggaagaacattccatgctcatgggtaggaagaatcaatatcgtgaaaatggccatactgcccaaggtctctgagtctctcagaagagagggtagctcctctctgcagctggtcatcccacagtctgtctgtcctctgctctggctgagccccaggcttattatggacctcacaggggaggaagtgcatgccaatcagtccctgggcagccataggcaggcctggaagaggaaccacatgtccccacttaggtcctcaggactggcagctcagcccccagcctttaggccctacctggcctga

SEQ ID NO: 10114 - DNA, 2470 bp, Homo sapiens
  SIMILAR (1605)..(2468): 951254mologous to Homo sapiens unknown,accession number AF149422,Smith-Waterman Score=1491.
atgagaacaaagacacaacataccagaatctctgggacgcattcaaagccagtgtgtagagggaaatttatagcactaaatgcccacaagagaaagcaggaaaaatccaaaattgacaccctaacatcacaattaaaagaactagaaaagcaagagcaaacacattcaaaagctagcagaaggcaagaaataactaaaatcagagcagaactgaaggaaatagacacacaaaaaacccttcaaaaaataaatgaatccaggagctggttttttgaaaggatcaacaaaattgatagaccactagcaagactaataaagaaaaaaagagagaagaatcaaacagacacaataaaaaattgtaaaggggatatcaccactgatcccacagaaatacaaactaccatcagagaatactacaaacacctctacgcaaataaactagaaaatctagaagaaatggataaattcctcaacacatacactctcccaagactaaaccaggaagaagttgaatctctgaatagaccaataacaggagctgaaattgtggcaataatcagtagtttaccaaccaaagagtccaggaccggatggattcacagccgaattctaccagaggtacaaggaggaactgaaaaagagggaatcctccctaactcattttatgaggccagcatcattctgataccaaagccgggcagagacgcaaccaaaaaagagaattttagaccaatatccttgatgaacattgatgcaaaaatcctcaataaaatactggcaaaacgaatccagcagcacatcaaaaagcttatccaccatgatcaagtgggcttcatccctgggatgcaaggcttggttcaatatacgcaaatcaataaaggtaatccagcatataaacagagccaaagacaaaaaccacatgattatctcaatagatgcagaaaaagcctttgacaaaattcaacaacccttcatgctaaaaactctcaataaattaggtattgatgggacgtatttcaaaataataagagctatctatgacaaacccacagccaatatcatactgaatgggcaaaaactggaagcattccctttgaaaactggcacaagacagggatgccctctctcaccgctcctattcaacatagtgttggaagttctggccagggcaatcaggcaggagaaggaaataaaaggtattcaattaggaaaagaggaagtcaaattgtccctgtttgcagacgacatgattgtttatctagaaaaccccattgtctcagcccaaaatctccttaagctgatacgcaacttcagcaaagtctcaggatacaaaatcaatgtacaaaaatcacaagcattcttatacaccaacaacagacaaacagagagccaaatcatgagtgaactcccattcacaattgcttcaaagagaataaaatacctaggaatccaacttacaagggatgtgaaggacctcttaaaggagaactacaaaccaactgctcaaggaaataaaagaggacacaaacaaatggaagaacattccatgctcatgggtaggaagaatcaatatcgtgaaaatggccatactgcccaagaattggaaaaaaactactttaaagttcatatggaaccaaaaaagagcccacatcaccaagtcaatcctaagccaaaagaacaaagctggaggcatcacactacctgacttcaaactatactacaaggctacagtaaccaaaacagcatggtactggtaccaaaacagagatatagatcaatggaacagaacagagccctcagaaataatgctgcatacctacaactatctgatctttgacaaacctgagaaaaacaagcaatggggaaaggattccctatttaataaatggtgctgggaaaactggctagccatatgtagaaagctgaaactggatcccttccttacaccttatacaaaaatcaattcaaaatggattaaagacttaaacgttagacctaaaaccataaaaaccctagaagaaaacctaggcattaccattcaggacataggcatgggcaaggacttcatgtccaaaacaccaaaagcaatggcaacaaaagccaaaattgacaaatgggatctaattaaactaaagagcttctgcacggcaaaagaagctaccatcagagtgaacaggcaacctacaaaatgggagaaaattttcgcaacctactcatctgacaaagggctaatatccagaatctacaatgaactcaaacaaatttacaagaaaaaaacaaacaaccccatcaaaaagtgggtgaaggacatgaacagacactttgcaaaagaagacatttatgcagccaaaaaacacatgaaaaaatgctcaccatcactggccatcagagaaatgcaaatcaaaaccactatgagatatcatctcacaccagttagaatggcgatcattaaaaagtcaggaaacaacag

SEQ ID NO: 10115 - DNA, 3495 bp, Homo sapiens
  SIMILAR (437)..(5500): 961254mologous to Homo sapiens similar to Human zinc finger protein(ZNF142),accession number D87073,Smith-Waterman Score=8972.
atgaaagaagaagatggcttgctaggagcagctagtgtgtgggctctcatggagaagaacggaaggggtgaggaaatacagcaacctcaactaaaatatccaggtacaggcattggaactaatcaaggaaacaagttcacccaaggagaaggaagaaaagcaaggcaggatgatggcccaccgggagcagcgtggagccagggcaacctcccctacctagggaagtggggctgcaagtcagattctgttgccagtagacttgcagcaacattccgccaagggagacactcatgcaagattacaagcaaggagaaagaagctaccccatttttggcagtgatggcgtctccagcagagtcactcgtggtggccatggagctgcaagtgaaagtgatagatgccactattatgggacaccccagagtggctgagaccatgtggcagcacttaagtaccagggacactgggtcagttactgaaatgacagaagaaagggtgcagatatggagaacagagaagggttacaatgaaaggagagaagaaatcctggagtggtgggaatttgtaggaagggaaagtgttggagaaaggaatcgctctctgcatcatgctgtcactgctggatatggggaaggggtggcattggtgattcagtactgcttttcctacctcttcgatacctctttcagtgatgcaaagttaaaaccagatactatgagtgctcacctgtgttttgattctcatgaacgtacttctttggagaatatcttcttccaattagaaaaaaacaaacagattcttaaggttaagtcacgtagcttcttgcctggtgcccacatgagagcttctacggactcattgttggaagttctggccagggcaatttggccggagaaggaaataaagggtattcaattaggaaaaaaggaagtcatattgtccctgtttgcagatgacatgattgtatatctagaaaaccccattgtctcagcccaaaatctccttaagctgataagcaacttcagcaaagtctcaggatacaaaatcaatgtacaaaaatcacaagcattcttatacaccaataacagacaaacagagagccaaatcatgagtgaactcccattcacaattgtttcaaagagaataaaatacctaggaatccaacttacaagggacgtgaaggacctcttcaaggagaactacaaaccactgctcaaggaaataaaagaggatacaaacaaatggaagaacattccatgctcatgggtaggaagaatcaatatcgtgaaaatggccatactgcccaaggtaatgtatagattcaatgccatccccatcaagctaccaatgcctttcttcacagaattggaaaaaactactttaaagttcatatggaaccaaaaaagagcccgcatcgccaagtcaatcctaagccaaaagaacaaagctggaggcatcacgctacctgacttcaaactatactgcaaggctacagtaaccaaaacagcatggtactggtaccaaaacagagatatagatcaatgcaacagaacagagccctcagaaatgaggccgcatatctacaactatctgatctttgacaaacctgacaaaaacaagcaatggggaaaggattccctatttaataaatggtgctgggaaaactggctagccatatgtagaaagctgaaactggatcccttccttacaccttatacaaaaattaattcaagatggattaaagacttaaacgttagacctaaaaccataaaaaccctaggagaaaacctaggcattaccattcaggacataggcatgggcaaggacttcctgtctaaaacaccaaaagcaatggcaacagaagccaaaattgacaaatgggatctaattaaactaaagagcttctgcacaccaaaagaaactaccatcagagtgaacaggcaacctacacaatgggagaaaatttttgcaacctactcatctgacaaagggctaatatccagaatctacaatgcactcagacaaatttacaagaaaaaaacaaacaaccccatcaaaaaggacatggatgaaaccggaaaccaccattctcagcatactatcgcaaggacaaaaaaccaaacaccgcatgttctcactcatagtgaggaaactgtggctcaggaagatgatgtgcctttgacaaggtcatggttgctgaaagcactcaagccccaagaggttcagagcagagccaagtcccctgatggccagtacaaagaggaggagaaagagaaggacagcagagggtgctctctgctggatttccccagcatgccagcttcccactgtgcagataaagcaaaatctgataggagcggggaggaagtgggctcaggctccaggagtacaagttggtatgcaagcaagtcattccaaacgccgcctccacacaaaccctctgagctgcaaattattaacctgcttaactctattgcagaaacaagcgctgctggggtgttggaagttctggccagggcaattaggcaggagaaggaaataaagggtattcaattaggaaaagaggaattcaaattgtccctgtttgcagatgacatgattgtatatctagaaaaccccattgtctcagcccaaaatctccttaagctgataagcaacttcagcaaagtctcaggatacaaaatcaatgtacaaaaatcacaagcattcttatacaccaataacagacaaacagagagccaaatcatgagtgaactcccattcacaattgcttcaaagagaataaaatacctaggaatccaacttacaagggatctgaaggacctcttcaaggagaactacaaaccactgctcaatgaaataaaagaggatacaaacaaatggaagaacattccatgctcatgggtaggaagaatcaatatcgtgaaaatggccatactgcccaagagggacgtgactgcaaattgtccaggttcttggcgttttgaacaaagaattggacaaaacacgcagcaaagaaagaatgaagcaacaaaagaacgaaagcagctctctcggctttcggctcggaggaggccaaggtgcaactttcttcggtcgtctcgaatccgggttcatccgacaccagccgcctccaccatgccgccgaagttccaccccaatgagatcaaagtcgtatacttcacgtgcactggagttgaagtcggtgccacttctgctctggcccccaagattggccccgcgggtctgtctccaaaagaggttggtgatgacattgccaaggtaacgggtgactggaagggcctgaggattacagtgaaactgaccattcagaacagacaggcccagattgaagtggtaccttctgcctccgccctgatcatcaaaaggaactaccaagagacagaaagaaacagaaaaacattaaacacagggggaatatcactttttatgagatcgtcaacattgctcgacagatgcagcactgatccttag

SEQ ID NO: 10116 - DNA, 3907 bp, Homo sapiens
  SIMILAR (614)..(516): 471254mologous to Mus musculus CIP7,accession number AF038507,Smith-Waterman Score=83.
atggctgcctggaacctgctacttaaatcatatgcatattggggaggtctaaggaaggaagatttccactgtttagaccggaagaccctgaggacagtatcctttctggctgccctgctgtcatatgagtccatagggggcaaaggaaaactaacaaccagaaaggacatctacaccgaaaacccatctgtacatcaccatcatcaaagaccaaaagtagataaaaccacaaagatggggaaaaaacagaacagaaaaactggaaactctaaaatgcagagcgcctctcctcctccaaaggaacgcagttcctcaccagcaacagaacaaagctggatggagaatgattttgaagagctgagagaagaaggcttcagacgatcaaattactctgagctacgggaggacattcaaaccaaaggcaaagaagttgaaaactttgaaaaaaatttagaagaatgtataactagaataaccaatacagagaagtgcttaaaggagctgatggagctgaaaaccaaggctcgagaactacgtgaagaatgcagaagcctcaggagccgatgcgatcaactggaagaaagggtatcagcaatggaagatgaaatgaatgaaatgaagcgagaagggaagtttagagacaaaagaataaaaagaaatgagcaaagcctccaagaaatatgggactatgtgaaaagaccaaatctacgtctgattggtgtacctgaaagtgatgtggagaatggaaccaagttggaaaacactctgcaggatattatccaggagaacttccccagtctagcaaggcaggccaacgttcagattcaggaaatacagagaacgccacaaagatactcctcgagaagagcaactccaagacacataattgtcagattcaccaaagttgaaatgaaggaaaaaatgttaagggcagccagagagaaaggtcgggttaccctcaaaggaaagcccatcagactaacagcggatctctcggcagaaaccctacaagccagaagagagtgggggccaatattcaacattcttaaagaaaagaattttcaacccagaatttcatatccagccaaactaagcttcataagtgaaggagaaataaaatactttatagacaagcaaatgctgagagattttgtcaccaccaggcctgccctaaaagagctcctgaaggaagcgctaaacatggaaaggaacaaccggagaaagcaggaaagatccaaaattgacaccctaacatcacaattaaaagaactagaaaagcaagagcaaacacattcaaaagctagcagaaggcaagaaataactaaaatcagagcagaactgaaggaaatagagacacaaaaaacccttcaaaaaatcaatgaatccaggagctggttttttgaaaggatcaacaaaattgatagaccgctagcaagactaataaagaaaaaaagagagaagaatcaaatagacacaataaaaaatgataaaggggatatcaccactgatcccacagaaatacaaactaccatcagagaatactacaaacacctctacgcaaataaactagaaaatctagaagaaatggatacattcctcgacacatacactctcccaagactaaaccaggaagaagttgaatctctgaatagaccaataacaggctctgaaattgtggcaataatcaatagtttaccaaccaaaaagagtccaggaccagatggattcacagccgaattctaccagaggtacaaggaggaactggtaccattccttctgaaactattccaatcaatagaaaaagagggaatcctccctaactcattttatgaggccagcatcattctgataccaaagccgggcagagacacaaccaaaaaagagaattttagaccaatatccttgatgaacattgatgcaaaaatcctcaataaaatactggcaaaccgaatccagcagcacatcaaaaagcttatccaccatgatcaagtgggcttcatccctgggatgcaaggctggttcaatatacgcaaatcaataaatgtaatccagcatataaacagagccaaagacaaaaaccacatgattatctcaatagatgcagaaaaagcctttgacaaaattcaacaacccttcatgctaaaaactctcaataaattaggtattgatgggaagtatttcaaaataataagagctatctatgacaaacccacagccaatatcatactgaatgggcaaaaactggaagcattccctttgaaaactggcacaagacagggatgccctctctcaccgctcctattcaacatagtgttggaagttctggccagggcaatcaagcaggagaaggaaataaagggtattcagttaggaaaagaggaagtcaaattgtccgtgtttgcagacgacatgattgtttatctagaaaaccccatcgtctcagcccaaaatctccttaagctgataagcaacttcagcaaagtctcaggatacaaaatcaatgtacaaaaatcacaagcattcttatacaccaacaaccgacaaacagagagccaaatcatgagtgaactcccattcacaattgcttcaaagagaataaaatacctaggaatccaacttacaagggatgtgaaggacctcttcaaggagaactacaaaccactgctcaaggaaataaaagaggacacaaacaaatggaagaacattccatgctcatgggtaggaagaatcaatatcgtgaaaatggccatactgcccaaggtaatttacagattcaatgccatccccatcaagctaccaatgactttcttcacagaattggaaaaaactactttaaagttcatatggaaccaaaaaagagcccgcatcgccaagtcaatcctaagccaaaagaacaaagctggaggcatcacactacctgacttcaaactatactacaaggctacagtaaccaaaacagcatcggtactggtaccaaaacagagatatagatcaatggaacagaacagagccctcagaaataatgccgcatatctacactattctgatcctttggacaaacctgagaaaaacaagcatgggggaaaggcatccctaatttataaaatggctgctggggaaaactggctagcccatatgtaggaagctgaaactggatcccttccttacaccttatacaaaaatcaattcaagatggattaaagatttaaacgttagacctaaaaccataaaaaccctagaagaaaacctaggcattaccattcaggacataggcgtgggcaaggacttcatgtccaaaacaccaaaagcaatggcaacaaaagccaaaattgacaaatgggatctaattaaactaaagagcttctgcacagcaaaacaaactaccatcagagtgaacaggcaacctataacatgggagaaaattttcgcaacctactcatctgacaaagggctaatatccagaatctacaatgaactcaaacaaatttacaagaaaaaaacaaacaaccccatcaaaaagtgggcgaaggacatgaacagacacttctcaaaagaagacatttatgcagccaaaaaacacatgaagaaatgctcatcatcactggccatcagagaaatgcaaatcaaaaccactatgagatatcatctcacaccagttagaatggcaatcattaaaaagtcaggaaacaacagggacaacacaaaggaagcactgctgtgtaacaacttggtggctgaagtcttggaggccaaacaggctcagaagcttcaaggcaaagcagccgtcctcagcctctcaaaaatctatgcgatcacagagacaaatgctgagacacccaacaggaagatgaaaattaaactgaagagacccatgaccaaattgcacccaagcatccaaatgttggtg

SEQ ID NO: 10117 - DNA, 2763 bp, Homo sapiens
  SIMILAR (745)..(2118): 961254mologous to Homo sapiens putative p150,accession number U93563,Smith-Waterman Score=2324.
aaaagcaagagcaaacacattcaaaagctagcagaaggcaagaaataactaaaatcagagcagaactgaaggaaatagagacacaaaaaacccttcaaaaaattaatgaatccaggagctggttttttgaaaggatcaacaaaattgatagaccgctagcaagactaataaagaagaaaagagagaagaatcaaatagacgcaataaaaaatgataaaggggatatcactaccagtcccacagaaatacaaacaaccatcagagaatactacaaacacctctacgcaaataaactagaagatctagaagaactggataaattcctcgaaacatacaccctcccaagactaaaccaggaagaaggtgactctctgaatagaccaataacaggatctgaaattgtggcaataatcaatagcttgccaaccaaaaagagtccaggaccagatggattcacagccgaattctaccagaggtacaaggaggaactggtaccattccttctgaaacgattccaatcaatagaaaaagagggaatcctccctaactcattttatgaggccaacatcatcctgataccaaagtcggccagagacacaaccaaaaaagataattttaggccaatatccttgatgaaccttgatgcaaaaatcctcaataaaatactggcaaaacgaatccagcagcacatcaaaaagcttatccaccatgatcaagtgggcttcatccctgggatgcaaggctgtgttggaagttctggccagggcaattaggcaggagaaggaaataaagggtattcaattaggaaaagaggaagtcaaattgtccctgtttgcagatgacatgattgtatatctagaaaaccccattgtctcagcccaaaatctccttaagctgataagcaacttcagcaaagtctcaggatacaaaatcaatgtacagaaatcacaagcattcttatacaccaataacagacaaacagagagccaaatcatgagtgaactcccattcacaattgcttcaaagagaataaaatacctaggaatccaacttacaagggatgtgaaggacctcttcaaggagaactacaaaccactgctcaatgaaataaaagaggatacaaacaaatggaagaacattccatgctcatgggtaggaagaatcaatatcgtgaaaatggccatactgcccaaggtaatttatagattcaatgccatccccatcaagctaccaatgactttcttcacagaattggaaaaaactactttaaagttcatatggaaccaaaaaagatcctgcatcgccaagtcaatcctaagccaaaagaacaaagctggaggcatcacactacctgacttcaaactatactacaaggctacagtaaccaaaacagcatggtactggtaccaaaacggagatatagatcaatggaacagaacagagccctcagaaataacgccgcacatctacaactatctgatctttgacaaacctgagaaaaacaagcaatggggaaaggattccctatttaataaatggtgctgtgaaaactggctagccatatatagaaagctgaaactggatcccttctttacaccttatacaaaaatcaattcaagatggactaaagacttaaatgttagacctaaaaccataaaaaccctagaagaaaacctaggcattaccattcaggacataggcatgggcaaggacttcatgtctaaaacaccaaaagcaacggcagcaaaagcccaaattgacaaatgggatctaattaaactaaagagcttctgcacagcaaaagaaactaccatcagagtgaataggcaacctacaaaatgggaggaaattttcgcaacctactcatctgacaaagggctgatatccagaatctacaatgaactcaaacaaatttacaagaaaaaaacaaacaaccccatcaaaaagtgggcaaaggacatgaacagacacttctcaaaacaagacatttatgcagccaaaaaacacatgaaaaaatgctcatcatcactggccatcagagaaatgcaaatcaaaaccacaatgagataccatctcacaccagttagaatggcaatcattaaaaagtcaggaaacaacagccagacagtgaagccacagaacaaagctcattttgccaaaatggaccgccaatgtgtccacggcttgtctccccgtttagaacacagcccccgggggcgctcttccccacggtgcgcagaatgctgcctctactcttgcctgcatgctcagacttcaaacggggctgtgaaaataaatctaatgacagagagccaggaattagggaagagaaggaagctgatcagtaaagaggaagagcacacaccgaagctcctagtgctggtgatgaatccagaccccacgcagaaaccgctgagtgtgcaatgtgcctctgtttcctgctgcataagaagggatgatgatagtactgacttcatggatttgttgggagaatttaaggagatgaaacctgcgaggcacctaggacagcacctgacacttaggtttactccagtaatatgggcgcaccttacaactatggccttcgccattccaggggcctgcatcaggagccacactccagcacccacccccacagtacagacagcattgtctattcgagtgatagctgctcataacgacatctccacctcgctatttgtccaggaaggtgctttcagggaggcaaaagatctctcccatggccacgttaacacagtttag

SEQ ID NO: 10118 - DNA, 4546 bp, Homo sapiens
  SIMILAR (182)..(1861): 861254mologous to Homo sapiens putative p150,accession number U93568,Smith-Waterman Score=2387.
  misc_feature (1)...(4546): n = a,t,c or g
tgcaatcaaactagaactcaggattaagaatctcactcaaaaccgctcaactacatggaaactgaacaacctgctcctgaatgactactgggtacatagcgaaatgaaggcagaaataaagatgttctttgaaaccaacgagaacaaagacacaacataccagaatctctgggacacattcgaagcaaaaagcaagagcaaacaacattcaaaagctagcagaaggcaagaaataactaaaatcagagcagaactgaaggaaatagagatacaaaaaacccttcaaaaaattaatgaatccaggagctggttttttgaaaggatcaacaaaattgatagaccactagcaagactaataaagaaaaaaagagagaagaatctaatagacgcaataaaaactgataaaggggatatcaccaccaatcccacagaaatacaaactaccatcagagaatactacaaacacctctacgcaaataaactagaaaatcgagaagaaatggataaattcctcgacacatacactctcccaagactaaacgaggaagaagtcgaatctctgaatacaccaataacaggctcagaaattgtagcaataatcaatagcttaccaaccaaaaagagtccaggaccagatggattcacagccgaattgtaccagaggtacaaggaggaactggtaccattccttctgaaactattccaatcaatagaaaaagagggaatcctccctaactcattttatgaggccagcatcattctgataccaaagccaggcagagacacaaccaaaaaagagaattttagaccaatatcgttgatgaacattgatgcaaaaatcctcaataaaatactggcaaaaggaatccagcagcacatcaaaaagcttatccaccatgatcaagtgggcttcatccctgggatgcaaggccggttcaatatacgcaaatcaataaatgtaatccagcatataaacagaaccaaagacaaaaaccacatgattatctcaatagatgcagaaaaagcctttgacaaaattcaacaaccctttatgctaaaaactctcaataaattaggtattgatgggacgtatttcaaaataataagagctatctatgacaaacccacagccagtatcatactgaatgggcaaaaactagaagcattccgtttgaaaactggcacaagacagggatgccctctctcaccactcctattcaacatagtgtttgaaattctggcccgggcaattaggcaggagaaggaaataaagggtattcaattaggaaaagaggaagtcaaattgtccctgtttgcaggcgacatgattgtatatctagaaaaccccattgtctcagcccaaaatctccttaagctgataagcaacttcagcaaagtctcaggatacaaaatcaatgtgcaaaaatcacaagcattcttatacaccaataacagacaaacagagagccaaatcatgagtgaactcccattcacaattgcttcaaagagaataaaatacctaggaatccaacttacaagggatgtgaaggacctcttcaaggagaactacaaaccactgctcaaggaaataaaagaggatacaaacaaatggaagaacattccatgctcatgggtaggaagaatcaatatcgtgaaaatggccatactgcccaagctgataggcaactgcagcaaaatctcaggatacaaaatcaatgtgcaaaaatcacaagcattcttatacaccaataacagacaaacagagagccaaatcatgagtgaactcgcattcacaattgcttcaaagaaaatcaaatacctaggaatccaacttacaagggatgtgaaggacctcttcaaggagaactacaaaccactgctcaatgaaataaaagaggatacaaacaaatggaagaacattccatgctcatgggtaggaagaatcaatatcgtgaaaatggccatactgcccaaggttgttgtagctcctattgtttgtgatatatttatctattcgccttcatactggagttatgattgtgtgtccagagttggttccttccggtgggttcgtggtctcgctgacttcaagaatgaagccgcggaccctcacggagtgaagctgcagaccttcacggtgagtgttacagctcttaaggtagcgcgtctggagttgttcgttcctcccggtgggctcgtggtctcgctggcttcaggagtgaagctgcagatcttcacagtgagtgttacagctcataaaagcagtgtggacccaaagactgagcagaagcaagatttattgcaaagagcgaaggaacaaagcttccacagtgcggaaggggaccccactagatacaaaggttctccacgtccccaccagactcaggagcccagctggcttcacctagtggatcccgcaccagagctgcaggtggagctgcctgccagtcctggtgccgtgcgcctgcactcctcagcccttgggtggtcgatgggactgggcgccgtggagcagggggtggcggtcgtcgggaacctccggccgcacaggagcccatggagcgggtgggaggctcaggcttggcgggctgcaggtccccagccctgccccgcgggaaggcagctaaggcccgagacgttaaagcaaaatattatactgtccttaatccagtgtataggcgcctcgctggtgcccacaggaactgctgaattagagccaagcccttcattacagctcaggggcacaactgatgccgcacaagccattaaaaatgagtttgcgagagtacaaaaaagaaacctttgtagacgagggccaatttgtttcgaaggcgatgcactgagctggttttttgaaaagatcaacaaaattgatagacgtctagcaagacgaataaagaagaaaagagagaagaatcaaatagaagcaataaaaaatgataaaggggatatcaccaccgatcccacagaaatacaaactaccatcagagaatactataaacacctctatgcaaataaactagaaaatctggaagaaatggataaattcctcgacccatacactctcccaagaataagccaggaagaagttgaatctctgaatagaccaataacaggctctgaaattgaggcaataattaatagcttaccaaccaaaaaaagtccagcaccagacggattcacagccgaattctaccagaggtacaaggagaagctgatagtgttggaagttctggccagggcaatcaggcaggagaaagaaataaagggtattcaattaggaaaagaggaactcaaattgtccctgtttgcagatgacatgattgtatatctagaaaaccccatcgtctcagcccaaaatctcctcaagctgataagcaacttcagcaaagtctcaggatacaaaatcaatgtgcaaaaatcacaagcattcttatacagtaataacagacaaacagagagccaaatcatgagtgaactcccattcacaattgcttcaaagagaataaaatacctaggaatccaacttacaagggatgtgaaggacctcttcaaggagaactacaaaccactgctcaatgaagttaaagaggatacaaacaaatggaagaacattccatgctcatggataggaagaatcaatattgtgaaaatggccatactgcccaagaccgcaaagaatggtccggttctcccacctttacattcggaggaaaaaattccgtttaattctccattgattattccgttaaacaattacggcaaccaaagcctgacaaaagcgcaggtaaatgtgtcaaaatctgatgacacactcaaaatcaacggagtggaagatcacaaatctatttttgacggagacggaaaaacatatcagaccgttcagcagtttatcgatgaaggcaattatacatccggcgacaaccatacgntgagagaccctcactacgttgaagacaaaggccataaataccttgtattcgaagccaacacgggaacagaaaacggataccaaggcgaagaatctttatttaacaaagcgtactacggcggcggcacgaacttcttctgtaaagaaagccagaagcttcagcagagcgctaaaaaacgcgatgctgagttagcgaacggcgccctcggtatcatagagttaaataatgattacacattgaaaaaagtaatgaagccgctgatcacttcaaacacggtaactgatgaaatagagcgcgcgaatgttttcaaaatgaacggcaaatggtacttgttcactgattcacgcggttcaaaaatgacgatcgatgggattttgccgatttcggaccccaccatcaaacaggattttcgcctgctggggcaaaccagcgtggaccgcttgctgcaactctctcagggccaggcggtgaagggcaatcagctgttgcccgtctcactggtgaaaagaaaaaccaccctggcgcccaatacgcaaaccgcctctccccgcgcgttggccgattcattaatgcagctggcacgacaggtttcccgactggaaagcgggcagtga

SEQ ID NO: 10119 - DNA, 2762 bp, Homo sapiens
  SIMILAR (1799)..(2500): 941254mologous to Homo sapiens putative p150,accession number U93563,Smith-Waterman Score=1178.
atggagaatgactttgacgagttgagagaagaaggcttcagacaatcaaattactctgagctacgggaggacattcaaaccaaaggcaaagaagttgaaaactttgaaaaaaatttagaagaatgtataactagaataaccaatacagagaagtgcttaaaggagctgatggagctgaaaaccaaggctcaagaactacgtgaagaatggagaagcctcaggagccgatgcgatcaactggaagaaagggtatcagcgatggaagatgaaatgaatgaaatgaagggagaagggaagtttagagaaaaaagaataaaaagaaatgagcaaagcctccaagaaatatgggattatgtgaaaagaccaaatctatgtctgattggtgtacctgaaagggatgggcagaatggaaccaagttggaaaacacgttgcaggatgttatccaggagaacttccccaatctagcaaggcaggccaacgttcagattcaggaaatacagagaacgccacaaagatactcctcgagaagagcaactccaagacacataattgtcagattcaccaaagttgaaatgaaggaaaaaatgttaagggcagccagagagaaagaaatacaaactaccatcagtgaatactacaaacacctctacacaaataaactagaaaatctagaagaaatggataaattccttgacacatacactctcccaacactaaaccaggaagaagttgaatctctgaatagaccaataacaggagctgaaattgtggcaataatcaatagcttaccaacgaaaaagagtccaggaccagatggattcacagccgaattctaccagaggtacaaggaggaactggtaccattccttctgaaactattccaatcaatagaaaaagagggaatcctccctaactcattttatgaggccagcatcattctgataccaaagtcaggcagagacacaacaaaaaaagagaattttagaccaatatccttgatgaacattgatgcaaaaatcctcaataaaatactggcaaaccgaatccagcagcacatcaaaaagcttatccaccatgatcaagtgggcttcattcctgggatgcaaggctggttcaatatacgcaaatcaataaatataatccagcatataaacagagccaaagacaaaaaccacatgattatctcaatagatgcagaaaaagcctttgacaaaattcaacaacccttcatgctaaaaactctcaataaattaggccaaaatctcctcaagctgataaacaacttcagcaaattctcaggatacaaaatcaatgtgcaaaaatcacaagcattctcatacaccaataacagacaaacagagagccaaatcatgagtgaactcccattcacaattgcttcaaagagaataaaatacctaggaatccaacttacaagggatgtgaaggacctcttcaaggagaactacaaaccactgctcaatgaaataaaagaggatacaaacaaatggaaaaacatcccatgctcatgggttggaagaatcaatatcgtgaaaatggccatactgcccaaggcaatttacagattcaatgccatccccatcaagctaccaatgactttcttcacagaattggaaaaaactactttaaagttcatatggaaccaaaaaagagcccgcatcgccaagtcaatcctaagccaaaagaacaaagctggaggcatcacactacctgacttcaaactatactacaaggctacagtaaccaaaacagcatggtactggtaccaaaacatgtgctatagatcaatggaacagaacagagccctcagttattatgtcgcatatctacaaccatctgatctttgacaaacctgagaaaaacaagcaatggggaaaggattccctatttaataaatggtgctgggaaaactggctagccatatgtagaaagctgaaactggatcccttccttacaccttatacaaaaatcaattcaagatggattaaagacttaaatgttggacctaacaccataaaaaccctagaagaaaacctaggcattaccattcaggacataggcacgggcaaggacttcatgtctaaaacaccaaaagcaatggcaacaaaagccaaaattgacaaacgggatctaattaaactaaacagcttctgcacagcaaaagaaactaccatcagagtgaacaggcaacctacaaaatgggagaaaattttcacaacctactcatctgacaaagggctaatatccagaatctacaatgaactcaaacaaatctacaagaaaaaaacaaacaaccccatcaaaaagtgggcgaaggacatgaacagacacttctcaaaagaacacatttatgcagccaaaaaacacatgaaaaaatgctcaccatcactggccatcagagaaatgcaaatcaaaaccacaatgagataccatctcacaccagttagaatggcaatcattaaaaagtcaggaaacaacaggtcctcaaacctggctgtccaaaaaggacgccgcaaagtcctgcagagcccccaaaagacacaagcgcggacagaaaagcatcccccgagagacagcgaagccacacaccctctccgggccagctaccagggcgggcaacttcacccctcgaagcaaacgaaagcccctgttctccaagcaaaggaaaaggggatggcaaacagaaataaacaggaaccgctctcagccttcatcttccgcgccctcccccagcaaactccag

SEQ ID NO: 10120 - DNA, 5757 bp, Homo sapiens
  SIMILAR (1129)..(3936): 981254mologous to Homo sapiens putative p150,accession number U93563,Smith-Waterman Score=4773.
atggggaaaaaacagaacagaaaaactggaaactctaaaacgcagagtgcctctcctcctccaaaggaacgcagttcctcaccagcaacggaaaaaagctggatggagaatgactttgacgagctgagagaagaaggtttcagacgatcaaattactctgagctacgggaggacattcaaaccaaaggcaaagaagttgaaaactttgaaaaaaatttagaagaatgtataactagaataaccaatacagagaagtgcttaaaggagctgatggagctgaaaaccaaggctcgagaactacgtgaagaatgcagaagcctcaggagccgatgtgatcaactggaagaaagggtatcagcaatggaagatgaaatgaatgaaatgaagcgagaagggaagtttagagaaaaaagaataaaaagaaatgagcaaagcctccaagaaatatgggactatgtgaaaagaccaaatctacgtctgactggtgtacctgaaagtgacggggagaatggaaccaagttggaaaacactctgcaggatattatccaggagaacttccccaatctagcaaggcaggtcaatgttcagattcaggaaatacagagaacgccacaaagatactcctcgagaagagcaactccaagacacataattgtcagattcaccaaagttgaagtgaaggaaaaaatgttaagggcagccagagagaaaggtcgggttaccctcaaagggaagcccatcagactaacagcggatctctcggcagaaaccctacaagccagaagagagtgggggccaatattcaacattcttaaagaaaagaattttcaacccagaatttcatatccagccaaactaagcttcataagtgaaggagaaataaaacactttacagacaagcaaatgctgagagattttgtcaccaccaggcctgccctaaaagagctcctgaaggaagtgctaaacatggaaaggaacaaccagtaccagccgctgcaaaatcatgccaaaatacagatcaacgagacagaaagtcaacaaggatacccaggaattgaactcagctctgcaccaagcggacctaatagacatctacagaactctccacaccaaatcaacagaatatactttttttcagcaccacaccacacctattccaaaattgaccacatagttggaagtaaagctctcctcagcaaatgtaaaagaacagaaattataacaaactatctctcagaccacagtgcaatcaaactagaactcaggattaagaatctcaatcaaagccgctcaactacatggaaactgaacaacctgctcctgaatgactactgggtacataacgaaatgaaggcagaaataaagatgttctttgaaaccaacgagaacaaagacacaacataccagaatctctgggacgcattcaaagcagtgtgtagagggaaatttatagcactaaatgcccacaagagaaagcaggaaagatccaaaattgacaccctaacatcacaattaaaagaactagaaaagcaagagcaaacacattcaaaagctagcagaaggcaagaaataactaaaatcagagcagaactgaaggaaatagagacacaaaaaacccttcaaaaaatcaatgaatccaggagctggttttttgaaaggatcaacaaaattgatagaccgctagcaagactaataaagaaaaaaagagaggagaatcaaatagacacaataaaaaatgataaaggggatatcaccaccgatcccacagaaatacaaactaccatcagagaatactacaaacacctctatgcaaataaactagaaaatctagaagaaatggataaattccttgacacatacactctcccaagactaaaccaggaagaagttgaatctctgaatagaccaataacaggagctgaaattgtggcaataatcaatagtttaccaaccaaaaagagtccaggaccagatggattcacagctgaattctaccagaggtacaaggaggaactggtaccattccttctgaaactattccaatcaatagaaaaagagggaatcctccctaactcattttatgaggccagcatcattctgataccaaagccgggcagagacacaaccaaaaaagagaattttagaccaatatccttgatgaacattgatgcaaaaatcctcaataaaatactggcaaaccgaatccagcagcacatcaaaaagcttatccaccatgatcaagtgggcttcatccctgggatgcaaggctggttcaatatacgcaaatcaataaatgtaatccagcatataaacagagccaaagacaaaaaccacatgattatctcaatagatgcagaaaaagcctttgacaaaattcaacaacccttcatgctaaaaactctcaataaattaggtattgatgggacgtatttcaaaataataagagctatctatgacaaacccacagccaatatcatactgaatgggaaaaaactggaagcattccctttgaaaactggcacaagacagggatgccctctctcactgctcctattcaacatagtgttggaagttctggccagggcaatcaggcaggagaaggaaataaagggtattcagttaggaaaagaggaagtcaaattgtccctgtttgcagacgacatgattgtttatctagaaaaccccatcgtctcagcccaaaatctccttaagctgataagcaacttcagcaaagtctcaggatacaaaatcaatgtacaaaaatcacaagcattcttatacaccaacaacagacaaacagagagccaaatcatgagtgaactcccattcacaattgcttcaaagagaataaaatacctaggaatccaacttacaagggatgtgaaggacctcttcaaggagaactacaaaccactgctcaaggaaataaaagaggatacaaacaaatggaagaacattccatgctcatgggtaggaagaatcaatatcgtgaaaatggccatactgcccaaggtaatttacagattcaatgccatccccatcaagctaccaatgactttcttcacagaattggaaaaaactactttaaagttcatatggaaccaaaaaagagcccgcatcgccaagtcaatcctaagccaaaagaacaaagctggaggcatcacactacctgacttcaaactatactacaaggctacagtaaccaaaacagcatggtactggtaccaaaacagagatatagatcaatggaacagaatagagccctcagaaataacgccgcatacctacaactatctgatctttgacaaacctgagaaaaacaagcaatggggaaaggattccctatttaataaatggtgctgggaaaactggctagccatatgtagaaaactgaaactggatcccttccttacaccttatacaaaaatcaattcaagatggattaaagatttaaacgttagacctaaaaccataaaaaccctagaagaaaacctaggcattaccattcaggacataggcgtgggcaaggacttcatgtccaaaacaccaaaagcaatggcaacaaaagccaaaattggcaaatggtacctaattaaactaaagagcttctgcacagcaaaagaaactaccatcagagtgaacaggcaacctacaacatgggagaaaattttcgcaacgtactcatctgacaaagggctaatatccagaatctacaatgaactcaaacaaatttacaagaaaaaaacaaacaaccccatcaaaaagtgggcgaaggacatgaacagacacttctcaaaagaagacatttatgcagccaaaaaatacgtgaaaaaatgctcatcatcactggccatcagagaaatgcaaatcaaaaccactatgagataccatctcacaccagttagaatggcaatcattaaaaagtcaggaaacaacagcaaaaagaacaaagctggaggaatcatgccagctgacttcaaactatactacaaggctatgggaacaaaaacagcatgggacatggatgaaactgaaaaccatcatgctcagcaaactaacacaagaacagaaaaacaaacaccacatgttctcactcataagtgggagttgaacaatgagaacacatggacacagggaggggaacatcacacaccagggcctgtcaggggtaccttgggacaactgacatttgcaagacttaacctgagccccatcagttacaagagtttggaggcctcagctgtcacttctgtttccatggaaactcaaatcagattgccaaaaatgaggttttggtatcaggatgatgctggcctcataaaatgtgttggggaggagttgctctttttctattgtttggaaccatttcagaaggaatggtaccagctcctctctgtacctctggtagaatttggctgtgaatccgtctggtcctgggctttttttggctgggacatggatgaagctggaaaccatcattctcagcaaactaacacaccaacagaaaaccgaacagcacatcttctcactcataagtgggaattgaacaatgaaaacacatggacacatggagggaaacatcacacaccagggcctgttgggggatgttcacttatccaagtggaaatcagatggtttatcgaaatggtatgtaagagagaagtttacagatacgaccattcatggtggtggcagttgcagcaacagcagcaggatccccagggcagactgcaggcctctgggggctgggctctcagaagggtgccaggccacagccaaaatgctcaggcagaagcaaggtggctgtactgtgagcctagggaaggcaggtcccccttagcgggaacagtgaaagcaagggtgctcaatgtgcttgctcctttaccctgcagcagcagcagccgtgatacacatttttgggcttcctcaggcatgagccaaatatcagacactctatccctcaaactccaagagaccctcacgttcctcaacatccttctcttccaaagaaagggagaggggaagaacagcatgtcaacaacactctccaaagaattcctgactctcagcttctttgacttcaacctgtttcaaaactcaatgttggaagttctggccagggcaattaggcaggagaaggaaataaagggtattcaattaggaaaagaggaagtcaaattgtccctgtttgcagatgacatgattgtatatctagaaaacccccttgtctcagcccaaaatctccttaagctgataagcaacttcagcaaagtctcagaatacaaaatcaatgtacaaaaatcacaagcattcttacacaccaataacagacaaacagagagccaaatcatgagtgaactccccttcacaattgcttcaaagagaataaaatacctaggaatccaacttacaagggatgtgaaggacctcttcaaggagaactacaaaccactgctcaatgaaataaaagaggatacaaacaaatggaagaacattccatgctcatgggtaggaagaatcaatatcgtgaaaatggccatactgcccaaggtaatttatagattcaatgccatcctcatcaagctaccaatgactttcttcacagaattggaaaaaactactttaaagttcatatggaaccaaaaaagagcccacgtcgccaagtcaatcctaagccaaaagaacaaagctggaggcatcacactacctgacttcaaatacaaggctacagtaaccaaaacagcatggtatatataa

SEQ ID NO: 10121 - DNA, 2733 bp, Homo sapiens
  SIMILAR (1498)..(2592): 861254mologous to Homo sapiens putative p150,accession number U93563,Smith-Waterman Score=1710.
atgggagactttaacaccccactgtcaacattagacagatcaacaagacagaaagtcaacaaggatacccaggaattgaactcagctccacaccaggcagacctaatagacatctacagaactctgcaccccaaatcaacagaatatacatttttttcagcaccacaccacacctattccaaaactgaccacatacttggaagtaaagctctcctcagcgaatgtaaaagaacagaaattataacaaactatctctcagatgacagtgcaatcaaactagaactcaggattaagaatctcactcaaaaccgctcaactacatggaaactgaacaacctgctcctggatgactactgggtacataacgaaatgaaggcagaaataaagatgttctttgaaaccaatgagaacaaagacacaacataccagaatctctgggacgcattcaaagcagtgtgtagagggaaatttgtagcactaaatgcccacaagagaaagcagggaagatccaaaattgacaccctaacatcacaattaaaagaactagaaaagcaagagcaaacacattcaaaagctagcagaaggcaagaaataactaaaatcagagcagaactgaaggaaatagagacacaaaaaaccgttcaaaaaattaatgaatccaggagctggttttttgaaaggatcaacaaaattgatagacagctagcaagactaataaagaaaaaaagggagaagaatctaatagacgcaataaaaaatgataaaggggatatcaccaccgatcccacagaaatacaaactaccatcagagaatactacaaacacctctatgcaaataaactagaaaatctagaagaaatggataaattcctggacacatacactctcccaagactaaaccaggaagaagttgaatctctgaatagaccaataacaggatctgaaattgtggcaataatcaatagcttaccaaccaaaaaaaagtccaggaccagatggattcacagccgaattgtaccagaggtacaaggaaggagctgtgttggaagttctggccagggcaatcaggcaggagaaggaaataaagggtattcaattaggaaaagaggaagtcaaattgtccctctttgcaggtgacatgattgtatatctagaaaaccccattgtctcagcccaaaatctccttaagctgataagcaacttcagcaaagtctcaggatacaaaatcaatgtgcaaaaatcacaagcattcttatacaccaataacagacaaacagagagccaaatcatgagtgaactcccattcacaattgcttcaaagagaataaaatacctaggaatccaacttacaagggatgtgaaggacctcttcaaggagaactacaaaccactgctcaatgaaataaaagaggatacaaacaaatggaagaacattccatgctcatgggtaggaagaatcaatatcgtgaaaatggccatactgcccaaggtaatttacggattcaatgccatccccatcaagctaccaatgactttcttcacagaattggaaaaaaactacttaaaagttcatatggaaccaaaaaaagagcccacatcgccaagtcaatcctaagccaaaagaacaaagctggaggcatcacgctacctgacttcaaactatactacaaggcgacagtaaccaaaacagcatggtactggtaccaaagcagagatatagaccaatggaacagaacagagccctcagaaataacgccacatatctacaactatctgatctttgacaaacctgacaaaaacaagcaatggggaaaggattccctatttaataaatggtgctgggaaaactggctagccatatgtagaaagctgaaactggatcccttctttaccccttatacaaaaattaattcaagatggattaaagacttaaatgttagacctaaaaccataaaaaccctagaagaaaacctaggcaatatcattcaggacataggcatgggcaaggatttcatgtctaaaacaccaaaagcaatggcaacaaaagccaaaattgacaaatgggatctaattaaactaaagagcttctgcacagcaaaagaaactaccgtcagagtgaacaggcaacctacagaatgggagaaaatttttgcaacctactcatctgacaaagggctaatatccagaatctacaatgaactcaaacaaatttacaagaaaaaaacaaacaaccccatcaaaaagtgggcaaaggatatgaacaaacacttctcaaaagaagacatttatgcagccaacagacacatgaataaatgctcttcatcactggccatcagagaaatgcaaatcaaaaccacaatgagataccatctcacaccagttagaatggcaatcattaaaaagtcaggaaacaacaggtgctggagaggacgtggagaaataggaacacttttacactgttggtgggactgtaaactagttcaatcattgtggaagtcagtgtggcaattcctcagggatctagaactggaaataccatttgacccagccatcccattactgggaaaactgtctcataaattagggaagtgctcaattacaagcctgacagagattgattttggttctgctgttggtcactaccagcaagtgaaggccgcagaaaccacaactccagctaatgctggaatcgcttcagaggtgctcactgaacaagtgttcattaagaagtga

SEQ ID NO: 10122 - DNA, 6973 bp, Homo sapiens
atggagaatgactttgacgagctgagagaagaaggcttcagacgatcaaattactctgagctatgggaggacattcaaaccaaaggcaaagaagttgaaaactttgaaaaaaatttagaagaatgtataactagaataaccaatacagagaagtgcttaaaggagctgatggagctgaaaaccaaggctcgagaactacatgaagaatgcagaagcctcaggagccgatgtgatcaactggaagaaagggtatcagcaatggaagatgaaatgaatgaaatgaagggagaagggaagtttagagaaaaaagaataaaaagaaacgagcaaagcctccaagaaatatgggactatgtgaaaagaccaaatctacatctgattggtgtacctgaaagtgatggggagaatggaaccaagttggaaaacactctgcaggatattatccaggagaacttccccaatctagcaaggcaggccaacgttcagattcaggaaatacagagaatgccacaaagatactcctcgagaagagcaactccaagacacataattgtcagattcaccaaagttgaaatgaaggaaaaaatattaaaggcagccagagagaaagacagatcaacgagacagaaagtcaacaaggatacccaggaattgaactcagctctgcaccaagtggacctaatagacctaatagacctaatctacagaactctccaccccaaatcaacagcaatatacatttttttcagcaccacaccacacctattccaaaattgaccacatacttggaagtaaagctctcctcagcaaatgtgaaagaacagagattataacaaactatctctcagaccacagtgcaatcaaactagaactcaggattaagaatctcactcaaaaccgctcaactacatggaaactgaacaacctgctcctgaatgactactgggtacataacgaaatgaaggcagaaataaagatgttctttgaaaccaatgagaacaaagacacaacataccagaatctctgggatgcattcaaagcagtgtgtagagggaaatttatagcactaaatgcccacaagagaaagcaggaaagatccaaaattgacaccctaacatcacaattaaaagaactagaaaagcaagagcaaacacattcaaaagctagcagaaggcaagaaataactaaaatcagagcagaactgaaggaaatagagacacaaaaaacctttcaaaaaattaatgaatccaggagctggttttttgaaaggatcaacaaaattgatagaccgctagcaagactaataaagaaaaaaagagagaagaatcaaatagacacaataaaaaatgataaaggggatatcaccaccaatcccacagaaatacaaactaccatcagagaatattacaaacacctctacgcaaataaactagaaaatctagaagaaatggataaattcctcgacacaaacaccctcccaagactaaaccaggaagaagttgaatctctgaatagaccaataacaggatctgaaattgtggcaataatcaatagtttactaaccaaaaagagtccaggaccagatggattcacagccgaattctaccagaggtacaaggaggaactgctgggcagagacacaaccaaaaaagagaattttagaacaatatccttggtgaacattgatgcaaaaatcctcaataaaatactggcaaaacgaatccagcagcacgtcaaaaagcttatccactatgatcaagtgggcttcatccctgggatgcaaagctggttcaatatacgcaaatcaataaatgtaatccagcatataaagagagccaaagacagaaaccacatgattatctcaatagatgcagaaaaagcctttgacaaaattcaacaacccttcatgctaaaaactctcaataaattaggtattgatgggacgtatttcaaaataataagagttatctatgacaaacccacagccaatatcatactaaatgggcaacaactggaagcattccctttgaaaactggcacaagacagggatgccctccctcaccactcctgttcaacatagtgttggaagttctggccagggcaattaggcaagagaaggaaataaagggtattcaattaggaaaagaggaagtcaaattgtccctgtttgcagaccacatgattgtatatctagaaaaccccattgtctcagcccaaaatctccttaagctgataagcaacttcagcaaagtctcaggatacaaaatcaatgtacaaaaatcacaagcattcttatacaccaacaacagacaaacagagagccaaatcatgagtgaactcccattcacaattgcttcaaagagaataaaatacctaggaatccaacttacaagggatgtgaaggacctcttcaaggagaactacaaaccactgctcaaggaaataaaagaggatacaaacaaatggaagaacattccatgctcatgggtaggaagaatcaatatcgtgaaaatggccatactgcccaaggtaatttatagattcaatgccatccccatcaagttaccaatgcctttcttcacagaattggaaaaaactactttaaggttcatatggaaccaaaaaagagcctgcatcgccaaggcaatcctaagccaaaagaacaaagctggaggcatcacactacctgacttcaaactatactacaaggctacagtaaccaaaacagcatggtactggtaccaaaacagagatatagatcaatgcaacagaacagagccctcagaaataacgctgcatatctgcaactatctgatctttgacaaacctgagaaaaacaagcaatggggaaaggattccctatttaataaatggtgctgggaaaactggctagccatatgtagaaagctgaaactggatcccttccttacaccttatacaaaaatcaattcaagatggattaaagacttaaacgttagacctaaaaccataaaaaccctagaagaaaacctaggcattaccattcaggacataggcatgggcaaggacttcatgtctaaaacaccaaaagcaatggcaacaaaagacaaaattgacaaatgggatctaattaaactaaagagcttctgcacagcaaaagaaactaccatcagagtgaacaggcaacctacggaatgggagaaaacttttgcaacctactcatctgacaaagggctaatatccagaatctacaatgaactcaaactaatttacaagaaaaaaacaaacaaccccatcaaaaagtgggcgaaggacatgaacagacacttctcaaaagaagacatttatgcagccaaaaaacacatgaaaaaatgctcatcatcactggccatcagagaaatgcaaatcaaaaccacagtgagataccatctcacaccagttagaatggcgatcattaaaaagtcaggaaacaacaggtgttggagaggatgtggagaaataggaacacttttacactgttggtgggactgtaaactagttcaaccattgtggaagtcagtgtggcgattcctcagggatctagaactagaaataccatttgacccagccatcccattactgggtatatacccaaacgactataaatcatgctgctataaagacacatgcacattgagtctaccagaaatccgcaactgcccaacgaaaagtgtcccagtccccttctctgttgatgaaactcagtatcatgttgaagatactagtcctgtaagctggcaagtaaaagttctaggcaagcatatacatcagggaagcagctatgaagatgtttggctgcctcagcgcatgcaaggaaaactaacaaacagaaaggacatccacaccaaaaacccatctgtacatcaccatcatcaaagaccaaaagtagataaaaccacaaagatggggaaaaaacagaacagaaaaactggaaactctaaaaagcagagcgcctctcctcctccaaaggaacgcagttcctcaccagcaatgcaacaaagctggacggagaatgactttgacgagctgagagaagaaggcttcagacgatcaaattactctgagctacgggaggacattcaaaccaaaggcaaagaagttgaaaactttgaaaaaaatttagaagaatgtataactagaataaccaatacagagaagtgcttaaaggagctgatggagctgaaaaccaaggctcgagaactacgtgaagaatgcagaagcctcaggagccgatgcgatcaactggaagaaagggtatcagtgatggaagatgaaatgaatgaaatgaagcgagaaggaaagtttagagataaaagaataaaaagaaacgagcaaagcctccaagaaacatgggactatgtgaaaagaccaaatctacgtctgattggtgtacctgaaagtgatggggagaatggaaccaacttggaaaacactctgcaggatattatccaggagaatttccccaatctagcaaggcaggccaacgttcagattcaggaaatacagagaacaccacaaagatactcctcgagaagagcaactccaagacacataattgtcagattcaccaaagttgaaatgaaggaaaaaatgttaagggcagccagagagaaagaaatacaaactaccatcagagaatactacaaatacctctacacaaataaactagaaaatctagaagaaatggataaattcctcgacacatacactctcctaagactaaaccagaaagaagttgaaactctgaatagaccaataacaggagctgaaattgtggcaataatcaatagcttaccaaccaaagagagtccaggaccagatggattcacagccaaattctaccagaggtacaaggaggaactggtaccattccttctgaaactattccaatcaatagaaaaagagggaatcctccctaactcattttatgaggccagcatcatcctgataccaaagccgggcagagacacaaccaaaaaagagaattttagaccaatatccttgatgaacattgatgcaaaaatcctcaataaaatactggcagaccgaatccagcagcacatcaaaaagcttatccaccatgatcaagtgggcttcatccctgggatgcaaggctggttcaatatatgcaaatcaataaatgtaatccagcatataaacagagccaaagacaaaaaccacatgattatctcaatagatgcagaaaaggcctttgacaaaattcaacaacccttcatgctaaaaactctcaataaattaggtattgatgggacatatttcaaaataataagagctatctatgacaaacccacagccaatatcatactgaatgggcaaaaactggaagcattccctttgaaaactggcacaagacagggatgctctctctcaccactcctattcaacatagtgttggaagttctggccagggcaattaggcaggagaaggaaataaagggtattcaattaggaaaagaggaagtcaaattgtccctgtttgcagatgacatgattgtttatctagaaaaccccattgtctcagcccaaaatctccttaagctgataagcaacttcagcaaagtctcaggatacaaaatcaatgtgcaaaaatcacaagcattcctatacaccaacaacagacaaacagagagccaaatcatgagtgaactcccattcacaattgcttcaaagagaataaaatacctaggaatccaacttacaagggatgtgaaggacctcttcaaggagaactacaaaccactgctcaaggaaataaaagaggatacaaacaaatggaagaacattccgtgctcatggataggaagaatcaatatcgtgaaaatggccatactgcccaaggtaatttatagattcaatgccatctccatcaagctaccaatgactttcttcacagaattggaaaaaactactttaaagttcatatggaaccaaaaaagagcctgcattgccaagtcaatcctaagccaaaagaacaaagctggaggcatcatgctacctgacttcaaactatactacaaggctacagtaaccaaaacagcacagtactggaaccaaaacagagatagagaccaatggaacagaacagagccctcagaaataatgccgcatatctacgaccacctgatctttgacaaacctgacaaaaacaagaaatggggaaacaattccctatttaataaatggtgctgggaaaactggctagccatatggagaaagctgaaactggatcccttccttacaccttatacaaaaattaattcaagatggattaaagacttacatgttagacctaaaatcataaaaaccctagaagaaaacctaggcaataccattcaggacatagtcatgggcaaggacttcatgtctaaaacaccaaaagcaatggcaacaaaagccaaaattgacaaatgggatctaattaaactaaagagcttctgcacagcaaaagaaactaccatcagagtgaacaggcaacctacaaaatgggagaaaatttttggtatctactcatctgacaaaggtctaatatcaagaatctacaatgaactccaacaaatttacaagaaaaaaacaaacaaccccatcaaaaagtgggtgaaggacatgaacagatacttctcaaaagaagacatttatgcagccaaaagacacatgaaaaaatgctcatcatcactggccatcagagaaatgcaaatcaaaaccacaatgagatactatctcacaccactcagaatggcgatcattaaaaagttcggaaacaacagacaggagacagtaagagaaatggcctgtctcctcagcggcacaatggactttagacatcgcgcctgttttgtactctccaagccggacttctctactcgctggcctggcgctgatgcccagaggccccctgtgcttgtggttgtggccttagacagttccctgcccttt

SEQ ID NO: 10123 - DNA, 3320 bp, Homo sapiens
ctttcccaagtttcaagatagctattcctaaaaatgatcatgggcatgaacaacatttttggggatatagagttccaaataatgccatggaagatacagcttatcaactggtccaccagtaccctacaagaatgcaggcccggagatgcaggatcgcgctgtcacagtggtcctcttcgcatcctctcccggcaaagagagatgctccggttaccagcggcgcgcatccccgcaggcgcctctcctctcgccgatacccacccaggcagtcccgacaggcgcgcctgcctacctggtggccggctgtcagcgaagcggcggtgcctcagccccttctcagctgctacagcgctcccagcgccatgttcccggtctccccgggcgcacgctggggaactactactggctggaagttctttgaaaccaacgagaacaaagacacaacataccagaatctctgggacgcattcaaagcagtgtgtagagggaaatttataccactaaatgcccacaagagaaagcaggaaagatccaaaattgacaccctaacatcacaattaaaagaactagaaaagcaagagcaaacacattcaaaagctagcagaaggcaagaaataactaaaatcagagcagaactgaaggaaatagagacacaaaaaacccttcaaaaaatcaatgaatccaggagctggttttttgaaaggatcaacaaaattgatagaccgctagcaagactaataaagaaaaaaagagagaagaatcaaatagacacaataaaaaatgataaaggggatatcaccaccaatcccacagaaatacaaactaccatcagagaatactacaaacacctctacgcaaaaaaactagaaaatctagaagaaatggatacattcctcgacacatacactctcccaagactaaaccaggaagaagttgaatctctgaatagaccaataacaggagctgaaattgtggcaatattcaatagtttaccaaccaaaaagagtccaggaccagatggattcacagccgaattctaccagaggtacaaggaggaactggtaccattccttctgaaaatattccaatcaatagaaaaagagggaatcctccctaactcattttatgaggccagcatcattctgataccaaagccaggcagagacacaaccaaaaaagagaattttagaccaatatccttgatgaacattgatgcaaaaatcctcaataaaatactggcaaaccgaatccagcagcacatcaaaaagcttatccaccatgatcaggtgggcttcatccctggaatgcaaggctggttcaatatacgcaaatcaataaatgtaatccagcatataaacagagccaaagacaaaaaccacatgattatctcaatagatgcagaaaaagcctttgacaaaattcaacaacccttcatgctaaaaactctcaataaattaggtattgatgggacgtatttcaaaataataagagctatctatgacaaacccacagccaatatcatactgaatgggcaaaaactggaagcattccctttgaaaactggcacaagacagggatgccctctctcaccgctcctattcaacatagtgttggaagttctggccagggcaatcaggcaggagaaggaaataaagggtattcaattaggaaaagaggaagtcaaattgtccctgtttgcagacgacatgattgtttatctagaaaaccccatcatctcagcccaaaatctccttaagctgataagcaacttcagcaaagtctcaggatacaaaatcaatgtacaaaaatcacaagcattcctatacaccaacaacagacaaacagagagccaaatcatgagtgaactcccattcacaattgcttcaaagagaataaaatacctaggaatccaacttacaagggatgtgaaggacctcttcaaggagaactacaaaccactgctcaaggaaataaaagaggatacaaacaaatggaagaacattccatgctcatgggtaggaagaatcaatatcgtgaaaatggccatactgcccaaggtaatttacagattcaatgccatccccatcaagctaccaatgactttcttcacagaattggaaaaaactactttaaagttcatatggaaccaaaaaagagcccgcatcgccaagtcaatcctaagccaaaagaacaaagctggaggcatcacactacctgacttcaaactatactacaaggctacagtaaccaaaacagcatggtactggtaccaaaacagagatatagatcaatggaacagaacagagccctcagaaataacgccacatacctacaactatctgatctttgacaaacctgagaaaaacaagcaatggggaaaggattccctatttaataaatggtgctgggaaaactggctagccatatgtagaaagctgaaactggatcccttccttacaccttatacaaaaatcaattcaagatggattaaagatttaaacgttagacctaaaaccataaaaaccctagaagaaaacctaggcagtaccattcaggacataggcgtgggcaaggacttcatgtccaaaacaccaaaagcaatggcaacaaaagccaaaattgacaaatgggatctaattaaactaaagagcttctgcacagcaaaagaaactaccatcagagtgaacaggcaacctacaacatgggagaaaattttcgcaacctactcatctgacaaaaggctaatatccagaatctacaatgaactcaaacaaatttacaagaaaaaaacaaacaaccccatcaaaaagtgggcgaaggacatgaacagacacttctcaaaagaagacatttatgcagccaaaaaacacatgaaaaaatgctcatcatcactggccatcagagaaatgcaaatcaaaaccactatgagatatcatctcacaccagttagaatggcaatcattaaaaagtcaggaaacaacagaatcagaaggcatttccagccaagatcagccatgttcttctgctgctgccctgggggcgagggctcagggctgcagtgggagctgctgctggcagcatggactgtgctcccctacccctgccctgcagccacagttgggagattcctcaagcaggcacagactgctgaccattccttcctgggccatgtttggagggtgcccagcagcaggagctggactgataaagaaatcctgagcttggtcgtcaacagacagaaccaggaagttgtgcagctcatagggggcctctgtgggacacacaccatctcgcccacacagcacccagccacgggttga

SEQ ID NO: 10124 - DNA, 4259 bp, Homo sapiens
  SIMILAR (160)..(411): 661254mologous to Homo sapiens ras-related protein,accession number M22995,Smith-Waterman Score=254.
atgggagactttaacaccccactgtcaacattagacagatcaatgagacagaaagtcaacaaggatacccaggaattgaactcagctctgcaccaagcagacctaatagacatctacagaactctccaccccaaatcaacagaatatacatttttttcagcaccacaccacacctattctaaaattgaccacatacttggaagtaaagctctcctcagcaaatgtaaaagaacagagattataacaaactatctctcagaccacagtgcaatcaaactagaactcaggattaagaatctcactcaaaaccactcaactacatggaaactgaacaacctgctcctgagtgactactgggtacataacgaaatgaaggcagaaataaagatgttctttgaaaccaacgagaacaaagacacaacataccagaatctctgggacgcattcaaagcagtgtgtagagggaaatttatagcactaaatgcccacaagagaaagcaggaaagatccaaaattgacaccctaacatcacaattaaaagaactagaaaagcaagagcaaacacattcaaaagctagcagaaggcaagaaataactaaaatcagagcagaactgaaggaaatagagacacaaaaaacccttcaaaaaattaatgaatccaggagctggttttttgaaaggatcaacaaaattgatagaccgctagccagactaataaagaaaaaaagagagaagaatcaaatagacacaataaaaaatgataaaggggatatcaccaccgatcccacagaaatacaaactaccatcagagaatactacaaacacctctacgcaaataaactagaaaatctagaagaaatggataaattcctcgacacatacactctcccaagactaaaccaggaagaagttgaatctctgaatagaccaataacaggagctgaaaatgtggcaataatcaatagtttaccaaccaaaaagagtccaggaccagatggattcacagccgaattctaccagaggtacaaggaggaactgctgataagcaacttcagcaaagtctcaggatacaaaatcaatgtacgaaaatcacaagcattcttatacaccgacaacagacaaacagagagccaaatcatgagtgaactcccattcacaattgcttcaaagagaataaaatacctaggaatccaacttacaagggatgtgaaggacctcttcaaggagaactacaaaccactgctcaaggaaataaaagaggatacaaacaaatggaagaacattccatggtcatgggtaggaagaatcaatatcgtgaaaatggccatactgcccaaggtaatttacagattcaatgccatccccatcaagctaccaatgactttcttcacagaattggaaaaaactactttaaagttcatatggaaccaaaaaagagcccgcatcgccaaggcaatcctaagccaaaagaacaaagctggaggcatcacactacctgacttcaaactatactacaaggctacagtaaccaaaacagcatggtactggtaccaaaacagagatataggtcaatggaacagaacagagccctcagaaataacaccgcatgtctacaactatctgatctttgacaaacctgagaaaaccaagcaatggggaaaggattccctatttaataaatggtgctgggaaaactggctagccatatgtagaaagctgaaactggatcccttccttacaccttatacaaaaatcaattcaagatggattaaagacttaaacgttagacctaaaaccataaaaaccctagaagaaaacctaggcattaccattcaggacataggcatgggcaaggacttcatgtctaaaacaccaaaagcaatggcaacaaaagacaaaattgacaaatgggatctaattaaactaaagagcttctgcacagcaaaagaaactaccatcagagtgaacaggcaacctacggaatgggagaaaacttttgcaacctactcatctgacaaagggctaatatccagaatctacaatgaactcaaactaatttacaagaaaaaaacaaacaaccccatcaaaaagtgggcgaaggacatgaacagacacttctcaaaagaagacatttatgcagccaaaaaacacatgaaaaaatgctcatcatcactggccatcagagaaatgcaaatcaaaaccacagtgagataccatctcacaccagttagaatggcgatcattaaaaagtcaggaaacaacagatgggacacaacagtcatgggctgtctcagctgcccaaagcctgaggcagaccacatgagagctgtggcttcttcttggattcagagagaagtaatggaaggcctgtctgatgttgcttcttttgcaactaaacttaaaaacactctcatccagtaccatagcattgaagaagataagtggcgagttgctaagaaaacgcatgtaaacagaaccaacgacaaaaaccatgtgattatctcaatagatgcagaaaaggcctctggcaaaattcaacaacccttcatgctaaaaactctcaataaactaggtattgataggacgtatctcaaaataataagagctatatatgacaaacccacagacaatatcatactgaatgggcaaaaactggaagcattccctttgaaacctggcacaagacagggatgccctctctcaccactcctattcaacatagtgttggaagttctggccagggtaatcaggcaggagaaggaaataaagggtgttcaattaggaaaagaggaagtcaaattgtccctgtttgcagatgacatgattgtatatctagaaaaccccatcgtctcaccccaaaatctccttaaactgataggcaacttcagcaaggtctcaggatacaaaatcaatgtgcaaaaatcacaagcattcttatacaccaataagagacaaacagagagccaaatcatgagtgaactcccattcacaattgcttcaaagagaataaaatacctaggaatccaacttacaagggatgtgaaggacctcttcaaggagaactacaaaccactgctcaaggaaataaaagaggatacaaacaaatggaagaacattccatgctcatgggtaggaagaatcaatatcatgaaaatggccatactgcccaaggtaatttatagattcaatgccatccccatcaagctaccaatgactttcttcacagaaatggaaaaaaactactttaaagttcatatggaaccaaaaaaagagcccgcatcgccaaggcaatcctaagccaaaagaacgaagctggaggcatcacactacctgacttcaaactatactacaaggctacagtaaccaaaacagtatggtactggtaccaaaacagagatatagatcaatggaacagaacagagccctcagaaataatgctgcttatctacaactatctgatctttgacaaacctgacaaaaacaagaaatggggaaaggattccctatttaataaatggtgctgggaaaactggctagccatatgtagaaagctgaaactggatcccttccttacatcttatgcaaaaatcaattcaagatggattaaagacttaaatgttcgacctaaaaccataaaaaccctagaagaaaacctaggcaataccattcaggacataggcatgggcaaggacttcatgtctaaaacacgaaaagcaatggcaacaaaagccaaaattgacaaatggaatctcattaaactaaagagcttcttcacagcaaaagaaactaccatcagagtgaacaggcaacctacagaatgggagaacatttttgcaatctactcatctgacaaagggctaatatccagaatctacaatgaactcaagcaaatttacaagaaaaaaacaaacaaccccatcaaaaagtgggagaaggatatgaacagacacttctcaaaagaagacatttatgcagccaaaagacacatgaaaaaatgcccatcatcactgaccatcagagaaatgcaaatcaaaaccacaatgagataccatctcacaccagttagaatggcgatcattaaaaagtcaggaaacagcagagtatactccttccacttaaatataaaagttaactgtaagacagcctcaggaggtgttccaaaaggcattgttaatataggagatgacagttccatgcatgttattgcccctgaagaccttctagtgggacaggctgtggagatggaagacagatactag

SEQ ID NO: 10125 - DNA, 4921 bp, Homo sapiens
  SIMILAR (1417)..(1611): 491254mologous to Homo sapiens Human transmembrane protein HTMPN-35,accession number Y57911,Smith-Waterman Score=129.
atgtaccaagcaaatggaaaacaaaaaaaggcaggggttgcaatcctagtctctgataaaacagactttaaaccaacaaagatcaaaagagacaaagaaggccattacataatggtaaagggatcaattcaacaagaagagctaactatcctaaatatatatgcacccaatacaggagcacccacattcatacagcaagtcctgagtgatctacaaagagacttagactcccacacattaataataggagactttaacaccccactgtcaacatcagacagatcaacgagacagaaagtcaacaaggatacccaggaattgaactcagctctgcaccaagcagacctaatagacatctacagaaccctccaccccaaatcaacagaatatacatttttttcagcaccacaccacacctattccaaaattgaccacatacttggaagtaaagcactcctcagcaaatgtaaaagaacagaaattataacaaactatctctcagaccacagtgcaatcaaactagaactcatgattaagaatctcactcaaaaccactcaaccatatggaaactgaacaacctgctcctgaatgactactgggtacataaggaaatgaaggcagaaataaagatgttctttgaaaccaacgagaacaaagacacaacataccagaatctctgggacacattcaaagcagtgtgtagagggaaatttatagcactaaatgcccacaagagaaagcaggaaagatccaaaattgacaccctaacatcacaattaaaagaactagaaaagcaagagcaaacactttcaaaagctagcagaaggcaagaaataactaaaatcagagcagaactgaaggaaatagagacacaaaaaacccttcaaaaaattaacgaatccaggagcaggttttttgaaaggatcaacaaaattgatagcctgctagcaagactaataaagaaaaaaagagagaagaatcaaatagatgcaataaaaaatgataaaggggatatcaccaccaatcccacagaaatacaaactaccatcagagaatactacaaacacctctacgcaaataaactagaaaatctagaagaaatggataaattcctcgacacatacactctcccaagactaaaccaggaagaagttgaatctctgaatagaccaataacgggagctgaaattgtggcaataatcaatagcttaccaaccaaaaagagtccaggaccagatggattcacagccgaattctaccagaggtacaaggaggaacaggtaccattccttctgaaactattccaatcaatagaaaaagagggaatcctccctaactcattttatgtgtccagcatcatcctgataccaaagccgggcagagacacaaccaaaagagagaattttagaccaatatccttgatgaacattgatgcaaaaatcctcaataaaatactggcaaaccgaatccagcagcacatcaaaaagcttatccaccatgatcaagtgggcttcatccctgggatgcaaggctggttcaatatatgcaaatcaataaatgtaatccagcatataaacagaaccaaagacaaaaaccacatgattatctcaatagatgcagaaaaggcctttgacaaaattcaacaacctttcatgctaaaaactctcaataaattagatattgatgggttggaagttctggccagggcaatcaggcaggagaaggaaataaagggcattcaatcaggaaaagaggaagtcaaattgtccctgtttgcagatgacatgattgcatatctagaaaaccccatcgtctcagcccaaaatctccttaagctgataagcaacttcaacaaagtctcaggatacaaaatcaatgtgcaaaaatcacaagcattcttatgcaccaataacagacaaacagaaagccaaatcatgagtgaactcccattcacaattgcttcaaagagaataaaatacctaggaatccaacttacaagggatgtgaaggacctcttcaaggagagctacaaaccactgctcaatgaaataaaagaggatacaaacaaatggaagaacattccatgctcatgggtaggaagaatcaatatcgtgaaaatggccatactgcccaaggtaatttatagattcaatgccatccccatcaagctaccaatgactttcttcacagaattggaaaaaactaccttaaagttcatatggaaccaaaaaaagagcccacattgccaagacaatcctaagcaaaaagaacaaagctggaggcatcacgctacctgacttcaagctatactacaagcctacggtaaccaaaacagcatggtactggtaccaaaacagagatatagaacaatggaacagaatagagcccttggaaataataccacacatctacagccatctgatctttgacaaacctgagaaaaacatgaaatggggaaaggattccctatttaataaatggtgctgggaaaactggctagccatatgtagaaagctgaaactggatcccttccttacaccttatagaaaaatcaattcaagatggattaaagatttaaacgttagacctaaaaccataaaaaccctagaagaaaacctaggcattaccattcaggacataggcgtgggcaaggacttcatgtccaaaacaccaaaagcaatggcaaccaaagccaaaattgacaaatgggatctaattaaactaaagagcttctgcacagcaaaagaaactaccatcagagtgaacaggcaacctacaaaatgggagaaaattttcgcaacctactcatctgacaaagggctaatatccagaatctacaatgaactcaaacaaatttacaagaaaaaaacaaacaaccccatcaaaaagtgggcgaaggacatgaacagacacttctcaaaagaagacatttatgcagccaaaaaatacatgaaaaaatgctcatcatcactggccatcagagaaatgcaaatcaaaaccactatgagatatcatctcacaccagttagaatggcaatcattaaaaagtcaggaaacaacagtcttgctagtggtctatcaattgacaaaattcaacaacccttcatgctaaaaactctcaataaattaggtattgatgggacgtatttcaaaataataagagctatctatgacaaacccacagccaatatcatactgaatgggcaaaaactggaagcattccctttgaaaactggcacaagacagggatgccctctctcaccgctcctattcaacatagtgttggaagttctggccagggcaatcaggcaggagaaggaaataaagggtattcaattaggaaaagaggaagtcaaattgtccctctttgcagacgacatgattgtttatctagaaaaccccatcgtctcagcccaaaatctccttaagctgataagcaacttcagcaaagtctcaggatacaaaatcaatgtacaaaaatcacaagcattcttatacaccaacaacagacaaacagagagccaaatcatgagtgaactcccattcacaattgcttcaaagagaataaaatacctaggaatccaacttacaagggatgtgaaggacctcttcaaggagaactacaaaccactgctcaaggaaataaaagaggatacaaacaaatggaagaacattccatgctcatgggtaggaagaatcaatatcgtgaaaatggccatactgcccaaggtaatttatagattcaatgccatccccatcaagctaccaatgactttcttcacagaattggaaaaaactactttaaagttcatatggaaccaaaaaagagcccgcattgccaagtcaatcctaagccaaaagaacaaagccggaggcatcacactacctgacttcaaactatactacaaggctacagtaaccaaaacagcatggtactggtaccaaaacagagatatagatcaatggaacagaacagagccctcagaaataacgccgcttacctacaactatctgatctttgacaaacctgagaaaaacaagcaatggggaaaggattccctatttaataaatggtgctgggaaaactggctagccatatgtagaaagctgaaactggatcccttccttacaccttatacaaaaatcaattcaagatggattaaagatttaaacgttagacctaaaaccataaaaaccctagaagaaaacctacgcattaccattcaggacatagggatgggcgaggacttcatgtccaaaacaccaaaagcaatggcaacaaaagccaaaattgacaaatgggatctaattaaactaaagagcttctgcacagcaaaagaaactaccatcagagtgaacaggcaacctacaaaatgggagaaaattttcgcaacctactcatctgacaaagggctaatatccagaatctacaatgaactcaaaccaatttacaagaaaaaaacaaacaaccccatcaaaaagtgggcgaaggacatgaacagacacttctcaaaagaagacatttatgcagccaaaaaacacatgaaaaaatgctcatcatcactggccatcagagaaatgcaaatcaaaaccacaatgagatatcatctcacaccagttagaatggcaatcattaaaaagtcaggaaacaacagaagtaaagacataaaagatagagaagatcctttggcttatggagtttttgctccagtcgtaagggtggaatcaagtttacaggaaggaagctggtgggtttcattttggacagaacgaggacgagctatgtgggagaacattcaaatagagctaggattcaggaagaagcaggacccaggatgccaccttacgtggaaatgtggatactacttctatgatggacgaagaggaggaagttgtttgcagatgcaactgactctgtag

SEQ ID NO: 10126 - DNA, 4014 bp, Homo sapiens
  SIMILAR (424)..(756): 611254mologous to Homo sapiens bG115G20.2 (novel protein),accession number AL078645,Smith-Waterman Score=276.
atgacaggatcaaattcacacataacaatattaactttaaatataaatggactaaattctgcaattaaaagacacagacgggcaagttggataaagagtcaagacccatcagtgtgctgtattcaggaaacccatctcacgtgcagagacacacataggctcaaaataaaaggatggaggaagatctaccaagcaaatggaaaacaaaaaaaggcaggggttgcaatcctagtctctgataaaacagactttaaaccaacaaagatcaaaagagacaaagaaggccattacataatggtaaagggatcaattcaacaagaggagctaactatcctaaatatttatgcacccaatacaggagcacccagattcataaagcaagtcctgagtgacctacaaagagacttagactcccacacattaataatgggagactttaacaccccactgtcaacattagacagatcaacgagacagaaagtcaacaaggatacccaggaattgaactcagctctgcaccaagcggacctaatagacatctacagaactctccaccccaaatcaacagaatatacattttttttagcaccacaccacacctattccaaaattgaccacatagttggaagtaaagctctcctcagcaaatgtaaaagaacagaaattataacaaactatctctcagaccacagtgcaatcaaactagaactcaggattaagaatctcactcaaagccgctcaactacatggaaactgaacaacctgctcctgaatgactactgggtacataatgaaatgaaggcagaaataaagatgttctttgaaaccaacgagaacaaagacaccacataccagaatctctgggacgcattcaaagcagtgtgtagagggaaatttatagcactaaatgcctacaagagaaagcaggaaaagatccaaaattgacactctaacatcacaattaaaagaactagaaaagcaagagcaaacacattcaaaagctagcagaaggcaagaaataactaaaatcagagcagaactgaaggaaatagagacaaaagaaaacccttcaaaatatcaatgaatccaggagctggttttttgaaaggatcaacaaaattgatagaccgctagcaagactaataaagaaaaaaagagagaagaatcaaatagacacaataaaaaatgataaaggggatatcaccaaccgatcccacagaaatacacactaccatcagagaatactataaaaacctctacgcaaagaaactagaaaatctagaagaaatggataaattcctggagacatacaccctcccaagaccaaaccaggaagaagttgaatctctgaatagaccaataacaggatctgaaattgtggcaataatcaatagcttaccaaccaaaaagagtccaggaccagatggattcacagccgaattctaccagaggtacaaggaggaactggtaccattccttctgaaactattccaatcaatagaaaaagaaggaatcctccctaactcatttgatgaggccagcatcatcctgataccaaagctgggcagagacacaaccaaaaaaagagaattttagaccaatatccttgatgaacattgatgcaaaaatcctcaataaaatactggcaaaccgaatccagcagcacatcaaaaagcttatccaccatgatcaagtgggcttcatccctgggaatgcaaggctggttcaatatatgcaaatcaataaatgtaatccagcatataaacagaaccaaaggcaaaaaccacatgattatctcaatagatgcagaaaaggcctttgacaaaattcaacaacccttcctgctaaaaactctcaataaattaggtattgatgggacgtatctcaaaataataagagctatctatgacaaacccatagccaatatcatactgaatgggcaaaaactgacctttgaaaaattccctttgaaaattggcacaagacagggatgccctctctcaccactcctgttcaacatagtgttggaagttctggccagggcaatcaggcaagagaaagaaataaagggtattcaattagcaaaagaggaagtcaaattgtccctgtttgcagatgacatgattgtatatttagaaaaccccattgtctcagtccaaaatctccttaagctgataagcaacttcagcaaagtctcagggtacaaaatatacaaaatcgatgtgcaaaaatcacaagcattcctatacaccaataatagacaaacagagagccaaatcatgagtgaactcccagttcacaattgcttcaaagagaataaaatacctaggaatccaacttacaagggatgtgaaggacctcttcaagggagaaccacaaaccactgctcaaggaaaataaaagaggatacaaacaaatggaagaacattccatggctcatgggtaggaggaagaatcaatctcgtgaaaatggccatacttgcccaaggtaatttacagattcaatgccatccccatcaagctaaccaatgactttcttcacagaattggaaaaaaactactttaaagttcatatggaaccaaaaaaagagcccgtattgccaagtcaatcctaagccaaaagaataaagctggaggaggcatcatgctacctgacttcaaactatactacaaggctacagtaaccaaaacaacatgatacagtaaccaaaacagcatggtactggtaccaaaacagagatatagatcaatggaacagaacagagccctcagaaataaggccgcatacatctacaaccatctgatctttgacaaacctgagaaaaaacaagcaatgggggaaaggattccctatttaataaatggtgctgggaaaactggctagccatatgtagaaagctgaaactggatcccttccttacaccttatacaaaaatcaattcaagatggattaaagatttaaacgttaaacctaaaaccataaaaaccctagaagaaaacctaggcattaccattcaggacataggcgtgggcaaggacttcatgtccaaaacaccaaaagcaatggcaacaaaagacaaaattgacaaatgggatctaattaaactaaagagtttaattaaactaaagagcacagcaaaagaaactaccatcagagtgaacaggcaacctaaaaaatgggagaaaattttcccaacctactcatctgacaaagggctaatatccagaatctacaatgaactcaaacaaatttacaagaaaaaaaaaacaaacaatcccatcaaaaagtggacgaaggcacatgaacagacacttctcaaaagaagacatttatgcagccaaaaaaacacatgaaaaaaatgctcatcatcactggccatcagagaaatgcaaatcaaaaccacaatgagataccatctctcaccagttagaatggcaatcatgaaaaaagtcaggaaacaacaggtgctggagaggatgcggagaaataggaacacttttacactgttggtgggactgtaaactagttcaaccattgtggaagtcagtgtggcgattcctcagggatctagaactagaaataccatttgacccagccatcccatttactgggtatatacccaaatgagtataaatcatgctgctataaagacacatgcacacgtatgtttattgcggcactattcacaatagcaaagacttggaaccaacccaaatgtccaacaatgatagactggattaagaaaatgtggcacatatacaccatggaatactatgcagccataaaaaatgatgagttcatatcctttgtagggacatggatgaaattggaaaccatcattctcagtaaactatcgcaagaacaaaaaaccaaacaccgcatattctcgctcatagtgcaatgctctgtggctgccccagctgtggctcaggcacaccaagacgcagctcaagccacttcagagggcacaagcaatgagccttggtggtgtccctatggtgctaattctgcag

SEQ ID NO: 10127 - DNA, 401 bp, Homo sapiens
cccttgtgaagttccgtggagacactcggtcccctgaaatggatgaagggcgaagggaggaggtcctcaggatttttccctcgcttttccttaagaagcaacaggctcaaaaccaaacggttggccttgcttactcctgaagtcgaagaggcttactcccctggaatccaagtggatgtggagcccatggcgtcctctggcgctctcggtctcttcgacccctttttactgtgttgatgataaatggggcaggattcccctcctgcaccacctgcagcatcctgtccaggatccatctgggagctgagaagaagcaaagtgtcagggatcgggggttctcgggctatgctgagaagcaaggaatgctgaagaaggggcctgagggaagggcttatggtgat

SEQ ID NO: 10128 - DNA, 647 bp, Homo sapiens
  SIMILAR (25)..(117): 741254mologous to Arabidopsis thaliana putative protein,accession number AL162506,Smith-Waterman Score=115.
atgcagtttccaaaaacaaaaacaaagaagaaggaggaggaggaagaagaagaggaagaggaggaggaggaggaggaagaagaagaagaagaaggaggaagaagaagaagaagaagaggaagaagaaggagaagaagaaaaagaagaaataatctaatagggaaagctcccagatggatcctggacaggatgctgcaggtggtgcaggaggggaatcctgccccatttatcatcaacacagtaaaaaggggtcgaagaagccgagagcgccagaggacgccatgggctccacatccacttggattccaggaaaggcggtacatctacgaaagccctaatccatagagggaaagactcctcgttcctggcccagaaatgagatgagaaatttaggggccccgtacaggaaggcctttcgcaaagtccagactcaattgccttcgcagcccttaaagtttccttaggaaggtctgtgggagaacgaggttggtttaggaattggcccctgccttgtactacgtagttttgtcatccaaagtgttttagaagtgaattgaatcatagttacgccttattttgaaaccctgtaattcagagaacgtaaacccttattaaaatgcctcataatcaaaaaaaaaaaaaaaaaa

SEQ ID NO: 10129 - DNA, 1449 bp, Homo sapiens
  SIMILAR (1)..(720): 721254mologous to multiple sclerosis associated retrovirus polyprotein,accession number AF009668,Smith-Waterman Score=924.
atggggaaaaagttacccatttgttgtcccctacttgaggaggaaatcaaccctgaagtctgggcattggaaggagaatctggaaaggcaaaaaatgcccgcccagtccaaatcaggttaaaagatcccacaacttttccttatcaaaggcaatatcccttaaggtctgaagctcataaaggattacagaatattgttaaacatttgaaggctcaaggcttagtaaggaaatgcagcagtccctgcaacaccccaattctgggagtacaaaaaccgaacggtcagtggagactagtgcaagatcttagactcattgaggcagtaattccactatatccagttgtacccaacccctataccctgctctctcaaataccagaggaagcagaatggttcatcgttctggacatcaaggatgccttcttttgtattcccctgcactctgactcccaggatcccacagaccacacgtcccaacttatgtggacggtcttgccccaagggtttagggatagccctcatctgtttggtcaggcactggcccaagatctaagctacttctcaagtccaggcactctggtccttcaatatgtggatgatttacttctggctaccagttcagaagcctcgtgccagcaggctattctagatctgttgaactttctagctaatcaagggtacaagttgtctaggtcgaaggcccagctttgcctacagcagacattaaaacagttgaaggggttccttggaattaccggcttttgccaactatggatccctggatgcagcgagatagccaggctcctctatactccaatcaaggaaacccagagggcaaatactcatctagtagaatgggaaccagaggcagaaacagccttcaaaaccttaaagcaggtcctagtacaagctccagctttaagccttcctacaggacagaacttctctttatacgtcacagagagagccaggatagctcttggagtccttactcagactcgtgggacaaccccacaaccagtggcatacctaagtaaggaaattgatgtagtagcaaaaggctggcctcactgtttaagggtagttgcagcagtggccatcttagtgtcagaggctatcaaaataatacaaggaaaggatctcactgtctggagtactcatgatgtaaatggcacactaggtgccaaaggaagtttatggctatcagacaacaacctacttagataccaggcactactccttgagggaccagtgcttgaaatatgcatgtgcgtggccctcaaccctgccccttttctcccagaggatggggaaccaatcgagcatgactgccaacaaattatagtccagacttatgccgcccaagatgatctcttagaagtccccttaactaatcctgaccttaacctatataccaatggaagttcatttgtggaaaatgggatatga

SEQ ID NO: 10130 - DNA, 3912 bp, Homo sapiens
  SIMILAR (426)..(244): 1001254mologous to Homo sapiens Human secreted protein, SEQ ID NO: 7120,accession number G03039,Smith-Waterman Score=306.
cggagaaagctccaaaagcaagccctgggccctgaacaaaatctagagacattattaaacctggcaacctcggtgttctataatagggaccaagaggaacaggtccaaaaggaaaagcgagatcagagaaaggccgcagccttagtcatggccctcagacaaacaaaccttggtggttcagagaggacagaacatgaagcaggccaatcacctggtaaggcttgttatcagtgtggtttactgggacactttaaaaaagattgtccaatgagaaacaagctgccccctcgtccgtgtccactatgctgaggcaatcactggaaggtgcactgccccagaggatgaaggttccctgggtcagaagcccccagccagacgatccaacaacaggactgagggtgcctggggcaagcgccagctcatgtcatcaccctcactgagccccgggtatgtttaactattgagggccaggaaattgacttcctcctggacactggcgcggccttctcagtgttaatctcctgtcctggacgactctcctcaacctccgttaccatccaaggaatcctgggacagcctgtaaccaggtatttctcccacctcctcagttgtaattgggagactttgctcttttcacatgcctttcttcttatgcctgaaagacccacagggttattagggagggatatattagccaaggctggagctattatctacatgaatatggggaacaagttacccatttgttgtcccctacttgaggagggaatcaaccctgaagtctgggcattggaaggacaatttggaagggcaaaaaatgcccacccagtccaaatcaggttaaaagatcccaccacttttccttatcaaaggcaatatccctaaggcctgaagctcataaaggattacagaatattgttaaacatttgaaagctcaaggcttagtaaggaaatgcagcagtccctgcaacaccccaattctggaagtacaaagaccgagactagtgcaagatcttagactcattaatgaggcagtaatttcactatatccagttgtacccaacccctataccctgctctctcaaataccagaggaagcagaatggttcacagttctggacctcaaggatgccttcttctgtgttcccctgcactctgattcacagttcctctttgcttttgaggatcccacaaaccacacatcccaacttacatggatggtcttgccccaagggtttagggatagccctcatctgtttggtcaggccctagccaaagatctaggccacttctcaagtccaggcactctggtccttcaatatgtggatgatttacttttggctaccagttaggaagccttgtgccagcaggctactctagatctcttgaactttctagctaatcaagggtacaaggtgtctatgtcgaaggcccagctttgcctacagcaggttaaatatctaggcctaatcttagccaaagggaccagggccctcagcaaggaatgaatacagcctatactggcttatcctcgccctaagacattaaaacagttgagggagttccttggaattaccagcttttgccgactatggatccctggatacagcgagacagccaggcccctctatactctaatcaaggacacccagagggcaaatactcatctagtagaatgggaatcagaggcagaaacagccttcaaaaccttaaagcaggccctagtacaagcgccaggtttaagccttcccacaggacaaaacttctctttatatgtcacagagagagccgggatagctcttggagtccttactcagactcgtgggacaaccccacaaccagtggcacacctaagtaaggaaactgatgtagtagcaaaaggctggcctcactgtttaagggtagttgcagcagtggccgtcttagtgtcagaggctatcaaaataatacaaggaaaggatctcattgtctggactactcatgaagtaaatggcatactaggtgccaaaggaagtttatggctatcagacaactgcctacttagataccaggcactactccttgagggaccagtgcttcaaatatgcacatgcatggccctcaaccctgccacttttctcccagaggatggggaaccaatcaagcatgactgccaacaaattatagtccagacttatgccgcccgagatgatctcttagaagtccccttaactaatcctgaccttaacctatatactgatggaagttcatttgtggagaatgggatacgaaggttagtgatgtaaccatacttgaaagcaagcctcttcccccagggaccagtgcccagttagcggaactagtggcacttacctgggccttagaactgggaaagggaaaaagaataaatgtgtatacagatagcaagtatgcttatctaatcctacatgcccatgctgcaatatggaaagagagggagttcctaacctctgtaggaacccccattaaataccacaaggaaattatagagttattgcacgcaatgcaaaaacacaaagaggtgggaatcttacactgacaaagccatcagaataggaaggagaggggagaacagcagcataagcagctggcagaggcagcagaaaggaaagaaagagacaggaagtcaaagaaagagacagagaggaagagacaagaagttagagagaaagagggacagacacagaagtcaaagagagggtaaaaaagagaggaagagacaaagaagaagtcaaagagagagatggaagtagtaaagaaaaaacagtgtacctattcctttaaaagccagggtaaatttctctctacccacgcaaggcaattctctattggatctcaacccatatctgcctctcaaacagttgaagaaataatgaaatctatccttactttacaatcccaaataagactctttggcagcagtgactctccaaaaccgctgaggcctagatctcctcactgctgaaaaaggaggactctgcaccttcttaggggaagagtgttgtttttacactaaccagtcagggatagcatgagatgccacccagcgtttacaggaaaaggcttctgaaatcagacgcctttcaaattcttataccaacctctggagttgggcaacatggcttctcccctttctaggtcccgtggcagccatcttgctgttactcgcctttgggccccgtatttttaaccttcttgtcaaatttgtttggtctagaatcgaggccatcaagctacagatggtcttacaaatcgaaccccaaatgagttcaactaacaacttctaccgaggacccctggactgaccagctggcacttcccctggcctagagagttcccctctgaaggacactacaactgcaaagccccttcttcgcccctatccagcaggaagtagctagagcagtcatcggccaaattcccaacagcagttggggtgtcctgttgattgaggggtgacagcatgctggcagtcctcacagccctcactcgctcgctcactctcggcacctcctctgcctgggctcccactttggcagcacttgaggagcccttcagctctgtatctagctactctgatgggtccttggagaacctttatgtctagctcagggattgtaaatacaccaatcagcaccctgtgtctagctcagggtttgtgaatgcaccaatggacactctgtatctagctactctggtggggccttggagaacctttgtgtcaacactctgtatctaactaacctggtggggatgtggagaacctttgtgtctagctcagggatgtaaacgcaccaatcagtgccctgtcaaaccactcggctctaccaatcagcaggatgtgggtggggccagataagagaataaaagcaggctgcccgagccagcagtggc

SEQ ID NO: 10131 - DNA, 2532 bp, Homo sapiens
  SIMILAR (917)..(1042): 831254mologous to Homo sapiens Human secreted protein, SEQ ID NO: 7115,accession number G03034,Smith-Waterman Score=188.
atgactcaggagcctagtgcaattatgagagaggtgccagaaatggtaaacattctgaaaggcactggagacatacataacacagagattcaaaatgacaacgggaaggtggggatgacaaaatgtatggctaaacctaaggatgagctccgaaatttgaagttaattctcagtgagtcactggaatcagcccagagacaaggtgtctcaaagcaagaaaaagtattgcagtgcagaagggctcaggacctgcagcccaccatgcctgagcctcccatcccctccatgggctcctgtgcagcccgagcctccccgactagtgccaccccctgctccagggcacccagtcccactgaccacccaacagctgcgaagtgcaggcgcatggcgcggtactggcaggcagctccacctgcagccctggtgctggatcaactgggtgaagccagctgggctcctgagtctgctaatctggtggggaagtggagaacctttgtgtctagctcagggactgcaaacgcaccaatcagcaccctgtcaaagcagaccactgggctctaccaatcggcaggatgtgggtggggccagaatttgggggctaaataccgggcacctgtcggccagttaaaagcgactagcacggccgccagactaaagacacgggtgtcaggctttctgggaaagggctctctaacaacccctgactcttcagagttgggaccgttggatcccacagaccacacttcccaacttacatggacggtcttgcctcaggggtttagggatagccctcatctgtttggtcaggctctggcccaagatctaggccacttctcaagtccaggcactctgatccttcaatatgtggatgatttacttttagctaccagtttggaagccttgtgccagaaagctactctagatctcttgaactttctagctaatcaagggtacaaggtgtctaggttgaaggcccagctttgcctacagcagcgagatagccaggcccctctatactctaatcaaggaaacccagagggcaaatactcatctagttgtatcggaaccagaggcagtaatcccttcgaaaccttaaagcaggccctagtacacgctccagctttaagccttcccataggacagaacttctctttatacatcacagagagagccgggatagctcttggagaccttactcagacttgtgggacaaccccacaaccagtggcatacttaagtaaggaaattgatgtagtagcaaaaggctggcctcactgtttaagagtagttgcagcagtggccatcttagtgtcagaggctatcaaaataatgcaaggaaaggatctcactgtctggactactcatgatgtaaatggcatactaggtgccaaaggaagtttatggctatcagacaaccacctactaagataccaggcactactccttgagggactggtgcttcaaatatgcacttgcgtggccctcaacactgccacttttctcccagaggatggggaaccaattgagcatgactgccaacaaattatagtccagacttacgccacccgagatgatctcttggaagtccccttaactaatcctgaccttaatctatataccgatggaagttcagttgtggagaatgggatacgaagggcaggttatgcaatagttagtgatgtaactatacttgaaagtaagcctcttgtcccagggacaagtgcccagttagcagaactagtggcacttacccgagccttagaactgggaaagggaaaaataataaatgtgtatacagatagcaagtatgcttatctaatcctacatgcccatgctgcaatatggaaagaatgggagttcttaacctctgggaacccccacggatgccacagggaagttatggagttattgcacatggtgcaggaaacaaaagaggtgggagtcttacactaccaaagccatcagaatgggaaggagaggggagaacagcagcgtaagcagctggcagaggcctcagctgccttcctctggggcagggctctggacttgcagcccaccatgcctgagcctcctatcccctccatgggctcctgtgcggcccgagcctccccaacgagtgccagccctgctccacggcgcccagtcccatcgaccacccaaaggctgaggagtgcaggtgcatggcacgggactggcaggcagctccacctgcagccccggtgctggatcaactgggtgaagccatctgggctcctgagtctggtggggcctcggagaacctttatgtctagctcagggattgtaaatacaccagttggcactctatctgtagctcaagagccactgtttgctgtgtacatggctgtgtccatggattgcggtgtcacagttgtgagacagatttccagggaatgcatatccatagtccagcttagcttacatgctcaatcttgtaccaagcaacgtggccagaagatgcaaatctctttggatagacccggaaactcctattttaactctgagcctgtatga

SEQ ID NO: 10132 - DNA, 197 bp, Homo sapiens; identical to SEQ ID NO: 6986
  SIMILAR (1)..(129): 831254mologous to Homo sapiens Human secreted protein, SEQ ID NO: 6834,accession number G02753,Smith-Waterman Score=198.

SEQ ID NO: 10133 - DNA, 259 bp, Homo sapiens
  SIMILAR (1)..(129): 791254mologous to Homo sapiens reverse transcriptase,accession number L27428,Smith-Waterman Score=179.
atggaatactatgcagccataaaaaagaatgagatcatgtcctttgcagggacatggatgaagctggaagccatcactctcagcaaactaacccaggaacagaaaaccaaacactgcatgttctcactcgcaacaaagagaatttgcagtgctttgaaaacagaaatccacatccacaggaaaaacaggcctccgccagccgcagaaaagggtgcttcaggcacagggcaaccaggcgagagaaaatgcattcagagcg

SEQ ID NO: 10134 - DNA, 295 bp, Homo sapiens
  SIMILAR (1)..(135): 801254mologous to Homo sapiens reverse transcriptase,accession number L27428,Smith-Waterman Score=187.
atggaatactatgcagccataaaaaggaatgagttcatgtccgttgcagggacgtggatgaagctggaagccatcactctcagcaaactaacacaggaacagaaaaccaaacactgcatgctctcactcgcaggcagatgggccagaggagcagagaggctgagaccaacccagaaaccaccacctctcacgccaaagctcacaccttcagcctccaacatgaaggtctccgcagcacttctgtggctgctgctcatagcagctgccttcagcccccaggggctcgctgggccag

SEQ ID NO: 10135 - DNA, 439 bp, Homo sapiens; identical to SEQ ID NO: 6989
  SIMILAR (1)..(129): 881254mologous to Macaca fascicularis hypothetical protein,accession number AB047968,Smith-Waterman Score=193.

SEQ ID NO: 10136 - DNA, 1527 bp, Homo sapiens
  SIMILAR (1)..(1152): 981254mologous to Homo sapiens monoamine oxidase B,accession number M69177,Smith-Waterman Score=2050.
ggcaaatcataccccttcagggggccattcccacctgtatggaatccaattacctacttagatcataacaacttttggaggacaatggatgacatggggcgagagattccgagtgatgccccatggaaggctccccttgcagaagagtgggacaacatgacaatgaaggagctactggacaagctctgctggactgaatctgcaaagcagcttgccactctctttgtgaacctgtgtgtcactgcagagacccatgaggtctctgctctctggttcctgtggtatgtgaagcagtgtggaggcacaacaagaatcatctcgacaacaaatggaggacaggagaggaaatttgtgggcggatctggtcaagtgagtgagcggataatggacctccttggagaccgagtgaagctggagaggcctgtgatctacattgaccagacaagagaaaatgtccttgtggagaccctaaaccatgagatgtatgaggctaaatatgtgattagtgctattcctcctactctgggcatgaagattcacttcaatccccctctgccaatgatgagaaaccagatgatcactcgtgtgcctttgggttcagtcatcaagtgtatagtttattataaagagcctttctggaggaaaaaggattactgtggaaccatgattattgatggagaagaagctccagttgcctacacgttggatgataccaaacctgaaggcaactatgctgccataatgggatttatcctggcccacaaagccagaaaactggcacgtcttaccaaagaggaaaggttgaagaaactttgtgaactctatgccaaggttctgggttccctagaagctctggagccagtgcattatgaagaaaagaactggtgtgaggagcagtactctgggggctgctacacaacttatttcccccctgggatcctgactcaatatggaagggttctacgccagccagtggacaggatttactttgcaggcaccgagactgccacacactggagcggctacatggagggggctgtagaggccggggagagagcagcccgagagatcctgcatgccatggggaagattccagaggatgaaatctggcagtcagaaccagagtctgtgagggactgctgtgcagaaccctcatttccctcaatgccgatccgtgaaggatgtgatctgctgagtgctcaaaagcacccacctgatgccaaacgacgcttacattatcccaatactgtcttctgtctttacctaactggaaatttttaccatggattcatgtgtgggggtggggagaaggttgtcaaaacagcttttgaaagccccttcttctcccatcattctcagcaaactaacgcaggaacagaaaaccaaacactgcatgttctcactcataagtgggagttgaacaatgagaacacatggacacagggagaggaacatcacacaccagggcctgagggggcaagaggacggagagcattaggacaaatacctaatgcatgcagggcttaa

SEQ ID NO: 10137 - DNA, 389 bp, Homo sapiens; identical to SEQ ID NO: 6994
  SIMILAR (110)..(370): 881254mologous to Escherichia coli monomeric lac repressor,accession number X58469,Smith-Waterman Score=356.

SEQ ID NO: 10138 - DNA, 298 bp, Homo sapiens
  SIMILAR (126)..(1): 921254mologous to Homo sapiens Human secreted protein, SEQ ID NO: 7217,accession number G03136,Smith-Waterman Score=196.
atggatgaagctggaaaccatcattcgcagcaaactcacacaggaacagaaaaccaagcactgcatgttctcactcataagtgggagttaaacaatgagaacacatggacacagggaggggaacatcacacaccagggcctgttggggaccagaacaaggaaaggcccacagagaaagccaagctgcatcaaggcaaattttctctacaaatgcagatctcctccataaaagatagctttttagatattctaacatttccagcttttccgaataaccatcttgaaatatgtcgaagaa

SEQ ID NO: 10139 - DNA, 512 bp, Homo sapiens
  SIMILAR (126)..(1): 831254mologous to Homo sapiens Human secreted protein, SEQ ID NO: 7217,accession number G03136,Smith-Waterman Score=178.
atggatgaagctggaagcaatcatcctcagcaaactgacccaggaacagaaaaccaaacactgtatgttctcactcataagtgggagttgaacaatgagaacacatggacacagggaggggaacacatagggcctgttgtggggtggaagggagagagtatagagacaaggaaagcactcaggtccaatccgtggggcactccaatacgtagacatcaggaagccacgaagggaccaacaccaccaccaccaccaccaccaccaccaccaccaatactaccactatccacactaccaccaacatcaccagcaaatgaccaggaaggagctatattagccagtaggagattggggtgttccagaagacaagagaagagaatgcatccatccacatggcccaaaggagaccaccttctcccagctcactcacctgatcacggtcatgccaatacgtgccaggtgttaagaggcaaagggcagccacaacttccagtcagaaaggccatgagcag

SEQ ID NO: 10140 - DNA, 1253 bp, Homo sapiens
  SIMILAR (879)..(1250): 661254mologous to Cloning vector pEH1 lac repressor,accession number AJ007659,Smith-Waterman Score=363.
tgaaaactaaggtacacagagattatgtcacttactcaagattacatcgccagtatgctgccgtgctggaattggaagccagagcccatcctcttaactaccccaccactctgcctcttcaagcagaaggcgagcgtttggaaaataagaagggatgcaaaggcaggtcttgccatggccagtcagatccttctaattctgcagcttccagctcagatattaccttctcggggaggataaagaaactaaggcacaggaagttcagtagattgtccaaggtcatgcagctgggccagcttcagcccgtgaaattccagcacagttcagcaaagcacagaccagacatggcgtcccacaccagtgagctggcagctgcttcctttgtaaccagacaggtgtttgtggctcagatgctgctaaggactgaattatgtccccccaaaattcatgttgaagcctcaacctccagtgcagctgtatttagtgatagggcctgtaaggaggtagttagattagacaagaattttaacatctccatggtggacaacttcagagggcaaggctggttatataccatggaatactatgcagccataaaaaagaatgagttcatgtcctttgcagggacatggatgaagctggaaaccatccttctcagcaaactaacacaggaacagaaaaccaaacactgcaggttctcactcatagcccctggcagccatcattctgcattctgcctttatgaatttgactcctctagggatttcctggattttgccgatttcggaaccaccatcaaacaggattttcgcctgctggggcaaaccagcgtggaccgcttgctgcaactctctcagggccaggcggtgaagggcaatcagctgttgcccgtctcactggtgaaaagaaaaaccaccctggcgcccaatacgcaaaccgcctctccccgcgcgttggccgattcattaatgcagctggcacgacaggtttcccgactggaaagcgggcaggattttgccgatttcggaaccaccatcaaacaggattttcgcctgctggggcaaaccagcgtggaccgcttgctgcaactctctcagggccaggcggtgaagggcaatcagctgttgcccgtctcactggtgaaaagaaaaaccaccctggcgcccaatacgcaaaccgcctctccccgcgcgttggccgattcattaatgcagctggcacgacaggtttcccgactggaaagcgggcagtga

SEQ ID NO: 10141 - DNA, 1563 bp, Homo sapiens
  SIMILAR (520)..(1332): 871254mologous to Homo sapiens putative p150,accession number U93564,Smith-Waterman Score=1267.
atggatgaagctggaaaccagcaaactaacataggaacagaaaaccaaacactgcatgttctcactcataagtgggagttgaagaatgagaacacagggacacagggaggggaacatcacacactggggcctgttggtggagagagagagagtgaaactgctgcccctgtaagggagagctggccctcttgcagtcggacaggagggagccagaaaccagcaagcataccagggagtgtggctgtaagtgtgggagtggcaggagtcatggagcaggagagggcagccaagacaaagggccttgatgaagggttaaaggtctattattcactagctgctgtatcaaaatctaaaagggttttccctgtattttttggtgataaaagctcatgggagttgaattcatcagtgtacacgctgaatgaactaatgtcagaggcaaagaaagcagttgcagaactggttggagtgactgatcctgattatcaagggaaaacctcactgctactacactgtggggaattggaaaaaactactttaaagttaatatggaaccaaaaaagagcctgcattgccaagacaaacctaagccaaaagaacaaagctggatgcatcacgctacccaacttcaaactatactacaaggctacagtaaccaaaacagcatggtactggtaccaaaacagagatatagacaaatggaacagaacagaggcctcagaaataacgccgcatatctacaactgtctgatctttgacaaacctgacaaaaacaagaaatggggaaaggattccctatttaataaatggtgctgggaaaactggctagccatatgtagaaagctgaaactggatctcttccttacaccttatccaaaaattaattcaagatggattaaagacttaaatgttagacctaaaaccataaaaaccctagaagaaaacctagacaataccatgcaggacataggcatggacaaggacttcatgactaaaacaccaaaagcaatggcaacaaaagccaaaattgacaaatgggatctacttaaactaaagagcttccgcacagcaaaagaaactaccatcagagtgaacaggcaacctacagaatgggagaaaacttttgcaatctacccatctgacaaagggctaatatccagaatctacaaagaactcaaacaaatttacaagagaaaagcaaacaaccccatcaaaaagtgggcaaaggatatgaacagacacttctccaaagaagatatctatgcagccaacagacacgtgaaaaaatgcccatcatcactggtcatcagagaaatgcaaatcaaaaccacaaatggattggaggggatccagacagattcctgggaacctactatagtcatctttgaggaagatattgagagtatgatccagggtggtggactacagatcctgggagcggtcctgacacctgtatgtgaaggccatgcctgctaccgagaagcctgcagtgagagtccgagcagcagctccgcttctttagagttacatgatccaggccaggaagccccatctttcctctaa

SEQ ID NO: 10142 - DNA, 2253 bp, Homo sapiens
  SIMILAR (376)..(1218): 991254mologous to Homo sapiens olfactory receptor 17- 209,accession number U53583,Smith-Waterman Score=1445.
atgataggatcaaaaatcaatgaaattgaacataaaaaacaacagagaaaaatcaaagaagcgaagacccggttctttgtaaagatcaataacaaatctctagcaagacaaagaaaaaacagagaagacaatataagaactgaaataagggacatggatgaagctggaaaccatcattctcagcaaactaacacaggaacagaaaaccaaacactgcatgttctcactcataagtgggagttgaacaatgagaacccatggacacagggaagggaacatcacacactggggcctgtgaggggggggagagatgcaggtgaagcagggagaattctgacagtgacagcctgggaactggcgagaacgatcggacaaatggaggggaaaaatctgaccagcatctcagaatgtttcctcctggggttctctgagcagctggaggagcagaagcccctctttgggtccttcctgttcatgtacttggtcacggtggcaggcaacctcctcatcattctagtcatcattactgacactcaactccatacccccatgtacttctttctagccaacctctcccttgcagatgcctgctttgtgtccaccacagtccctaagatgctggcaaacatacagatccagagtcaggccatctcctactcagggtgtctactacagttgtattttttcatgttatttgtgatgctggaggcattcctcttggcggtcatggcctatgactgctacgtggccatatgccacccacttcattacattctgatcatgagccctgggctctgcatcttcctcgtgtctgcatcctggatcatgaatgccctccactcccttctacacacacttctgatgaacagcctgtccttctgcgcaaaccatgagatcccacacttcttctgtgacatcaatcccctcctgagtctgtcctgcacagaccccttcaccaatgagctggtgatcttcatcactgggggtctcacaggactcatttgtgtgctttgcctgattatctcttacacgaacgttttctcgaccatcctgaagatcccatcagctcaggggaagcggaaagccttttccacctgcagctctcatctctccgtggtctctctcttctttgggacttctttttgtgttgatttcagttctccctcaacccactcggcccagaaggacacagttgcatcagtgatgtacacagtgatggtaattgctgtagataatagcaattctagctcaccagctccctattcaccttatctgaagcccagacacgatcgtctgataataaaagattccatattcatggattcaaccaaccatgggtcaaaaatacagtatctgtgggatatggaacccacaaataaaaagggctggctttttgtatccacaggttccacagacaaactgcaggacttgagcatccataggtttggggatgtgcagggggtcgtggaatcaattccccaggctgtagatgaaggggttcagcatgtgggtcaccccagtgtacatcacagccatgacagtgtccttcacagtgttatgattcgtcaatgggcacaagtagagaccaataattgtcccatagaagagagacaccacagagaggtgggggccacaggtggagaaagccttctggatgcccccagtggaagggaccctgaggatggccagcttcaacaaggtagatgtatcacagaaaaagtgaggaatcacattctcagcacaaaaggacagcctggccataagcaaggtgtgcaacgtggcatgggcagtggtcaacagccaggagagtgtcagcagaccaaggcaacacttggggctcatgatagtggtgtagtgcagaggaaagcaaatagccacatagcagtgataagccatgaccacaaggaggaagctctccagaactccataaaacagatgaaagtacatctgagccaggcagtccgcaaaggggatggatgggttttggctctgcatgttctgcagcaatttgggcattgtgaccgaggaaaagcagaggtcagagaaggacaagttgctgagacacaaatacataggcatgtggaggtgggagtccagtcgaatgaggacaatgacgaggaggttccccaggagggtggtaagatacacggccaagaacaaggcatagaacagattccgctgctcaggttggatggaaggcccaggagcaggaactctgagatcatggtttggttcttcttcatcattctgtga

SEQ ID NO: 10143 - DNA, 892 bp, Homo sapiens
  SIMILAR (628)..(735): 771254mologous to Homo sapiens PRO1546,accession number AF116638,Smith-Waterman Score=156.
atgcttaccagcaggtccattgtccaccaggaacggaatttttccccggtggggtacatattcccaaagaccctttgggcacaggaacttaaaaacgcagagaattctggccagaaaaaaagtattcgctggttatccagatcagaagggacggtggcctggccggacttagaggaaactctggggcacaaggaggtgatgcctgtcacttgtgacatggtgtgcagccgccagagccgccctccagggcacagggtgggcccggcaagagtgaaactccgtcagaaggaggatgaggagaaagaggaggaggatgaggaggaggaggagaagaagaaggagaagaaggagaaaatttggacatgtactacaatatggatgaacttggaagacattatgggcaaaatatatagaaaaatgggcaaaagacatgaacggccacctcacattaaaagcaacaccagtgtcctcatcgtgaaactagacgcccgatcttatcctcgaagcaatgaatctcaacaggaactggtgctccgcaggatggcaggacgcggagacgtggtgctgtcaggctgggacatggatgaagttggaaaccatcgttctcagcaaactaacacaagaacagaaaatcaaacactgcatgttctcactcataagtgggagctgaacaatgagaacacatggacacagggaggagaacatcacataccggggcctgtcaggggtgagtgggtaaaaagagaatttgtggcaattcttaaaaacttgaccaccacaggaagacaatttggaggcattttggctgcacacagtatagccactacactgaaatactggtaccatggctcaccacctggggagattgtatctttaggaatattgagtgaag

SEQ ID NO: 10144 - DNA, 614 bp, Homo sapiens
  SIMILAR (405)..(479): 761254mologous to Homo sapiens Human secreted protein, SEQ ID NO: 6834,accession number G02753,Smith-Waterman Score=120.
atgcagaaccaggagaagtttggagagctcatctctgagtgggcaccctatgggagaccaagacctcagatagctgtgggggaccatcatatctcagtttatgatggggaggtcaactggaggatgtctagtctgcaggcctcagcagctgggaaggattatgctaatcggggaactgagtggggagaggagcctagccagatgctacgtcatgagctgctcagtggagagatgtgcgtgtcaaggaaccgagggcagcctctggccaacagcgagagaagatctgaggccctcagtcccgtaaccccaaagaaactaattcctgccgacggccacaagagtgatccaggaaggacatggatgaagctggaaaccatcattctcagcaaactaacccaggaacagaaaaccaaacaccacatgttctcactcataagtgggagttgaacaatgagaacacatggacacagggaggggaacgtcacacaccagggcctgtcgggggtgggaggcctagcaattcattagaattacctgtgaagcttttaaaatgtaaggtttggatggaatgctcagaccctaccttagacccaattaagcccacagctttgagg

SEQ ID NO: 10145 - DNA, 784 bp, Homo sapiens
  SIMILAR (108)..(413): 471254mologous to Homo sapiens putative p150,accession number U93569,Smith-Waterman Score=169.
atataataataataaataaataaataaataattaaaaaaatttaaaaacaaccctctttaaaaaaaaaaaaaagaaataccatttgatccagcaataccattactgggtatataccccaaaggattataaatcactctactgtaaagacacatgccacaccgtatgtttattgccaggactatttacaatagcaaaaacttgggacccaaccccaaatgcccaagcaatgatagactggaaatgaagaacatgtggcacatacacacccatggaatactatgcagcccataaaaaaggatgagttcatgtccctttgcagggacatggatgaagctggaaacccatcatcctcagcaaactaacacaggaaccagaaaaccaaacactgcatgtccctcactcataagtgggagttgaacaatgagaacacatggacacagggatggggaacatcacacaccggggcctgttggcgggtcccactttgctccattttgggttgtgggttttgattctacctttcaccctagaggcattcctcaaatggctggtgatccttgcctgtctgcacatattgaagagggggacaataagctgactggaagcaaccggctcataggagtaggatttgttgactctggcattcctgaaactgctgcttccctggagacccccaatatcagctgccaaattttgcacagaatcttctcatctcctggctggaagcataagcctggctaccagcattcagacagccaagtaggggaaagtgctaagcattaa

SEQ ID NO: 10146 - DNA, 1865 bp, Homo sapiens
  SIMILAR (37)..(558): 851254mologous to Homo sapiens putative p150,accession number U93570,Smith-Waterman Score=785.
acatctacaaccatctgatctttgacaaacctgacaaaaacaagcaatgggggaaaggattccctatttaataaatggtgctgggaaaactggctagccatatgtagaaaactgaaactggaccccttccttacaccttatacaaaaattaactcaagatggattaaagacttaaacgtaagacctaaaaccataaaaaccctggaagaaaacctaggcaataccattcaggacataggcatgggcaaagacttcatgactaaaacaccagaagcaatggcaacaaaagccaaaattgacaaatgggatctaatccaactaaagagcttctgcacagcaaatgaaactgtcatcagagtgaacaggcaacctacagaatgggagaaaatttttgcaatcatctacccatctgacaaaggtctaatatccaaaatctacaaggaactttatgagaaaaaaacaaacaacctcatcaaaaagtgggcaaaggatatgaacagacacttctcaaaggaagacttttatgaggccaaaaaacatgaaaaaagctcatcattgctgggtcagggcgttacaaagggaggctgctgtcttcccatgaatctattagggacctacaggagcgaagagaacccttctgagtatcagcgaagacagcttattaagactttacgagtttgcaagccatcctcgtcctatttcctcacttcggactttttggacacaccttccttttcctgtgagccaacccaaacgaatgagttacaaggttgctccctgcgcttccgagtggcgactgcagcgggtccggtgcaggtgaggggcgcgcgcctgcccagctttgcagcccccgaacgcggcctcgcacagatacccagacaaatggattctaaaatttgaatagaagagcaaagaaaataggaaccaatttgaaggactacaaggtggactgcttgctcagctcagtatcaacacttatggagtcattgcagttttcagtagaggtgtacttctgagaagaggcttcttgggtcttcatgcagccatggatctggataaaccatctgtttggggctcattaaaacagcggaccatgccattgttgatcaacttgagcaagaagaaggtgaaaaagaacccaagtaagcccccagatctacgggcaaggcatcacttggaccgccgtctcagactctctgtgcctgatcacctggaggatgaggccttggccccagagggccggccttactccgggccacagtcttcctacacctcggtgcccagcagtctgtccactgcagggatctttcccaagagcagcagtagctccttgaaacagtctgaagaagaattggattggagccaggaagaagcccgtcaccttccttgggggggaaccaaactcaaagaaggcctatgcctctcctgctgaccggagacgggtgtccagcaacggcatctttgatcttcagaaaacttcccttggaggggatgcaccagaagagccagagcaactcatgatcataagagccttactttttgaaggaattcctgcattgtgtgtcctggtgggacactgtgacttgggtgtctcccaaagcaggagagcaggtactcttgaaagtcatggtgtggaggagtgggaaggtgatgaaggtttggctgctggggctcagcgagctacaggtggtgctggcattagagattttatgattgaggtgtactgttttgaaaatagaatctcagatcccctggagctgggtcatgacaaaactggaccaattatccagcgtgaatttaatgcagtcccagatccagatgttagcagtggatctcagaaggaaagagaaagagatgacctctag

SEQ ID NO: 10147 - DNA, 1449 bp, Homo sapiens
  SIMILAR (39)..(335): 391254mologous to Homo sapiens pro-alpha-1 type-I collagen,accession number K03179,Smith-Waterman Score=104.
atgctccaggccgacgccgtagactctgccagccagcgggcggccccggcgcctggccaggctcggctgttccgggctcggtgtccccagccccagacgcccggagccccatctccggcccctcgcgcgcactccgcagacacttacggcccagcgccgccggcggtccgggactcgaaatcccgacccacgaccctcaccttcctggggttgattacaaggaaggcagaccccgccagtggcaaggcgggacggggaggacccctcaggaaaagggagcccctccgcgagcggcgcaagggctctcggagtcccagctgcagccgccaccccgcgtgcgtcaactttgtagcaattcaacagcacatcttaccaaattactttgggcttcatttttggtgctttaaaacaaagaagaagaagaagaagaagaagaaaaccatgcaaagagagggcaaatcgtttcatattcacagatgggcttcaccgctctgtataagcggtgatgagtgggtcttagcaaagcgcctggcccggtctctcgccatgcagcagtcgcatcataagcatggctgtgatttgttccttcaacaacacacgcggatgggacgcctgctgtatgccaagcacaccatgggggacagggcccaaagatggcaatattgtgaggtggtggttggatttccagccatcctgcaagccaataacaggcagctgaaaacatcaccagatgtggaaccagaacagcaaagacaaagtcagtgctggatcgagacatggaggaaggaagagaattacagagaaacaaagtttgcattaaggacacagtatactcaaggaccatctcccctggaagcttcacaaccaacctttgagagctgcgcttccagccccgggccatggcggcaaagcgcccttgtcatcggcacccacgtcctgatatctgcagagaacatcctgtccctgggcagggagccccagtgtcccccaatagttatgaggacctccatggcaggggaagagggagacggaggagtcccactggctcttaactgcctcaacccagaagtgacactcatcacctctattcacagcccattggccagagccagtcacatgacccaacccgacctccagagaagctgggaaatgcagaacagcccccgagtgtggttggcagtgcccattggcaccatgtccaggaagaggccatataagaatgtgcttgcttctcccccactttctgccatgaaatctttctatatcatcattctgcaagttgtatgcaccatcatcatcatcatcatcatcctcatccatcgctatcacttacgagcacccattctatatacatgcaccaggacatgtgaaatcaatgctcaggttgccctggttcaccaagtacctccaaatcaaaagctggcttcagtccgctgccgacctttctga

SEQ ID NO: 10148 - DNA, 513 bp, Homo sapiens
  SIMILAR (1)..(510): 1001254mologous to Homo sapiens p50 killer cell activating receptor KAR-K1d,accession number AF135564,Smith-Waterman Score= 917.
atggagggtgtccacagaaaaccttccttcctggccctcccaggtcacctggtgaaatcagaagagacagtcatcctgcaatgttggtcggatgtcatgtttgagcacttccttctgcacagagagggaacctacagatgctacggttctgttcctcactccccctatcagttgtcagctcccagtgaccctctggacatggtgatcataggtctatatgagaaaccttctctctcagcccagccgggccccacggttcaggcaggagagaatgtgaccttgtcctgcagctcccggagctcctatgacatgtaccatctatccagggaaggggaggcccatgaacgtaggctccctgcagtgcgcagcatcaacggaacattccaggccgactttcctctgggccctgccacccacggagggacctacagatgcttcggctctttccgtgacgctccctacgagtggtcaaactcgagtgatccactgcttgtttctgtcacaggaaactaa

SEQ ID NO: 10149 - DNA, 327 bp, Homo sapiens
  SIMILAR (151)..(192): 921254mologous to Homo sapiens killer inhibitory receptor 2-2 -2,accession number AF133901,Smith-Waterman Score=71.
tcaccctcccatgatgtagtcaacatgtaagctgcatgggcagggcgcaaataacatcctgtgcgctgctgagctgagctggggcgcggccgcctgttgcaccggcagcaccatgtcgctcatggtcgtcagcatggcgtgtgttgtgagtccttgtcctgcagctcccggagctcctatgacatctaccatcatcagttctctctgtttcacggccagggtagacagcacggccaagctcctgggttcatgatgctcacattgccacgtcccgccaccctccagccttctagccccgctgtccgtcattccacactctacgtccat

SEQ ID NO: 10150 - DNA, 957 bp, Homo sapiens
  SIMILAR (100)..(498): 561254mologous to Homo sapiens NKAT4b; putative,accession number L76666,Smith-Waterman Score=283.
atgtggtcaacatgtaaactgcatgggcagggcgccaaatacatcctgtgcgctgctgagctgagctggggcgcggcctcctgtctgcacggcagcaccatgtcgctcacggtcgtcagcatggcgtgcgttgggggcctggccactcatgggtggtcaggacaaaccctcctgtctgcccggcccagcactgtggtgcctcgaggaggacacgtggctttcagtgtcactatcgtcgtgggtttaacaatttcatgctgtacaaagagacagaagccacgttcccatcttccacggcagaatattccaggagagctcatcatgggccctgtgaccccagcacatgcagggacctacagatgtcgggttcacgcccacactccctcactgggtggtcggcacccagcaaccccctgtgatcatggtcacaggaaaccacagaaaaccttcctcctggcccacccagggcccctgctgaaatcaggagagacagtcatccgcaatgttgttgtcagctccagtgaccccctggacatcgtgatcacaggtgggaaaacccgtgtctgtcccatgtcttatgatcctagagccatagctgagagcttcctgccgatgatggggagaagcatggacagatgcagagagaaccgaagactgggtgaaacccttcaagtagttggccttcacccacagaaccagctccaaatctggtatctgcagaacctgcatgttctgattgggacctcagtggtcatcttcctcttcatcctctcctcttctttctcctttatcgctggtgctccaacaaaaagagactctgatgaacaagaccctcaggaggtgacgtacgcacagttgatcactgcgttttcatacagagaaaaatcagtcgcccttctcagaggccaagacacccctaacagataccagcgtgtacacggaacttccaaatgctag

SEQ ID NO: 10151 - DNA, 637 bp, Homo sapiens
atgggcctggaggtggagttacgggcctgcagtagagatatgggcctgaagtggagacatgggcctggagtggagatatgggccaggagtggagatatgggcctagaggtcgatatctgggcctggagtggagatatgggccaggagtggagatatgggcctagaggtcgatatctgggcctggagaggagatatgtgcctaggatggagatacgggcctgggtgtggagatatgggactggagaggatatatgggcctggagtggagatatgggactggagaggagatatggacctggagtggagataagggcctggattggagatatgggcccagggtggagatctgagcctggattggagatatgggcctggattggcgatatgggcttagggtggaaatatcggcctggagtggagatatgggcctggagtggagatatgggcttgagagaggggatgtttaacgacactttgcgcctcattggagaacaccatgatggggtctccaaggccaacttctccatcagtcgcatgaagcaagacctggcagggacctacagatgctacggttctgttactcactccccctatcagttgtcagctcccagtgaccctctggacatcgtgatcatag

SEQ ID NO: 10152 - DNA, 1317 bp, Homo sapiens
  SIMILAR (1)..(1314): 1001254mologous to Homo sapiens NK receptor,accession number X93596,Smith-Waterman Score=2353.
atgtcgctcacggtcgtcagcatggcgtgcgttgggttcttcttgctgcagggggcctggccactcatgggtggtcaggacaaacccttcctgtctgcccggcccagcactgtggtcgctcgaggaggacacgtggctcttcagtgtcactatcgtcgtgggtttaacaatttcatgctgtacaaagaagacagaagccacgttcccatcttccacggcagaatattccaggagagcttcatcatgggccctgtgaccccagcacatgcagggacctacagatgtcggggttcacgcccacactccctcactgggtggtcggcacccagcaaccccgtggtgatcatggtcacaggaaaccacagaaaaccttccctcctggcccacccagggcccctgctgaaatcaggagagacagtcatcctgcaatgttggtcagatgtcatgtttgagcacttctttctgcacagagaggggatctctgaggacccctcacacctcgttggacagatccatgatggggtctccaaggccaacttctccatcggtcccttgatgcctgtccttgcaggaacctacagatgttatggttctgttcctcactccccctatcagttgtcagctcccagtgaccccctggacatcgtgatcacaggtctatatgagaaaccttctctctcagcccagccgggccccacggttcaggcaggagagaacgtgaccttgtcctgtagctcctggagctcctatgacatctaccatctgtccagggaaggggaggcccatgaacgtaggctccgtgcagtgcccaaggtcaacagaacattccaggcagactttcctctgggccctgccacccacggagggacctacagatgcttcggctctttccgtgccctgccctgcgtgtggtcaaactcaagtgacccactgcttgtttctgtcacaggtatctgcagacacctgcatgttctgattgggacctcagtggtcatcttcctcttcatcctcctcctcttctttctcctttatcgctggtgctccaacaaaaagaatgctgctgtaatggaccaagagcctgcgggggacagaacagtgaataggcaggactctgatgaacaagaccctcaggaggtgacgtacgcacagttggatcactgcgttttcatacagagaaaaatcagtcgcccttctcagaggcccaagacacccctaacagataccagcgtgtacacggaacttccaaatgctgagcccagatccaaagttgtctcctgcccacgagcaccacagtcaggtcttgagggggttttctag

SEQ ID NO: 10153 - DNA, 1011 bp, Homo sapiens
  SIMILAR (1)..(876): 951254mologous to Homo sapiens killer inhibitory receptor 2-2 -2,accession number AF133901,Smith-Waterman Score=1529.
atgtcgctcatggtcgtcagcatggcgtgtgttggtggtcaggacaagcccttcctctctgcctggcccagccctgtggtgtctgaaggagaacatgtggctcttcagtgtcgctctcgtcttgggtttaacgaattcagtctgtccaaagaagacgggatgcctgtccctgagctctacaacagagtattccgaaacaccgttttcataggccctgtgaccccagcacatgcagggacctacagatgtcggggttcacacccacacttcctcactgggtggtcagcacccagcaaccccctggtgatcatggtcacaggtcccctggtgaaatcagaagagacagtcatcctgcaatgttggtcagatgtcatgtttgagcacttccttctgcacagagaggggaagtttaatgacactttgcgcctcactggagagctccatgatggggtctccaaggccaacttctccatcggtcgcatgacgcaagaccttgcagggacctacagatgctacggttctgttcctcattccccctatcagttgtcagctcccagtgaccctctggacatcgtgattacaggtctatgtgggaaaccttctctctcagcccagccgcgccccatggttaaggcaggagagagcgtgaccttgtcctgcagctcccggagctcctatgacatctaccatctatcaagggacggggaggctcatgaacttaggttccctgcagtgcccaaggtcaatggaaccttccaggccaactttcctctgggccctgccacccacggagggacctacagatgcttcggctctttccgtgactctccctacgagtggtcagaccttagtgacccactgcttgtttctgtcacagctaaacagagtggaagttggacactgagttttggcgtacagcaaaatcctaagtccattgttgggttgaacacggccatgttgtacatcctggtttcacagcagacactggaggaaaacagcctgtattcataa

SEQ ID NO: 10154 - DNA, 1105 bp, Homo sapiens
  SIMILAR (117)..(716): 901254mologous to Pan paniscus killer-cell Ig-like receptor KIR,accession number AF266731,Smith-Waterman Score=965.
gtggtcaggacaagcccttgctgtctgcctggcccagccttgtggtgcctctaggacatgtcattcttcggtgtcactcttatcttgggtttaacaacttcagtctgtacaaggaaggagtccacagaaaaccttccctcctggcccacccaggtcgcctggtgaaatcagaagagacagtcatcctgcaatgttggtcagatgtcaggtttgagcacttccttctgcacagagaagggaagtttaaggacactttgcacctcattggagagcaccatgatggggtctccaaagccaacttctccatcggtcccatgatgcaagaccttgcagggacctacagatgctacggttctgttactcactccccctatcagttgtcagctcccagtgaccctctggacatcgtcatcacaggtctatatgagaaaccttctctctcagcccagccgggccccacggttttggcaggagagagcgtgaccttgtcctgcagctcccggagctcctatgacatgtaccatctatccagggagggggaggcccatgaacgtaggttctctgcagggcccaaggtcaacggaacattccaggccgactttcctctgggccctgccacccacggaggaacctacagatgcttcggctctttccgtgactctccctatgagtggtcaaactcgagtgacccactgcttgtttctgtcacaggtaactccagatacctgcacgctctgattgggacctcagtggtcatcatcccctttgctatcctcctcttctttctccttcatcgctggtgtgccaacaaaaaaaatgctgctgtaatggaccaagagcctgcagggaacagaacagtgaacagcgaggattctgatgaacaagaccatcaggaggtgtcatacgcataattggatcactgtgttttcacacagagagaaatcactcgcccttctgagaggcccaagacacccccaacagataccagcatgtacatagaacttccaaatgctgagcccagatccaaagttgtcttctgtccacgagcaccacagtcaggccttgaggggatcttctagggagacaacagccctgtctcaaaacc

SEQ ID NO: 10155 - DNA, 1743 bp, Homo sapiens
  SIMILAR (12)..(1376): 1001254mologous to Homo sapiens HLA class I inhibitory NK receptor,accession number X94373,Smith-Waterman Score=2447.
ccggcagcaccatgtcgctcacggtcgtcagcatggcgtgcgttgggttcttcttgctgcagggggcctggccactcatgggtggtcaggacaaacccttcctgtctgcccggcccagcactgtggtgcctcgaggaggacacgtggctcttcagtgtcactatcgtcgtgggtttaacaatttcatgctgtacaaagaagacagaagccacgttcccatcttccacggcagaatattccaggagagcttcatcatgggccctgtgaccccagcacatgcagggacctacagatgtcggggttcacgcccacactccctcactgggtggtcggcacccagcaaccccgtggtgatcatggtcacaggaaaccacagaaaaccttccctcctggcccacccagggcccctgctgaaatcaggagagacagtcatcctgcaatgttggtcagatgtcatgtttgagcacttctttctgcacagagaggggatctctgaggacccctcacgcctcgttggacagatccatgatggggtctccaaggccaacttctccatcggtcccttgatgcctgtccttgcaggaacctacagatgttatggttctgttcctcactccccctatcagttgtcagctcccagtgaccccctggacatcgtgatcacaggtctatatgagaaaccttctctctcagcccagccgggccccacggttcaggcaggagagaacgtgaccttgtcctgtagctcctggagctcctatgacatctaccatctgtccagggaaggggaggcccatgaacgtaggctccgtgcagtgcccaaggtcaacagaacattccaggcagactttcctctgggccctgccacccacggagggacctacagatgcttcggctctttccgtgccctgccctgcgtgtggtcaaactcaagtgacccactgcttgtttctgtcacaggaaacccttcaagtagttggccttcacccacagaaccaagctccaaatctggtatctgcagacacctgcatgttctgattgggacctcagtggtcatcttcctcttcatcctcctcctcttctttctcctttatcgctggtgctccaacaaaaagaatgctgctgtaatggaccaagagcctgcgggggacagaacagtgaataggcaggactctgatgaacaagaccctcaggaggtgacgtacgcacagttggatcactgcgttttcatacagagaaaaatcagtcgcccttctcagaggcccaagacacccctaacagataccagcgtgtacacggaacttccaaatgctgagcccagatccaaagttgtctcctgcccacgagcaccacagtcaggtcttgagggggttttctagggagacaacagccctgtctcaaaaccaggttgccagatccaatgaaccagcagctggaatctgaaggcatcagtctgcatcttaggggatcgctcttcctcacaccacgaatctgaacatgcctctctcttgcttacaaatgcctaaggtcgccactgcctgctgcagagaaaacacactcctttgcttagcccacaagtatctatttcacttgacccctgcccacctctccaacctaactggcttacttcctagtcctacttgaggctgcaatcacactgaggaactcacaattccaaacatacaagaggctccctcttaacacggcacttacacacttgctgttccaccttccctcatgctg

SEQ ID NO: 10156 - DNA, 2332 bp, Homo sapiens
  SIMILAR (544)..(1500): 991254mologous to Homo sapiens KIR (cl-2) NK receptor precursor protein,accession number U30273,Smith-Waterman Score= 1729.
tcaaggcctgactgtggtgtcatgggcaggagacaactttggatcagggctcagcatttggaagttccgtgtacacgctggtatctgttgggggtgtcttgggcctctgagaagggcgactgatttttctctgtgtgaaaacgcagtgatccaactgtgcgtacgtcacctcctcagggtcttgttcatcagagtctttttttgttggagcaccagcgatgaaggagaaagaagaggaggaggatgaagaggatgatgaccactgaggtcccaatcagaacatgcaggtgtctggggttactttggcatgctgagacggtcggatcacttgaggttgggagtttcaagtagcgggtagcattcgacgcaggaagcggcttagccatgatagcgagtcgagctcgtacgcggggatgctctagagtccgggggtcccctcccatgatgtggtcaacatgtaaactgcatgggcagggcgccaaaaacatcctgtgcgctgctgagctgagctcggtcgcggctgcctgtctgcccggcagcaccatgtcgctcttggtcgtcagcatggcgtgtgttgggttcttcttggtccagagggccggtccacacgtgggtggtcaggacaagcccttcctgtctgcctggcccagcgctgtggtgcctcgaggaggacacgtgactcttcggtgtcactatcgtcataggtttaacaatttcatgctatacaaagaagacagaatccacgttcccatcttccatggcagattattccaggagagcttcaacatgagccctgtgaccacagcacatgcagggaactacacatgtcggggttcacacccacactcccccactgggtggtcggcacccagcaaccccgtggtgatcatggtcacaggaaaccacagaaaaccttccctcctggcccacccaggtcccctggtgaaatcaggagagagagtcatcctgcaatgttggtcagatatcatgtttgagcacttctttctgcacaaagaggggatctctaaggacccctcacgcctcgttggacagatccatgatggggtctccaaggccaatttctccatcggtcccatgatgcttgcccttgcagggacctacagatgctacggttctgttactcacaccccctatcagttgtcagctcccagtgatcccctggacatcgtggtcacaggtccatatgagaaaccttctctctcagcccagccgggccccaaggttcaggcaggagagagcgtgaccttgtcctgcagctcccggagctcctatgacatgtaccatctatccagggagcggggagcccatgaacgtaggctccctgcagtgcgcaaggtcaacagaacattccaggcagatttccctctgggccctgccacccacggagggacctacagatgcttcggctctttccgtcactctccctacgagtggtcagacccgagtgacccactgcttgtttctgtcacaggaaaccccagacacctgcacattctgattgggacctcagtggtcatcatcctcttcatcctcctcctcttctttctccttcatctctggtgctccaacaaaaaaaatgctgctgtaatggaccaagagcctgcagggaacagaacagccaacagcgaggactctgatgaacaagaccctgaggaggtgacatacgcacagttggatcactgcgttttcacacagagaaaaatcactcgcccttctcagaggcccaagacaccccctacagataccatcttgtacacggaacttccaaatgctaagcccagatccaaagttgtctcctgcccatgagcaccacagtcaggccttgaggacgtcttctagggagacaacagccctgtctcaaaaccgagttgccagctcccatgtaccagcagctggaatctgaaggcgtgagtcttcatcttagggcatcgctcctcctcacgccacaaatctggtgcctctctcttgcttacaaatgtctaggtccccactgcctgctggaaagaaaacacactcctttgcttagcccacagttctccatttcacttgacccctgcccacctctccaacctaactggcttacttcctagtctacttgaggctgcaatcacactgaggaactcacaattccaaacatacaagaggctccctcttgacgtggcacttacccacgtgctgttccaccttccctcatgctgtttcacctttcttcggactattttccagccttctgtcagcagtgaaacttataaaattttttgtgatttcaatgtagctgtctcctcttcaaataaacatgtctgccctccaa

SEQ ID NO: 10157 - DNA, 1863 bp, Homo sapiens
  SIMILAR (205)..(1464): 851254mologous to Pan paniscus killer-cell Ig-like receptor KIR,accession number AF266731,Smith-Waterman Score=1923.
atgggcctggagtggagatatgggcctggaggtgcagatatggacctggagtggagatatggccctggagtggagatgtgggtctggagtggagatatgggcctggaggtggagataagggcctggagtggagatatgggcctggagtggagatatgagcctggagatggagatatgggcctggagtggagatatgggcctggaggtggtcaggacaagcccttgctttctacctggcccagccttgtggtgcctccagaacatgtgactcttcggtgtcactctaatcttgggtttaacaacttcagtctgtacaaggatgatggggtgcctgtccctgagctctacaacagaatattctggaaaagccttttcatgggccctgtgaccccgtcacacacagggacctatagatgccggggttcacacacacactcccccagtggggggtcggcacccagcaaccccctggtgatcgtggtcacaggattccgcagaaaaccttccctcctggcccacccaggtcccctggtgaaatcagaagagacagtcatcctgcaatgttggtcagatgtcatgtttgagcacttccttctgcacagagaggggacgtttaaccacactttgcgcctcattggagagcacattgatggggtctccaagggcaacttctccatcggtcgcatgacacaagacctggcagggacctacagatgctacggttctgttactcactccccctatcagttgtcagcgcccagtgaccctctggacatcgtgatcacaggtctatatgagaaaccttctctctcagcccagccgggccccacggttctggcaggagagagcgtgaccttgtcctgcagctcccggagctcctatgacatgtaccatctatccagggaaggggaggcccatgaacgtaggctccctgcagggcccaaggtcaacagaacattccaggccgactttcctctggaccctgccacccacggagggacctacagatgcttcggctctttccgtgactctccatacgagtggtcaaagtcaagtgacccactgcttgtttctgtcacaggaaactcttcaaatagttggccttcacccactgaaccaagctccgaaaccggtaaccccagacacctacacgttctgattgggacctcagtggtcaaactccctttcaccatcctcctcttctttctccttcatcgctggtgctccaacaaaaaaaatgcatctgtaatggaccaagggcctgcggggaacagaacagtgaacagggaggattctgatgaacaggaccatcaggaggtgtcatacgcataattggatcactgtgttttcacacagagaaaaatcactcccccttctcagaggcccaagacacccccaacagatagcagcatgtacatagaacttccaaatgctgagtccagatccaaagctgtcttctgtccacgagcaccacagtcaggccttgaggggatcttctagggagacaacagccctgtctcaaaaccgggttgccagctcccatgtacctgcggctggaatctgaaggcatcagtcttcatcttaggggatcgctcttcctcaaaccacgaatctgaacatgcctctctcctgcttacaaatgtctaaggtccccactgcctgctggagagaaaacacactcctttgcttagcccacaattctccatttcacttgacccctgcccacctctccaacctaactggcttacttcctggtctacttgaggctgcaatcacactgaggaactcacaattccaaacatacaagaggctccctcttaacacagcacttagacacgtgctgttccaccttccctcatgctg

SEQ ID NO: 10158 - DNA, 1960 bp, Homo sapiens
  SIMILAR (114)..(1265): 961254mologous to Homo sapiens HLA-Bw4 specific inhibitory NK cell receptor recognized by Z27 mAB,accession number X94262,Smith- Waterman Score=2002.
tcaccctcccatgatgtggtcaacatgtaaactgctgggcagggcgccaaataacatcctgtgcgctgctgagctgagctggggcgcagccgcctgtctgcaccggcagcaccatgtcgctcatggtcgtcagcatggcgtgtgttgggttgttcttggtccagagggccggtccacacatgggtggtcaggacaaacccttcctgtctgcctggcccagcgctgtggtgcctcgaggaggacacgtgactcttcggtgtcactatcgtcataggtttaacaatttcatgctatacaaagaagacagaatccacattcccatcttccatggcagaatattccaggagagcttcaacatgagccctgtgaccacagcacatgcagggaactacacatgtcggggttcacacccacactcccccactgggtggtcggcacccagcaaccccgtggtgatcatggtcacaggaaaccacagaaaaccttccctcctggcccacccaggtcccctggtgaaatcaggagagagagtcatcctgcaatgttggtcagatatcatgtttgagcacttctttctgcacaaagaggggatctctaaggacccctcacgcctcgttggacagatccatgatggggtctccaaggccaatttctccatcggtcccatgatgcttgcccttgcagggacctacagatgctacggttctgttactcacaccccctatcagttgtcagctcccagtgatcccctggacatcgtggtcacaggtccatatgagaaaccttctctctcagcccagccgggccccaaggttcaggcaggagagagcgtgaccttgtcctgtagctcccggagctcctatgacatgtaccatctatccagggaggggggagcccatgaacgtaggctccctgcagtgcgcaaggtcaacagaacattccaggcagatttccctctgggccctgccacccacggagggacctacagatgcttcggctctttccgtcactctccctacgagtggtcagacccgagtgacccactgcttgtttctgtcacaggaaacccttcaagtagttggccttcacccacagaaccaagctccaaatctggtaaccccagacacctgcacattctgattgggacctcagtggtcatcatcctcttcatcctcctcctcttctttctccttcatctctggtgctccaacaaaaaaaaatgctgctgtaatggaccaagagcctgcagggaacagaacagccaacagcgaggactctgatgaacaagaccctgaggaggtgacatacgcacagttggatcactgcgttttcacacagagaaaaatcactcggcccttctcagaggcccaagacacccccaacagataccagcatgtacatagaacttccaaatgctgagcccagatccaaagttgtcttctgtccacgagcaccacagtcaggccttgaggggatcttctagggagacaacagccctgtctcaaaaccgagttgccagctcccatgtaccagcagctggaatctgaaggcgtgagtcttcatcttagggcatcgctcctcctcacgccacaaatctgaatgtgcctctcacttgcttacaaatgtctaaggtccccactgcctgctggagaaaaaacacactcctttgcttagcccacagttctccatttcacttgacccctgcccacctctccaacctaactggcttacttcctagtctacttgaggctgcaatcacactgaggaactcacaattccacacatacaagaggctccgtcttaacgcagcacttagacacgtgctggttccaccttccctcatgctgtttcacctttcttcggactattttccagccttctgtcagcagtgaaacttataaaattttttgtgatttcaatgtagctgtctcctcttcaaataaacatgtctgccctccaa

SEQ ID NO: 10159 - DNA, 1596 bp, Homo sapiens
  SIMILAR (56)..(967): 1001254mologous to Homo sapiens activatory NK receptor/KKA3 p50.3,accession number X94609,Smith-Waterman Score=1636.
ctgtgtgctgctgagctgagctggggcgcggccgcctgtctgcaccggcagcaccatgtcgctcatggtcatcatcatggcgtgtgttgggttcttcttgctgcagggggcctggccacaggagggagtccacagaaaaccttccttcctggccctcccaggtcacctggtgaaatcagaagagacagtcatcctgcaatgttggtcggatgtcatgtttgagcacttccttctgcacagagaggggaagtttaacaacactttgcacctcattggagagcaccatgatggggtttccaaggccaacttctccattggtcccatgatgcctgtccttgcaggaacctacagatgctacggttctgttcctcactccccctatcagttgtcagctcccagtgaccctctggacatggtgatcataggtctatatgagaaaccttctctctcagcccagccgggccccacggttcaggcaggagagaatgtgaccttgtcctgcagctcccggagctcctatgacatgtaccatctatccagggaaggggaggcccatgaacgtaggctccctgcagtgcgcagcatcaacggaacattccaggccgactttcctctgggccctgccacccacggagggacctacagatgcttcggctctttccgtgacgctccctacgagtggtcaaactcgagtgatccactgcttgtttccgtcacaggaaacccttcaaatagttggccttcacccactgaaccaagctccaaaaccggtaaccccagacacctacatgttctgattgggacctcagtggtcaaaatccctttcaccatcctcctcttctttctccttcatcgctggtgctccgacaaaaaaaatgctgctgtaatggaccaagagcctgcagggaacagaacagtgaacagcgaggattctgatgaacaagaccatcaggaggtgtcatacgcataattggatcactgtgttttcacacagagaaaaatcactcgcccttctgagaggcccaagacacccccaacagataccagcatgtacatagaacttccaaatgctgagcccagatccaaagttgtcttctgtccacgagcaccacagtcaggccttgaggggatcttctagggagacaacagccctgtctcaaaaccgggttgccagctcccatgtaccagcagctggaatctgaaggcatcagtcttcatcttagggcatcgctcttcctcacaccacgaatctgaacatgcctctctcttgcttacaaatgtctaaggtccccactgcctgctggagagaaaacacactcctttgcttagcccacaattctccatttcacttgacccctgcccacctctccaacctaactggcttacttcctagtctacctgaggctgcaatcacactgaggaactcacaattccaaacatacaagaggctgcctcttaacacagcacttagacacgtgctgttccacctcccttcagactatctttcagccttctgccagcagtaaaacttataaattttttaaataatttcaatgtagttttcccgccttcaaataaacatgtctgccctcatgg

SEQ ID NO: 10160 - DNA, 1849 bp, Homo sapiens
  SIMILAR (1)..(1104): 991254mologous to Homo sapiens NK receptor,accession number X97230,Smith-Waterman Score=1988.
atgtcgctcatggtcgtcagcatggcgtgtgttgggttgttcttggtccagagggccggtccacacatgggtggtcaggacaaacccttcctgtctgcctggcccagcgctgtggtgcctcgaggaggacacgtgactcttcggtgtcactatcgtcataggtttaacaatttcatgctatacaaagaagacagaatccacattcccatcttccatggcagaatattccaggagagcttcaacatgagccctgtgaccacagcacatgcagggaactacacatgtcggggttcacacccacactcccccactgggtggtcggcacccagcaaccccgtggtgatcatggtcacaggaaaccacagaaaaccttccctcctggctcacccaggtcccctggtgaaatcaggagagagagtcatcctgcaatgttggtcagatatcatgtttgaacacttctttctgcacaaagaggggatctctaaggacccctcacgcctcgttggacagatccatgatggggtctccaaggccaacttctccatcggtcccatgatgcaagaccttgcagggacctacagatgctacggttctgttactcactccccctatcagttgtcagctcccagtgaccctctggacatcgtcatcacaggtctatatgagaaaccttctctctcagcccagccgggccccacggttctggcaggagagagcgtgaccttgtcctgcagctcccggagctcctatgacatgtaccatctatccagggagggggaggcccatgaacgtaggttctctgcagggcccaaggtcaacggaacattccaggccgactttcctctgggccctgccacccacggaggaacctacagatgcttcggctctttccgtgactctccatacgagtggtcaaactcgagtgacccactgcttgtttctgtcacaggaaacccttcaaatagttggccttcacccactgaaccaagctccgaaaccggtaaccccagacacctgcatgttctgattgggacctcagtggtcatcatcctcttcatcctcctcctcttctttctccttcatcgctggtgctccaacaataaaaaatgctgcggtaatggaccaagagtctgcaggaaacagaacagcgaatagcgaggactctgatgaacaagaccctcaggaggtgacatacacacagttgaatcactgcgttttcacacagagaaaaatcactcgcccttctcagaggcccaagacacccccaacagatatcatcgtgtacacggaacttccaaatgctgagtccagatccaaagttgtctcctgcccatgagcaccacagtcaggccttgagggcgtcttctagggagacaacagccctgtctcaaaaccgggttgccagctcccatgtaccagcagctggaatctgaaggcgtgagtctgcatcttagggcatcgatcttcctcacaccacaaatctgaatgtgcctctcacttgcttacaaatgtctaaggtccccactgcctgctggagaaaaaacacactcctttgcttagcccacagttctccatttcacttgacccctgcccacctctccaacctaactggcttacttcctagtctacttgaggctgcaatcacactgaggaactcacaattccaaacatacaagaggctccctcttaacgcagcacttagacacgtgttgttccaccttccctcatgctgttccacctcccctcagactagctttcagtcttctgtcagcagtaaaacttatatattttttaaaataacttcaatgtagttttccatccttcaaataaacatgtctgcccccatggt

SEQ ID NO: 10161 - DNA, 1187 bp, Homo sapiens
  SIMILAR (1160)..(696): 681254mologous to Homo sapiens acetyl LDL receptor,accession number D86864,Smith-Waterman Score=460.
ctttctcctgcagcttctcctccgacatgtagtccggtagcggggctagagggccaggcaccgggttacccggccctcgataaggaaacactccggccatatccggagaatcctgtgcctgacatgcagctctggggtctttctgcaggggctgcgggctgggagccggggcaccggccctggcctacgcactggttggcgtctttctcctcgggctcctcggaggcgtcttcacactccttcagcctccagtccatgatgtagccaatgacgggggccgtcagcaggcacagcagctggagcacgccgaagatggaggtgtagaggccaactgcggcatccggctggcacttcacctccaggtcgacggtggacaggcacagcttgtggccctcctgcagcgccacctgctccttggcactcctcatggagctgcccacactcaggcgccggcccaccgtggtcacctgcttgtagaactgcttccctgtgatcttgtggtcaaagcccagccagctgaacttgatcttcaccctcgggccccgggagagtgtctgtgggtgcttgattcctggaaaggtgactgccgaggaggcgtaggacccaatcatcaaggcaataaacgtggaccgaaggtcgccgaacatgttgggcagcttggcttccgcctggcctttctggaagctaccaaaatggcggaagacagagcggacagggccttcggatccgcggggcttcccttccgcgaaggagaccgatggccgcttggccggagctaggctggaggtgcgcgggatggcgaatggcgtggaggcgtcctcagggggcgggaaagcacctgcagccaggctggcctctgacgaccctgcctgggccacagggaccatcccttcttggggtggcacacagtaggcaggaacctcatctgcctctccagactcaggatcggatgagaaggagtcatcagtggcccagccggcagagggcggctcaatgaagctgtccttgaggtctgatcggggggcccagcagcagcaggcacagcaggcaagacccaggaagagcagcagcagaggcacaaggctgcccacgatgagggcagtgtcccgactgccagagcctgggccccagccagccagggtcacagcgctgacagtggccagtatctggctcacaggcctccccat

SEQ ID NO: 10162 - DNA, 3392 bp, Homo sapiens
tccaagctgaattcgcggccgcgtcgaccacgccggccctgggcagtgacggggttcgggtgaccatggacagtgcgctcaccgcccgtgacagggtgggggtgcaggatttcgtgctgctggagaacttcaccagcgaggccgccttcatcgagaacctacggcggcgatttcgggagaatctcatctacacctacattggccccgtcctggtctctgtcaatccctaccgggacctgcagatctacagccggcaacatatggagcgttaccgtggcgtcagcttctatgaagtgccccctcacctgtttgccgtggcggacactgtgtaccgagcactgcgcacggagcgtcgggaccaggctgtgatgatctctggggagagcggggcaggcaagaccgaagccaccaagaagctgctgcagttctatgcagagacctgcccagccccccaacgcggaggtgccgtgcgggaccggctgctacagagcaacccggtgctggaggcctttggaaatgccaagaccctccggaacgataactccagcaggttcgggaagtacatggatgtgcagtttgacttcaagggtgcccccgtgggtggccacatcctcagttacctcctggaaaagtcacgagtggtgcaccagaatcatggggagcggaacttccacatcttctaccagctgctggaggggggcgaggaagaaactcttcgcaggctgggcttggaacggaacccccagagctacctgtacctggtgaagggccagtgtgccaaagtctcctccatcaacgacaagagtgactggaaggtcgtcaggaaggctctgacagtcattgatttcaccgaggatgaagtggaggacctgctaagcatcgtggccagcgtccttcatttgggcaacatccactttgctgccaacgaggacagcaatgcccaggtcaccaccgagaaccagctcaagtatctgaccaggctcctcagcgtggaaggctcgacgctgcgagaagccctgacacacaggaagatcatcgccaagggggaagagctcctgagcccgctgaacctggaacaggccgcgtacgcacgaaacgccctcgccaaggctgtgtacagccgcacttttacctggctcgtcgggaaaatcaacaggtcgctggcctccaaggacgtggagagccccagctggcggagcaccacggttctcgggctcctggatatttatggcttcgaagtgtttcagcataacagctttgagcagttctgcatcaattactgcaacgaaaagctgcagcagctcttcatcgaactcccgctcaagtcggagcaggaggaatacgaggcagagggcatcgcgtgggaacccgtccagtatttcaacaacaaaatcatctgtgatctggtggaggagaagtttaagggcatcatctcgattttggatgaggagtgtctgcgcccgggggaggccacagacctgaccttcctggagaagctggaggatactgtcaagcaccatccacacttcctgacgcacaagctggctgaccagaggaccaggaaatctctgggccgaggggaattccgccttctgcactatgcgggggaggtgacctacagcgtgaccgggtttctggacaaaaacaatgaccttctcttccggaaccttaaggagaccatgtgtagctcaaagaatcccattatgagccagtgcttcgaccggagcgagctcagtgacaagaagcggccagagacggtcgccacccagttcaagatgagcctcctgcagctggtggagatcctgcagtctaaggagcccgcctacgtccgctgcatcaaacccaatgatgccaaacagcccggccgctttgacgaggtgctgatccgccaccaggtgaagtacctggggctgttggaaaacctgcgtgtgcgcagagctggctttgcctatcgccgcaaatacgaagctttcctgcaaaggtacaagtcactgtgcccagagacgtggcccacgtgggcaggacggccgcaggatggggtggctgtgctggtccgacacctgggctacaagccagaagagtacaagatgggcaggaccaagatcttcatccgcttccccaagaccctgtttgccacagaggatgccctggaggtccggcggcagagcctggccacaaagatccaagctgcctggaggggctttcactggcggcagaaattcctccgggtgaagagatcagccatctgcatccagtcgtggtggcgtggaacactgggccggaggaaggcagccaagaggaagtgggcggcacagaccatccggcggctcatccgaggcttcatcctgcgccacgccccccgctgccccgagaacgccttcttcttggaccatgtgcgcacgtcttttttgctaaacctgaggcggcagctgccccggaatgtcctgggacacctcgtggcccacgcccccacctgccctgcgtgaggcctcagagcttctgcgggagttgtgcataaagaacatggtgtggaaatactgccggagtatcagccctgagtggaagcagcatctgcagcagaaggccgtggctagtgagatcttcaagggcaagaaggataattaccctcagagtgtacccaggctcttcatcagcactcgggttggtacagatgagatcaacccccgagtgctgcaggccttgggctctgagcccattcagtatgctgtgcctgttgtgaaatacgaccgcaagggctacaagcctcggttcccggcagctgctgcttcacggcccaacggccgttcgtcatcgtggaggacgccaaagttcaagcagaggattgattacgccaaacctgaccggaatctctgtcagcagcctgagcgacagtctttttgtgcttcatgtacagcgtgcggacaataagcaaaagggagatgtggtgctgcagagtgaccacgtgattgagacgctgaccaagacagccctcagtgccaaccgcgtgaacagcatcaacatcaaccagggcagcatcacgtttgcagggggccccggcagggatggcaccattgacttcacacccggctcggagctgctcatcaccaaggccaagaacgggcacctggctgtggtcgccccacggctgaattatcggtgataaaggcgcccactggaccatcccaacgcccaaagctttgcttttctcctcctccccttcccagttaccaaagagtcgaatttccagacagggacccagggacaccccgaagcccacctgcaatttcccacctcctgcccatccctttcttgagggagcagcaggggccaggagctaccccaggagtgggccaggccgggccacagcaataggaaagccagggccagagcga

SEQ ID NO: 10163 - DNA, 3771 bp, Homo sapiens
  SIMILAR (622)..(696): 331254mologous to Drosophila melanogaster UDP-glucose dehydrogenase,accession number AF001312,Smith-Waterman Score=56.
atgctcaacgggtgtgcccacgcccaccccatattccccacgaggatactgtcagagtgtccccgagggatgctcagagcaggcttccacctgaaccgcagagaggccctcccacccagcaggagccacatctccgctgctgttctagctcctggcgccctgctttcttgggggcccgaccaccccctggaattatacgggttacacagtcatcaggaccctccaacagggtatgaaggtgtgaagggtgcccccgtgggtggccacatcctcagttacctcctggaaaagtcacgagtggtgcaccagaatcatggggagcggaacttccacatcttctaccagctgctggaggggggcgaggaggagactcttcgcaggctgggcttggaacggaacccccagagctacctgtacctggtgaagggccagtgtgccaaagtctcctccatcaacgacaagagtgactggaaggtcgtcaggaaggctctgacagtcattgatttcaccgaggatgaagtggaggacctgctgagcatcgtggccagcgtccttcatttgggcaacatccactttgctgccaacgaggagagcaatgcccagggtcaccaccgagaaccaagctcaagtatctgaccaggctcctcagcgtggaaggctcgacgctgcgagaagccctgacacacaggaagatcatcgccaagggggaggagctcctgagcccgctgaacctggagcaggccgcgtacgcacgagacgccctcgccaaggctgtgtacagccgcacttttacctggctcgtcgggaagatcaacaggtcgctggcctccaaggggcgtcgtccagcttttcccctctcctggtcctgtgtccccactgagccactgtgggctcttctccttccttacagctttgagcagttctgcatcaattactgcaacgagaagctgcagcagctcttcatcgagctcacgctcaagtcggagcaggaggagtacgaggcagagggcatcgcgtgggagcccgtccagtatttcaacaacaaaatcatctgtgatctggtggaggagaagtttaagggcatcatctcgattttggatgaggagtgtctgcgccccggggaggccacagacctgaccttcctggagaagctggaggatactgtcaagcaccatccacacttcctgacgcacaagctggctgaccagcggaccaggaaatctctgggccgaggggaattccgccttctgcactatgcgggggaggtgacctacagcgtgaccgggtttctggacaaaaacaatgaccttctcttccggaaccttaaggagaccatgtgtagctcaaagaatcccattatgagccagtgctttgaccggagcgagctcagtgacaagaagcggccagagacggtcgccacccagttcaagatgagcctcctgcagctggtggagatcctgcagtctaaggagcccgcctacgtccgctgcatcaaacccaatgatgccaaacagcccggagacagccgtcagcgccagcccgctgaccacggcgctccccctaccccaggccgctttgacgaggtgctgatccgccaccaggtgaaagccggctttgcctatcgccgcaaatacgaagctttcctgcaaaggtacaagtcactgtgcccagagacgtggcccacgtgggcaggacggccgcaggatggggtggctgtgctggtccgacacctgggctacaagccagaagagtacaagatgggcaggaccaagatcttcatccgcttccccaagaccctgtttgccacagaggatgccctggaggtccggcggcagagcctggccatctgcatccagtcgtggtggcgtggaacactgggccggaggaaggcagccaagaggaagtgggcggcacagaccatccggcggctcatccgaggcttcatcctgcgccacgccccccgctgccccgagaacgccttcttcctggaccatgtgcgcacctcttttttgctaaacctgaggcggcagctgccccagaatgtcctggacacctcgtggcccacgcccccacctgccctgcgtgaggcctcagagcttctgcgggagttgtgcataaagaacatggtgtggaaatactgccggagtatcagccctgagtggaagcagcagctgcagcagaaggccgtggctagtgagatcttcaagggcaagaaggataattaccctcagagtgtacccaggctcttcatcagcactcggcttggtacagatgagatcagcccccgagtgctgcaggccttgggctctgagcccattcagtatgcggtgcctgttgtgaaatacgaccgcaagggctacaagcctcgctcccggcagctgctggtcacgcccaacgccgtcgtcatcgtggaggacgtcaaagtccccccggtggtggggacagtgtgccccggccctgagccccgcaccctctccctgcacgtgttcagccccatcctgctgctcagcctggtcaccatgtgcgtcacgcagctgcggctcatcttctacatgggggctatgaacaacatcctcaagttcctggtcagcggcgaccagaagacagtgatggccacggttggcctctacacctccatcttcggcgtgctccagctgctgtgcctgctgacggcccccgtcattggctacatcatggactggaggctgaaggagtgtgaagacgcctccgaggagcccgaggagaaagacgccaaccaaggcgagaagaaaaagaagaagcgggaccggcagatccagaagatcacttaatgccatgcgggccttcgccttcaccaacctgctgctcgtgggctttggggtgacctgcctcattcccaacctgcctctccagatcctctccttcatcctgcacacaatcgtgcgaggattcatccactccgctgtcgggggcctgtacgctgccgtgtacccctccacccagttcggcagcctcacgggactgcagtctctgatcagcgcgctcttcgcccttctgcagcagccgctgtttctggccatgatgggtcctctccagggagaccctctgtgggtgaacgtggggctgctccttctcagcctgctgggcttctgcctcccgctctacctgatctgctaccggcgccagctgggagcggcagctgcagcaggaggcaggaggatgacaaactcttcctcaaaatcaacgggttcgtccaaccagggagggcctttcgtgtagtggcttgccggcttcggaactgcggtctcctgcctgtgcttcagtgactgacccctgtccttgcccctccagagtaccccacgcacccccagggaccttcgccgtctccgtgccagcgttcacgctccctcccggggccctgcctcggaaactctgtggtggaaggacgggagagggccccggacacgcgcgtcttctcctgccgaacgcaggggctgccctgactttgctctgccgccccccggggacccggggcctggggtctctgtggtgcctgcagcaggagccaggaacgcccggcaggcaggcgctctcccgccagtgtctggattctgcctcttgccaaagcagagggggctgccatcccctgcctgccacctgcccctcggctgcatgcccacagccgtacctgcctgaggacaaaggcttgcactgtctcgcccgcgcctggcccccaccccctccccggccagcctgaggctgcctgaggaaggaaggacccgcttcctgttg

SEQ ID NO: 10164 - DNA, 416 bp, Homo sapiens
  SIMILAR (37)..(279): 1001254mologous to Homo sapiens serine hydroxymethyltransferase,accession number L23928,Smith-Waterman Score=419.
tttcgtggcgtcgctaggcagcttcgaaccagcgcaatgacgatgccagtcaacggggcccacaaggatgctgacctgtggtcctcacatgacaagatgctggcacaacccctcaaagacagtgatgttgaggtttacaacatcattaagaaggagagtaaccggcagagggttggattggagctgattgcctcggagaatttcgccagccgagcagttttggaggccctaggctcttgcttaaataacaaatactctgaggggtacccgggccagaggctcccctgcaaactttgctgtgtacactgccctggtggaaccccatgggcgcatcatgggcctggaccttccggatgggggccacctgacccatgggttcatgacagacaagaagaaaatctctgccacgtccatct

SEQ ID NO: 10165 - DNA, 843 bp, Homo sapiens
  SIMILAR (885)..(1046): 941254mologous to Homo sapiens Secreted protein encoded by gene 63 clone HFEBA88,accession number W88596,Smith-Waterman Score= 279.
atgtgcggggctgtgttccggcagcttcggacccatgcaatagcaatgccagtcaacagggcccacaaggatgctgacctgtggtcctcacatgacaagatgctggcgcagcccctcaaagacagcgatgttgaggctcccctgcaaactttgagtgtaactgccctggtggaaacccatgggtgcatcatgggcctggacctgccagatgggggtcacctgacccacgggttcatgacagacaagaagaaaatctctgccacgtccatcttctttgaatctatgccctataagggaggtccccacaaccacaccattgctggggttgctgtggccctgaagcaagctatgactctggaatttgaagtttatcagcaccatgtggtggccaactgcagagctctgtctgaggcactgacggagctgggctaccaaacagtcacaggttgttctgataaacatttgatcctcgtggatctccattcaatcaaaggcacagatggcagaagggctgagaaggtcctagaagcctgttctattgcctgcaacaagaacacctgcccagatgatagaaacactctacggcccagtggactgcggctggggaacccagcactgacatctcttggacttttggaaaaaggcttccaaaaggtagcccactttatccacagagggatagagctaaccctgcagatccagagcaacgctggcatcagagccaccctgaaagagttcaaggagagactagcagggcataaataccaggggtgtgtgcaggctctccaggaggaggttgagagcttcactctcttccctctgcctggcctgcctgacttctaa

SEQ ID NO: 10166 - DNA, 1580 bp, Homo sapiens
  SIMILAR (265)..(38): 821254mologous to Cloning vector pSport1 beta-galactosidase alpha peptide,accession number U12390,Smith-Waterman Score=325.
gcagcttcgaaccagtgcaatgacgatgccagtcaacggggcccacaaggatgctgacctgtggtcctcacatgacaagatgctggcacaacccctcaaagacagtgatgttgaggtttacaacatcattaagaaggagagtaaccggcagagggttggattggagctgattgcctcggagaatttcgccagccgagcagttttggaggccctaggctcttgcttaaataacaaatactctgaggggtacccgggccagagatactatggcgggactgagtttattgatgaactggagaccctctgtcagaagcgagccctgcaggcctataagctggacccacagtgctggggggtcaacgtccagccctactcaggctcccctgcaaactttgctgtgtacactgccctggtggaaccccatgggcgcatcatgggcctggaccttccggatgggggccacctgacccgtgggttgagtgacagacaagaagaaaatctctgccacgtccatcttcttttaatctatgccctacaaggcgaacccagagactggctacatcaactatgggcagctggaggagaacgcacgcctcttccacccgaagctgatcatcgcaggaaccagctgctactcccgaaacctggaatatgcccggctacggaagattgcagatgagaacggggcgtatctcatggcggacatggctcacatcagcgggctggtggcggctggcgtggtgccctccccatttgaacactgccatgtggtgaccaccaccactcacaagaccctgcgaggctgccgagctggcatgatcttctacaggaaaggggttgctgtggcactgaagcaagctatgactctggaatttaaagtttatcaacaccaggtggtggccaactgcagggctctgtctgaggccctgacggagctgggctacaaaatagtcacaggtggttctgacaaccatttgatccttgtggatctccgttccaaaggcacagaatggtggaagggctgagaaggtgctagaagcctgttctattgcctgcaacaagaacacctgtccaggtgacagaagcgctctgcggcccagtggactgcggctggggaccccagcactgacgtcccgtggacttttggaaaaagacttccaaaaagtagcccactttattcacagagggatagagctgaccctgcagatccagagcgacactggtgtcagagccaccctgaaagagttcaaggagagactggcaggggataagtaccaggcggccgtgcaggctctccgggaggaggttgagagcttcgcctctctcttccctctgcctggcctgcctgacttctaaaggagcgggcccactctggacccacctggcgccacagaggaagctgcctgccggaggacccccacctgagagatggatgagctgctccaaaggggaactgttgacactcgggccctttgagggggtttcttttggacttttttcatgttttcttcacaaatcaaaatttgtttaagtctcattgttagtaattctgggacaggttattaaaggatttaaatttg

SEQ ID NO: 10167 - DNA, 412 bp, Homo sapiens
  SIMILAR (8)..(163): 941254mologous to Homo sapiens diphthamide biosynthesis protein-2; DPH2,accession number AF053003,Smith-Waterman Score=285.
tggaactgcctgcaaccctgcctggccacctccaggcctggctccccacctcacacattatgcggacttattgcctggctctcccttccacgtggctctcccaccacctgagtcagagctgtgggaaaccccagacgtgtcactcattactggagccccgcctgggtcagacgccagtgacagaagctgtgagtggaagacgagggattgccatcgcctatgaggatgagggaagcggctgataccatgtggggctggagacatagatggacttatgaatggctgctaggacctttagtgctccctgcaccaacctcccatccccctgccaagatccttgaaggaccctggaacgagggagagcaggcaagccttcacaggataggatccgtctctgtcctgtcctggcact

SEQ ID NO: 10168 - DNA, 1197 bp, Homo sapiens
  SIMILAR (406)..(1194): 911254mologous to Homo sapiens Similar to diptheria toxin resistance protein required for diphthamide biosynthesis (Saccharomyces)-like 2,accession number BC001389,Smith-Waterman Score=1243.
atggagtcgatgtttagcagccctgccgaggcggcgctgcagcgagagaccggggtgccaggactgcttactcctcttccggacctggacggagtgtacgagctggagcgagtcgctggatttgtccgcgacctggggtgtgaacgagttgccttgcagttccctgaccagctattgggagatgctgtggctgtggctgcacgactggaggagacgacagggtcaaagatgttcattctgggtgacacagcctacggcagctgctgcgtggatgtgctgggtgctgagcaagctggagctcaggctctcatacattttggccctgcctgcttaagccctccagcccgcccactgcccgttgccttcgtgcttcgtcaacgttctgtggccttggagctctgtgtcaaggcctttgaggcccagaacccagaccccaaagcgcctgtggtgctgctgagtgagccggcctgtgcccatgccctggatacagggaagactcaggatgagggtgcccgggctggacggctaagggcacgaagacgatatctggtagagagggccagagatgcccgcgtggtagggctgctggcaggcacactgggtgtagcccaacaccgtgaggcactggcccacttgcggaacctgactcaggctgctggcaagcgtagctatgtgttggccctggggcggcccacccctgccaagcttgccaacttccctgaggtggatgtctttgtgctattagcctgtcctctgggtgctctagccccccagctttctggtagcttcttccagcctatactggcaccatgtgagctggaagctgcctgcaaccctgcctggccacctccaggcctggctccccacctcacacattatgcggacttattgcctggctctcccttccacgtggctctcccaccacctgagtcagagctgtgggaaaccccagacgtgtcactcattactggagatctccgacccccacctgcctggaagtcatcaaatgatcatggaagcttggctctgaccccacggccccagctggagctggctgagagcagtcctgcagcctcattccttagttcccggagctggcaagggctggagccccgcctgggtcagacgccagtgacagaagctgtgagtggaagacgagggattgccatcgcctatgaggatgagggaagcggctga

SEQ ID NO: 10169 - DNA, 483 bp, Homo sapiens
  misc_feature (1)...(483): n = a,t,c or g
gcccccctccnnnnnnnnnnnnnnnnnnnnnnnnaaagagaaaaggtatctggtttatttaggttgctgtgatctccctgagaaataagagtcagtatagaccaacnctgtccaaccaatagaactttctgccatgatggcatatcctgtagctgcactgtcccctcatgtggctgtctgaacacttgaatgactaatgtgactgagaaactgagcttttaatcttaattaacttaaatttaagtttagccacatgtatttagtggctactgtactggacagtgcaggtctagctagacnnnnnnnnnnnnnnnnnnnnnnnnnnnnnnnnnnnnnnnnnnnnnnnnnnnnnnnnnnnnnnnnnnnnnnnnnnnnnnnnnnnnnagtgcttctgataaatagtgggcagaggccagcccacgcgtccgcgnacgcgtgggtcgncccgggnnttcgaggcgatcatcagggtttcaaggggtc

SEQ ID NO: 10170 - DNA, 393 bp, Homo sapiens
  SIMILAR (221)..(331): 921254mologous to Homo sapiens Similar to diptheria toxin resistance protein required for diphthamide biosynthesis (Saccharomyces)-like 2,accession number BC001389,Smith-Waterman Score=160.
ggcacgaggggccgactgtgattccccctacccccacaagggcgaatttgactttcctgttggctgctctagaggactcaggccccgaagctgtcccagggaggtccccgctgcatcccaccacccaagctgtgcctcatggagtcgatgtttagcagccctgccgaggcggcgctgcagcgaggagaccggggtgccaggactgcttactcctcttccggacctgggacggagtgttgccttgcagttccctgaccagctattgggagatgctgtggctgtggctgcacgactggaggagacgacagggtcaaagatgttcattctggggtgacacagcctacggcagctgctgcgtggatgtgctgggtgctgagcaagctggagctcagg

SEQ ID NO: 10171 - DNA, 382 bp, Homo sapiens
  SIMILAR (46)..(366): 661254mologous to Homo sapiens Similar to diptheria toxin resistance protein required for diphthamide biosynthesis (Saccharomyces)-like 2,accession number BC001389,Smith-Waterman Score=329.
cagcctatactggcaccatgtgagctggaagctgcctgcaaccctgcctggccacctccaggcctggctccccacctcacacattatgcggacttattgcctggtgagtagtgggggcattgcctaagctggaaacctggggcacggagtcagggggtgagtatggattttctttcctcctccctttcaggctctcccttccacgtggctctcccaccacctgagtcagagctgtgggaaaccccagacgtgtcactcattactggagatctccgacccccacctgcctggaagtcatcaaatgatcatggaagcttggctctgaccccacggccccagctggagctggctgagagcagtcctgcaggtaaaatgtacaagt

SEQ ID NO: 10172 - DNA, 2570 bp, Homo sapiens
  SIMILAR (222)..(1679): 701254mologous to Homo sapiens Similar to diptheria toxin resistance protein required for diphthamide biosynthesis (Saccharomyces)-like 2,accession number BC001389,Smith-Waterman Score=1605.
  misc_feature (1)...(2570): n = a,t,c or g
cccgggtcgacccacgcgtccggagaaacagtagttaggatggctgaaggggatactcactcggctgaaggccgactgtgattccccctacccccacgaggcgattttgaccccctgagggctgctctagaggactcaggccccgaagctgtcccagggaggtccccgctgcatcccaccacccaagctgtgcctcatggagtcgatgtttagcagccctgccgaggcggcgctgcagcgagagacacggggtgccaggactgcttactcctcttccggacctggacggagtgtacgagctggagcgagtcgctggatttgtccgcgacctggggtgtgaacgagttgccttgcagttccctgaccaagctattgggagatgctgtggctgtggctgcacgactggaggaagacgacaggggtcaaagatgttcattctggggttgacacagcctacggcagctgctgcgtggatgtgctgggtgctgagcaagctggagctcaggctctcatacattttggccctgcctgcttaagccctccagcccgcccactgcccgttgccttcgtgctttcgtcaacgttctgtggccttggaactctgtgtcaagacctttggggcccaaaacccagaccccaaagcgcctgtggtgctgctgagtgagccggcctgtgcccatgccctggaggctttggctactctcctgcgcccacggtacctggacctgctagtctccagcccagcttttccccaaccagtgggttccctgagtccagagcctatgcccctagagcgttttgggcgccgcttcccccttgccccagggaggcgtctagaagagtatggtgccttctatgtagggggctctaaggccagccctgacccagaccttgacccagacctgagtcggctgctcttggggtgggcaccaggtcaacccttctcctcctgctgtccagatacagggaagactcaggatgagggtgcccgggctggagggctaagggcacgaagacgatatctggtagagagggccagagatgcccgcgtggtagggcttgctggcaggcacactgggtgtagcccaacaccgtgaggcactggcccactttgcggaaccttgattcaggctgctgggcaagtgtagctatgtgttggccctggggcggcccacccctgccaagcttgccaacttccctgaggtggatgtctttgtgctattagcctgtcctctgggtgctctagccccccagctttctggtagcttcttccagcctatactggcaccatgtgagctggaagctgcctgcaaccctgcctgggncacctccagggcctgggttccccacctcacacattnattgcggacttattgcctggctctcccttccacgtggctctcccaccacctgagtcagagctgtgggaaaccccagacgtgtcactcattactggagatctccgacccccacctgcctggaagtcatcaaatgatcatggaagcttggctctgaccccacggccccagctggagctggctgagagcagtcctgcagcctcattccttagttcccggagctggcaagggctggagccccgcctgggtcagacgccagtgacagaagctgtgagtggaagacgagggattgccatcgcctatgaggatgagggaagcggctgataccatgtggggctggagacatagatggacttatgaatggctgctaggacctttagtgctccctgcaccaacctcccaatcccccttgcccaagatccttgaaggaacccttggaaaggagggagagcaggcagccccttcaccaggataggatccgtctctgtccctgtccctggcaactggcacaagctcagcacatgccccagtaatgcgtgttgtttggctgatggaaataaagggcttagggacttccctgaggcctctggaccccatctgtcttccctgagggcagccccaggacctttggccaatcccagttcccagggttgcagttgagggtctgtccttgtcaaaaggcaggtgctagacagtctaggaccagggtttctcaaactccgtacttgacatttggggccaagataattctttgttgtgggggctgtctggtgtatggtagggtgctcagcagcatccctggccctctgcccccacctagacatccagaagcactccccccccagttgtgaacaacccaaaaatatcctcccagaccttggccaaatgttatcctgtgggggaaaattgcccctcaattgagaaccactggtctagcctagacctgcactgtccagtacagttagccactaaatacatgtggctaaacttaaatttaagttaattaagattaaaagcctcagtttctcagtcacatgttgtcattcaagtgttcagacagccacatgaggggacagtgcagctacaggatatgccatcatggcagaaagttctattggttggacagtgttggtctatactgactcttatttctcacgggagatcacagcaacctaaataaaccagataccttttctcaaaaaaaaaaaaaaa

SEQ ID NO: 10173 - DNA, 605 bp, Homo sapiens
  SIMILAR (43)..(177): 401254mologous to Homo sapiens Similar to programmed cell death 9,accession number BC002460,Smith-Waterman Score=88.
  misc_feature (1)...(605): n = a,t,c or g
ttgcggccgccagggaggcggcgggccgcgacatgctggccgccgacctccggtgcagcctcttcgcctcggccctgcagagctacaagcgcgactcggtgctgcggcccttccccgcgtcctacgcccgcggcgactgtaaggactttgaagccctgcttgcagatgccagcaagttacctaacctgaaagaacttctccagtcctccggagacaacccacaaacggggcctggggacctggtgagcttggatttttatcctcaaaaggtcctgacaaatccacaagtgcaggggaatgcagaagttttgaaaaagattccaaaagctgactggggctcctcacacgcctgttcctgcaccggacttcctgtttgaaattgagtactttgacccagccaacgccaaattttatgagaccaaaggagaacgagacctaatctatgcatttcatggtagccgcctagaaaacttccattccattatccacaatggcctgcactgccatctgaacaagacatccttgttcggagaggggacctacctcancagtgacttgagcctggccctcatatacagcccccatggccatgggtggcagcacag

SEQ ID NO: 10174 - DNA, 1153 bp, Homo sapiens
  SIMILAR (382)..(777): 1001254mologous to Homo sapiens unnamed protein product,accession number AK000516,Smith-Waterman Score=697.
atgcagccctcaggctgggcggccgccagggaggcggcgggccgcgacatgctggccgccgacctccggtgcagcctcttcgcctcggccctgcagagctacaagcgcgactcggtgctgcggcccttccccgcgtcctacgcccgcggcgactgtaaggactttgaagccctgtttgaaaagatccaaaagctgactggggctcctcacacgcctgttcctgcaccggacttcctgtttgaaattgagtactttgacccagccaacgccaaattttatgagaccaaaggagaacgagacctaatctatgcatttcatggtagccgcctagaaaacttccattccattatccacaatggcctgcactgccatctgaacaagacatccttgttcggagaggggacctacctcaccagtgacttgagcctggccctcatatacagcccccatggccatgggtggcagcacagcctcctcggccccatccttagctgtgtggccgtgtgtgaggtcattgaccatccggacgtcaagtgccaaaccaagaagaaggattccaaggagatagatcgcagacgagcgagaatcaaacatagtgaagggggagacatccctcccaagtacttcgtggtcaccaataaccagctgctgcgagtgaagtacctcctggtgtattcacagaagccacccaagagggcttcgagccagctctcctggttttccagccattggtttaccgtcatgatatccctgtatctgctgctgctgctcatagtcttctgtggcctactggcccttcaagacagaggcctgccccaagtgtgcccacagatcccatgtggatggagacctccttcagaggggtcacaggtctttgagactcagcctgggctttaatgtgtaggaaaagccttctggccacccagagagccggagccctgcttgctgtattctctgctcccttcttcctgctgggttttagccataatagggcccggtacgatttgggagtgacatttctgtaaagaagaggaaaaatcatttttctataatttgtaaagttgtgaaagagccactaccacagtttttacattgattattggaacatttcagaataaataaagatattttcttaatgaaaaaaaaaaaaaaa

SEQ ID NO: 10175 - DNA, 1059 bp, Homo sapiens; identical to SEQ ID NO: 806
  SIMILAR (328)..(459): 881254mologous to Homo sapiens calbindin D28K,accession number S46006,Smith-Waterman Score=211.

SEQ ID NO: 10176 - DNA, 522 bp, Homo sapiens; identical to SEQ ID NO: 638
  SIMILAR (337)..(468): 461254mologous to Human T-cell lymphotropic virus type 1 Gag,accession number S74562,Smith-Waterman Score=136.

SEQ ID NO: 10177 - DNA, 751 bp, Homo sapiens
  SIMILAR (133)..(297): 941254mologous to Homo sapiens Human secreted protein, SEQ ID NO: 5210,accession number G01129,Smith-Waterman Score=278.
atggccctgcaaaatgtccgtgtcctaatacccagaatctgtcaatatgttaccttacatggccaatgggtcttcaaagatgtgactaaatcaagtttcaagagatggggagattatcctggtttatctggggatgccagtgaaatttggtgccgtgactcggatcggggaacctcccttaggagatcaatcccctgtcctcctgctctttgtttcgtgaggaagatccacctacgacctctggtcctcagaccaaccagcccaaggaacatctcaccaattttaaatccgcggctgaagactgacgctgccagttcgcctcagaagccccctaaaccatcacggacgccaagcttcgggtatctctcacagcagaaggtctgctggcaactttgttccttaacccaaagcctgaatactaataatgtgaaaagtctaatgttattcaggccacataactgctttcctcctgaaataccaccttgtaaagatagagaaaatgactgtatagaggtgggaaggccaaaccaaggaattatgtctgacagaagggaagaaatgaccgtggtggccttgtcagaccctgtaggaaaggcctctacccatctagtgaaagtgtctacccagactaagaggcttctgaggcgatcgggcagtgtcagtcttcagctgctaagccgagaagatctgggaaggattcagtcagagagccttgggccagagttccaggggctctgggagtggctgccag

SEQ ID NO: 10178 - DNA, 397 bp, Homo sapiens
  SIMILAR (212)..(343): 461254mologous to Human T-cell lymphotropic virus type 1 Gag,accession number S74562,Smith-Waterman Score=136.
agagagacaaaggagacacgttttatccatggacccaaaactccggtgctggtcacggactgggaaggcagccttcccttggtgtttaatcattgcagagatgcctgattattcacccacgtttcaaaggtgtcagaccacgcagggacgcctgccttggtccttcacccttagcagcaagtcccgcttttctggggaaggggcaagagcttgctacaagtgccagaaatctgaccaccaggccaaggaatgcccgcaacccgggattcctcctaagccatgtcccatctgtgcgggaccacactggaaatcggactgttcaactcacctggcagccactcccagagcccctggaactctggcccaaggctctctgactgactccttcttggcttag

SEQ ID NO: 10179 - DNA, 263 bp, Homo sapiens
  SIMILAR (23)..(139): 561254mologous to Homo sapiens calbindin D28K,accession number S46006,Smith-Waterman Score=117.
cctgcaggaattcggcacgaggaaagatccacctacgacctctggtcctcagaccgaccaggccagggaacatctcaccaattttaaatcatccgcttccagatcccctggaactctggcccaaggctctctgagtgactccttcccagatcttctcggcttagcagctgaagactgacactgcccaatcgccttggaagcctacaggacaatcacagatgctctgggtaactctcacagtggaggggacgtgagtaaaaatg

SEQ ID NO: 10180 - DNA, 513 bp, Homo sapiens
  SIMILAR (206)..(6): 731254mologous to Homo sapiens neutral protease large subunit,accession number M27826,Smith-Waterman Score=227.
atggaggcaagggaaacaggcccttggaaagaaggtaatgtggagcgggtagcctccgtattgattaagaaggggacgggcttaccttccactgtgagagttaccggaagctcggcgtccgtgatggtctacggggcttccgaggcgatcgggcagcatcagtcttcagccgctaagccgagaagatctgtgaaggagtcagtcagagagccttgggccagagttccaggggctctgggagtggctgccagcatgaagtcacatggacacaacaggtatcccatgtctcctcaggtcgggctcccgctcccggagcaagagccggagccggagccagagtcggagccggagcaagaaagagaaaagcaggagccccagcaaggacaagagcctgcagccgcagccatagcgctggcaagagccgcagcaagagcaaagaccaagctgaagagaagatccaaaacaatgacaatgtcgggaaacccaagagccggagtcctagcaggcataaaa

SEQ ID NO: 10181 - DNA, 462 bp, Homo sapiens
  SIMILAR (71)..(130): 901254mologous to Homo sapiens Human secreted protein, SEQ ID NO: 5576,accession number G01495,Smith-Waterman Score=108.
atggtctatggggcttccgaggcgatcgggctgtgtcagtcttcagccgctaagccaagaagatctgggaaggagtcagtcagagagccttgggccagagttccaggggctctgggagtggctgccagaacagctccctcggtccttcattcaagccttgggcagcctttcttactttcctcgaaccctaatgaatctctcttggcccctctgcctcagaaaatggggctatttgttctgtatttacccttccaagtgggactcccttccacggttccatggcctcttatccttccttcaaaggtccctgaagaagagggccagcttcagagtactcttccttgtggtataaagctacttcctgtgttcacttcccaccatgcgtttttaggcgtgttctgcaatcagtgggtctcagatgtttttctggctcttttcttgatgaagctccttggtgcccag

SEQ ID NO: 10182 - DNA, 864 bp, Homo sapiens; identical to SEQ ID NO: 1393
  SIMILAR (151)..(783): 791254mologous to Cloning vector pZC320 SopA,accession number U26464,Smith-Waterman Score=871.

SEQ ID NO: 10183 - DNA, 140 bp, Homo sapiens
  SIMILAR (12)..(68): 841254mologous to Homo sapiens Human secreted protein, SEQ ID NO: 5576,accession number G01495,Smith-Waterman Score=95.
atgatctgggaaggagtcagtcagagagcgttgggccagagttccagtggctctgggagtggctgccgggatgagccttttcagattctgagccctttcagaattctcagaaatcttgaggaagacactggacttccctg

SEQ ID NO: 10184 - DNA, 1773 bp, Homo sapiens
  SIMILAR (1426)..(1770): 1001254mologous to Plasmid F Protein D,accession number M12987,Smith-Waterman Score=584.
atggccttgggaatctctgcccctgtggctttgcagggtacagccccactcctggctgtgcttagtggctgcagctttcccaagcacatgttgcaaactgtcaatggatcaccattctggggtttggagaatggtggccctcttctcagagctcgactaggcagtgctccagtggagactctagaactgttttcatcgctcaataaaattctccactcttaccattcttcagttgtcaagtgtgacctcattcttcttggacgctggacaaaagcttgggacccactaagtgcaggtggaggctgtcacactggccctttgcccttgcaagtggagggcaaccaccccactggcagctacagggttcctaacaggccacagtaccggtctgtggcctggggcttggggacctctggtctggtcaattacacatttctcctgaattctggagagacaacataccagttcctcagaggaaacaaagattttcttaaaaatcacatcaaattaaattactgctttttgcttattgaagtggataatcttactcttgtttttgtcattgaaaagacactaggccagatatttgatattccaaaggtagagcttctcttctcctaccaatgctttccaatggttgaaaacagacagaagccagagggtgaggaagactgtgtgatacagttgtcagagctcagctgcacagaatgcagcaaaaaagcatggagaatggaggttctgcataccaacaaaaccaccaatgccacccagtgtggagggcccgctcagcttcaacaattcaacgctgttctttctgaaaaagtacacatcgtgccttctctacttcgctcttggaacataatttctcatggcagatttccatcatttgaaacttttaatacaaagaactgcatagcgtataatccaaatggaaatgctttagatgaatcctgtgaagataaaaatcgttatatctggttggagaagcctcaggaaacttacagtaatgacagaagggaaagcaaacacatccctctacgcatggcagcagaaaggagacgtgctgagcaaaaggaaaaataccctcttattaaatcatcagatctaggggcttccgaggcgatccggcagcgtcagtcttcagctgctaagctgagaaaatctgggaaggagtcagtcagagagccttgggccagagttccaggggctctgggagtggctgccagggcactgatagcagaagatgctggcttgagtagagtgatcttatttcattatggtgaaagttggaacctcttacgtgccgatcaacgtctcattttcgccaaaagttggcccagggcttcccggtatcaacagggacaccaggatttatttattctgcgaagtgatcttccgtcacaggtatttattcgcgataagctcatggagcggcgtaaccgtcgcacaggaaggacagagaaagcgcggatctgggaagtgacggacagaacggtcaggacctggattggggaggcggttgccgccgctgctgctgacggtgtgacgttctctgttccggtcacaccacatacgttccgccattcctatgcgatgcacatgctgtatgccggtataccgctgaaagttctgcaaagcctgatgggacataagtccatcagttcaacggaagtctacacgaaggtttttgcgctggatgtggctgcccggcaccgggtgcagtttgcgatgccggagtctgatgcggttgcgatgctgaaacaattatcctga

SEQ ID NO: 10185 - DNA, 366 bp, Homo sapiens
  SIMILAR (103)..(216): 811254mologous to Homo sapiens Human secreted protein, SEQ ID NO: 5576,accession number G01495,Smith-Waterman Score=150.
atgggggctgtctgtgaagctttgcggcagtacagcccagaaggggacggacttaccctccactgtgagagttacccgaagctcggcatccgtgatggtctgggggcttccgaggcgatccggcagcgtcagtcttcagccgctaagctgagaagatctgggaaggagtcagagagccttgggccagagttccaggggctctgggagtggctgccagtcagagttactcttgctgctgctgctgctgctgctgctgctgctgctgctgctacggtggtggcggcggcggtggtggcggtggctgccgaggcctcatggttgtcagctccatgcctcctgaacttcactccactgaaatctggttgg

SEQ ID NO: 10186 - DNA, 420 bp, Homo sapiens; identical to SEQ ID NO: 448
  SIMILAR (106)..(219): 841254mologous to Homo sapiens Human secreted protein, SEQ ID NO: 5576,accession number G01495,Smith-Waterman Score=161.

SEQ ID NO: 10187 - DNA, 595 bp, Homo sapiens
  SIMILAR (247)..(402): 781254mologous to Homo sapiens Human secreted protein, SEQ ID NO: 5210,accession number G01129,Smith-Waterman Score=216.
atggtctccactctgctaaagatcaattctgagaaggaagagttcacaatgtaccctaagataattcataaactgaagatggaagaagaactgtctgagtccccccaggatgtcataacaaaggtgatggaagccctagatgcagcaggcagcctgctctgtgggagagactcagcccccctgcacccaggtgaaataaacagctttattgctcacacaaagcctgtttggtggtctcttcacacggactcacatgaaatttggtgccgtgactcggatcgggggacctcccttgggggatcaatcccctgtcctcctgctctttgctccgtgaaaaagatccacttacgatctcagggcctcagacccaccagcccaaggaacatctcaccaattttaaatcaggaccccactgaaaatcggactgttcaactgcacctggcagccactcccagagcccctggaactctggcccaaggcgctctgactgactccttcccagatcttctcagcttagcagctgaagactgacactgcccaatcgcctcagaagcctacaggaccatcacagatgctctaggtaactctcacaggg

SEQ ID NO: 10188 - DNA, 1593 bp, Homo sapiens
  SIMILAR (1452)..(751): 851254mologous to Mus musculus protocadherin,accession number AF281899,Smith-Waterman Score=1033.
tcaggataattgtttcagcatcgcaaccgcatcagactccggcatcgcaaactgcacccggtgccgggcagccacatccagcgcaaaaaccttcgtgtagacttccgttgaactgatggacttatgtcccatcaggctttgcagaactttcagcggtataccggcatacagcatgtgcatcgcataggaatggcggaacgtatgtggtgtgaccggaacagagaacgtcacaccgtcagcagcagcggcggcaaccgcctccccaatccaggtcctgaccgttctgtccgtcacttcccagatccgcgctttctctgtccttcctgtgcgacggttacgccgctccatgagcttatcgcgaataaatacctgtgacggaagatcacttcgcagaataaataaatcctggtgtccctgttgataccgggaagccctgggccaacttttggcgaaaatgagacgttgatcggcacgtaagaggttccaactttcaccataatgaaataagatcactggcagccactcccagagcccctggaactctggcccaaggctgactgactccttcccagatcttctcggcttagcggctgaagactgacactgcttgatcgcctcggaagccccctgggtatattgcatgatgttgaggtttggggtatgattgattctgtcacccagatactgagtatagtacacaatagttaatttttcaattgtctcttctccctctctccctccatagtagtccccagtgtcttttgttgccatcagcagctgtatgacactgtccccaggtctcatgtctgtataaacatacacatcataggatatttcagggaaggttggcgtgttatcatttgcatccatcacttgaatattgacgatgactggctcactttcttgtacaccatcaaatgctgttatcgaaaaggtgtaagtttgctgttcttccctgtccactggttgaagtaaggtgaggtagcgagtaataccagtctgtgtgacggtgaagactgaggtgtagtcattcagaaaaaggtgaagctctgggtcttttgtatcttctatgtccttgtccagagctactattcttaaaggtgaagtcaaattgagactgtccgaaatggttgctcccactggggcagattccaggatatagccttgataactgggcattgtaaaatatggactttgattgttttcatccagtatttcaatgtgtagaccggcaaaggcaggaagaggatgaccattgtcttgttcagccttaataaccaaatcaaatttctggtgaaagtctctgtttactggctccaggagactaagttctgctgtcctaggatgcatatggaaaaatcgtgggtaatcctcaggagtccctttgctccagttaccaacaagttcctcatctctatctgagaccacctcagcctggttttcatcattaatatcattatcagcattttggtcaaagccattcggtaagtctctagagagttccaaactttctcgcatcttcctatcttctacagagccctgcaaactgttccaatctctgcctgttacccagttccaaagtcgtttctgcat

SEQ ID NO: 10189 - DNA, 433 bp, Homo sapiens
  SIMILAR (166)..(83): 821254mologous to Homo sapiens neutral protease large subunit,accession number M27826,Smith-Waterman Score=116.
gtataatcatataacaaatgaggaaactgagggtcaaagaaacccagtaactttccaatgttacctccttgccagcaccaaaggggatggacttaccttccactgtgagagttacccgaagctcggcgtccgtgagggtctagggggcttccgaggggatcgggcagtcagtcttcagccgctaagcccagaagatctgggaaggagtcagtcagagagccttgggccagagttccaggggctctgggagtggctgccagacaagcagaagagtggcaaggcagagaaggagagaagaaagggaacatctgaacctcgagaggagtttggctggggacgatcggagaggagactggctgtgggacggccaaattccagaggaagatcatcttcccactccatcccctttctagctccccatccatcccactga

SEQ ID NO: 10190 - DNA, 414 bp, Homo sapiens
  SIMILAR (142)..(231): 661254mologous to Homo sapiens Human secreted protein, SEQ ID NO: 5576,accession number G01495,Smith-Waterman Score=90.
atgtccaagacaaaggcaccagcagatttggtgtctggtgagggcctgttcctcaaagaaggtacattctatttgtcttcccatggtggaagaagttgggatcagcttgggaccaggagatactctccctgtgagaaaaggggggcttctgaggcgattgggcagcgtcagtcttcagccgctaagccaagacgatctgggaaggaaggagtcagtcagagagccttgggccagagttccaggggctctagaagtggctgccaggaccaacacctacaagttacttccagctccaagaggccgtgcagaggaaggggcctctgtgtgtaatttttctgtcaggataggccatctgttcctggtttgcattaagagtcttgtacgtgttggtgcactcctggcaatttggaccaa

SEQ ID NO: 10191 - DNA, 1290 bp, Homo sapiens
  SIMILAR (1)..(459): 1001254mologous to Salmonella typhi RcsB,accession number AB000683,Smith-Waterman Score=749.
atgcctggcgataagtacggcgatggcattaccttaatcaagtacatcaagcgccatttcccaagcctgtcgatcattgttctgactatgaacaacaacccggcgattcttagtgcggtattggatctggatatcgaagggatcgtgctgaaacaaggtgcaccgaccgatctgccgaaagctctcgccgcgctgcagaaagggaagaaatttaccccggaaagcgtttctcgcctgttggaaaaaatcagtgctggtggttacggtgacaagcgtctctcgccaaaagagagtgaagttctgcgcctgtttgcggaaggcttcctggtgaccgagatcgctaaaaagctgaaccgcagtattaaaaccatcagtagccagaagaaatctgcgatgatgaagctgggtgtcgagaacgatatcgccctgctgaattatctctcttcagtgaccttaagccagataagacgcgttagtgtcttatctggcatttgcaccgattgccggatgcggcgtaaacgccttatccggcctacgattcccattatttcaacaaattacattaaagtaggccagataagacgcgtcagcgtcgcatctggcatttgcgctgaatgccggatgcggggtaaacgctttatcgtcctaggaattccgggatttctggacctctcggggtataacgcagcgtctgggaagcgccaaagcttgcatgcctgcagccgcgtaacctggcaaaatcggttacggttgaaacgttttccttcaattcatgggccttttaatgaagcttcacaagaagcggcgcgtcgtaagtcgattgagaaagagctggaatgggtacgtcaaggtactaaaggccgtcagtcgaaaggtaaagcacgtctggcgcgctttgaagaactgaacagcaccgaatatcagatcactgtattacacacaggaggaaaatcagagttaggaagggggcttccgaggcgatcgggcagtgtcagtcttcagccgctaagccgagaagatctgggaaggagtcagtcagagagccttgggccagagttccaggggctctggaagtggctgccagatgaatcctctgtctggccggccccaggttgtctgcttctttactgcacacatgttgacaaagaaaagggaagaaggagcctccatgttgaacatgccttgcttccagtgaaaggaagagatgatccaagcaaatttaggaccaatagcagactcttcacactgcctggggatagagggaccaccctgggctcctcttactcctgg

SEQ ID NO: 10192 - DNA, 411 bp, Homo sapiens; identical to SEQ ID NO: 447
  SIMILAR (109)..(222): 861254mologous to Homo sapiens Human secreted protein, SEQ ID NO: 5576,accession number G01495,Smith-Waterman Score=172.

SEQ ID NO: 10193 - DNA, 1686 bp, Homo sapiens
  SIMILAR (651)..(875): 981254mologous to Homo sapiens hypothetical protein,accession number AL137275,Smith-Waterman Score=418.
atgctgtcagacaaatgtcagcatcagataatgcatatggatagcatgcatgacatgaccatcaccatcatgatcaccgtcaagcttcttattggagaaactgacagcatacgttttaaactagccattaaacctgcctgtgaccttgtcagcctccaccacgtttatctggatggatgcatggttcttggcaccggtgacgcggttactagcagagactttcttccgcatgtacaggtccacaagctcgccggtgtgcttttggatttcaagactgtgcctgctgccacgacactgcgtaattcttctattccttcagctcttcctgaaccgatgactgctagtgaagcagctgctaggaaaagccaaataaaagccagaataacagataccattggaccaacagaaacctcaattgcaccaagacaaagaccaaaggccaactctgctactactgccactcccagtgtgctgaccattcaaagttcagcaacacctgttaaagtccttgctcctggtgaattcggtaaccatagaccaaaagagtacagtgtctctcccggcggctttcatgggctggccgttgagtatcagcagctttttcaggcgcatgttgcaagctgtaggattgaacagttgcatttgaatgtaggcagccgccacagcagcatagagtactccagcaactacagcagggagattggagattacagcaactccatttacagcatcgtcatcctcaccagcagcagcagcagcagcagcagcaacagcaacagcagcagcagcaacagcaacagcagcagcagcagcagcagcagcagcaccaccaccaccaccaccaccacttacttcaagatgcttatatgcagcaggtcagttgctgataaagaggccattgcaaatttcacaaatcagaagaacatcagcaatccacctgatatgtcagggtggaatccttttggagaggataatttctctaagttaacagaagaggaactattggacagagaatttgaccttctaagatcaaactcagcccacctgcacccaggtgaaataaacagccatgttgctcacacaaagcctgtttggtggtctcttcacacagatgtgcatgaaatttggtgccgtgactcggatcgggggacctcccttgggagatcaatcccctgtcctcctgttctttgctccatgagaaagatccacctacaacctcaggtcctcagactgaccggcccaaggaacatctcatcaattttaaatcaggagcttgctacacgtgccggaaatctggccactaggccaaggaatgcctgcagcctgggattcctattaagccgcatctcatctgtgtgggaccccactgaaaatcggactgttcaactcacctggcagccactcccagagcccctggaactctggcccgaggctcactgactgactccttcccagatcttctcagcttagcagctgaagactgacactgcccgatcacctcggaagcctgtttaagttgcgtttccgagttgacgtgcacatcacagatttcacagtgaaatgttttattttggaggcctgtgtttcctttattaacaggtcctttgcctttcactcctgccctaggaaaggctttgatagtgccacttccattccgggcttctaacatggttttgtgcttagtac

SEQ ID NO: 10194 - DNA, 756 bp, Homo sapiens
  SIMILAR (565)..(233): 341254mologous to Bovine leukemia virus gag polyprotein,accession number M10987,Smith-Waterman Score=144.
aaaggcaagagttgcatggacagattctctgcaaggtgctgagcaaggtagcagacatgccaggtcttgagtgcattgtgtctagaggtagagcacagaggaggaaaagggggattctgaggcgatcgggcagcttcagtcttcagccgctaagcccagaagatctgggaaggagtcagtcagagagccttgggccagagttccaggggctctgggagtggctgccaaggtgagttggacagtccgatttccagtggggtcccgcacagatgggacgcagcttaggaggaatcccgggctgcaggcattccttggcctggtggccagatttctggcacttgtagcaagctccttccagaaaagcgggaaaggggttgggtcgtggaaataaggggttggggtgcagagataagaggtcggggcatggaaataagggattggggcacagagatataagaggttggggtgcagaaataagggattgggccacagagataagaggtcggggcgtggaaataagggactggggcacagagatacgaggttggggtacttgctcctctagaaaagcggacttgccactcagggtgaaggagaaggggttgggtgtttcttgccccccagaaaggcggagaaggggtagagacacagagagaaggggttggggtacttgccccttccccagaaaagcgggacttgccgctaagggtgaaggaccaaggcaggcgtccctgcgtggtctgacacctctgaaac

SEQ ID NO: 10195 - DNA, 1103 bp, Homo sapiens
  SIMILAR (159)..(7): 521254mologous to Homo sapiens neutral protease large subunit,accession number M27826,Smith-Waterman Score=120.
atgggggctgtctgtgaggccttgcggcagtacggcccagaaggggacagacttaccttccactgtgagagttacccgaagctcggtgtccatgatggtttagggggcttccgaggagatccggcagtgtcagtcttcagccgtgaagctgagaagatctgggaaggagtcaatcagagagccttgggccagagttccaggggctctgggagtggctgccaggtgagtcgaacagtccgattttcagtggggtcccacacagatgggacgcagcttaggaggaatcctgggcagcgggcattccttggcccagtggccagatttccggcacgtgtagcaagctccttgtctatgatgcaaagacctttgttcacgtgtttgtcggctgaccctctccccacaattgtcttgtgaccctgacacatccccctttgtcccttcctcagaaaatcgggacttgccgctaagggtgaaggaccaaggcaggtgtccctgtgtggtctgacacccttgaaacgtgagtgtataatcagagaggtgtccctgcaatgattaaacaccaagggaaggctgccttcccagtccatgaccggtgccggagttgggtccatggataaaacgtgtctcctttgtctcccttcttttaaaacaaatcttttgtctttgtcttcatttctgcattcgtccccttcgttcaatcctgtaggaattgacagtgatattggggagttcccatccctggatttgggatttcctcgagtttccagccctgtccttgtggccaaaaagtggcacagtttggtttttgaatcctgttcgtgacgccaaaaatattctgcaggtattgggagatccacagctaagacaccaggacctcctggaagcctagaaacagtgagagtgccggtccgacatccttcagttttattctgggcctgggttttagtactttctggagataaaccaagatacccactatggctatgtctgctaaaatgtctaatggatattagctcttgggtcactttctcccttaggaccacctgaagtatagagtgtagcctctcaagggagcaggtggcagccttggggctgaaaggcat

SEQ ID NO: 10196 - DNA, 1539 bp, Homo sapiens
  SIMILAR (575)..(724): 761254mologous to Homo sapiens calbindin D28K,accession number S46006,Smith-Waterman Score=195.
ggggcttccgaggcgatcaggcagcatcagtcttcagccactaagccaagaagatctgggaaggagtcagtcagagagcctcgggccagagttccaggggctctggcagtggctgtcagactttcaaacttaacaccagtgatttgccaggggcttttgggccatcagccacagactgaaggctgtacttttggcttccctacttttgagattttgggacttggaatgacttctttgctcttcagcttgcaaatgtcttatgctgggacttcactttgtgattgtaggtaacatctgtgctacactcaaggagaaatactcctcaatgctccatttagatgtgaccatgaagaaaaatggggagaaaagaacaaggctccaaaaaagaaagaagggaatgcctccacatccggcttatgaggacctaaacatagctgccatcactctccctgccaatgttgtccttcatcagccaagtggcttcagaacttcagggcagctggaccccgtttggtggtctcttgacacggacgcgcatgaaatttggtgccaagacccgggacttggatcaggggacttcccttgggagatcactcccctgtcctcctactctttgctccatgagaaagatccacctacgacctcaggtcctcagaccgaccagcccaagaaacatctcaccaatttcaaatccaagacaaaggagacaggttttatccatggacccaaaactccggcaccggtcacggactgggaaggcagccttcccttggtgtttaatcattgcagggacacctctctgattattcacccatgtttcaagggtgtcagaccacgcagggatgcctgccttggtccttcacccttagcggcaagtcccgcttttctggagaaggggcaagatttaattaacctcgccttcaaggtgtacaataatagaaaaaagttgcaattccttgcctccactgtgagacaaaccgcagccacatctccagcacacaagaacttccaaatgcctgaaccgcagcggccaggcgttcctccagaacctcctcccacaggagcttgctacatgtgccggaaaatctggccactggcacaaggaatgccggcagcccgggattcctcttaagccgcgtcccatctgtgtgggaccccactgaaaatcggactgttcaactcacctggcagccactcccagagcccctggaactatggcccaaggctctctgtctgactgactccttcccagatcttcttggcttagcagcttgaagactgacactgcccgatcgcctcggaagccccggagaccattcacggacgccgagcttcgcgtaactctcacagtggaagcccctggcccacagcctggtaccctggagctccataaatacctgttgagtgaatgagaggatgaaggcttctgcagagagagagtggaagaaaagtggcgtcttttgacttcggacttggctttccttgcagaggcctcagggaggaacaacacggaaacaaagatggccttgtcctgggccc

SEQ ID NO: 10197 - DNA, 2448 bp, Homo sapiens; identical to SEQ ID NO: 7826
  SIMILAR (1933)..(311): 1001254mologous to Homo sapiens UDP-Galactose ceramide galactosyl transferase,accession number U30930,Smith-Waterman Score =2867.

SEQ ID NO: 10198 - DNA, 1947 bp, Homo sapiens; identical to SEQ ID NO: 5623
  SIMILAR (1)..(1833): 961254mologous to Homo sapiens unknown,accession number AF148856,Smith-Waterman Score=3109.

SEQ ID NO: 10199 - DNA, 507 bp, Homo sapiens
  SIMILAR (4)..(300): 911254mologous to Homo sapiens putative p150,accession number U93563,Smith-Waterman Score=465.
accaacaaaattgacagaccactagcaagactaataaagaagaaaagagagaagaagcaaatagacgcaataaaaaatgacaaaggggatatcaccactgatcccacagaaacacaaactaccatcaaagaatactataaacacctctatgcaaataaactagaaaatctagaagaaatggataaattcttcgacacatacaccctcccaagactaaaccaagaagaagttgaatctctgaatagaccaatagcaggctctgaaattgaggcaataattaatagcttaccaaccaaaaaagtccaggaccagatggattcacagccaaattctaccagagagaataaaatacctaggaatccaacttacaagggatgtgaaggacctcttcaaggagaactacaaacgctgctcaatgaaataaaagaggatagaaacaaatggaagaacattccatgcttatgggtaggaagaatcaatatcgtgaaaatggccatactgcccaag

SEQ ID NO: 10200 - DNA, 809 bp, Homo sapiens; identical to SEQ ID NO: 7829
  SIMILAR (126)..(809): 831254mologous to Homo sapiens putative p150,accession number U93563,Smith-Waterman Score=933.

SEQ ID NO: 10201 - DNA, 3819 bp, Homo sapiens; identical to SEQ ID NO: 3971

SEQ ID NO: 10202 - DNA, 2265 bp, Homo sapiens; identical to SEQ ID NO: 2285
  SIMILAR (1)..(288): 581254mologous to Homo sapiens RCC1-like G exchanging factor RLG,accession number AF060219,Smith-Waterman Score=307.

SEQ ID NO: 10203 - DNA, 2835 bp, Homo sapiens; identical to SEQ ID NO: 7486
  SIMILAR (267)..(130): 1001254mologous to Homo sapiens Human secreted protein, SEQ ID NO: 7055,accession number G02974,Smith-Waterman Score=240.

SEQ ID NO: 10204 - DNA, 2760 bp, Homo sapiens; identical to SEQ ID NO: 7859
  SIMILAR (319)..(885): 731254mologous to Homo sapiens Similar to ribosomal protein S2,accession number BC001795,Smith-Waterman Score=702.

SEQ ID NO: 10205 - DNA, 2307 bp, Homo sapiens
  SIMILAR (573)..(19): 341254mologous to Rattus norvegicus chapsyn,accession number U49049,Smith-Waterman Score=230.
atgaaggaaaaaatgttaagggcagctagagagaaaggtcgggttacccacaaagggaagcccatcagactaacagcggatctctcggcagaaactccacaagccagaagagagtgggggccaatattcaacattcttaaagaaaagaattttcaacccaggatttcatatccagacaaactaagcttcataagtgaaggagaaataaaatactttacagacaagcaaatgctaagagattttgtcaccaccaggcctgtcctaaaagagctcctgaaggaagcactaaacatggaaaggaacaactggtaccagccactgcaaaaacatgccaaaaacatgccaaacagcatcatcctgataccaaagccgggcagagacacaacaaaaaaagagaattttagaccaatatccttgatgaacattgatgcgaaaatcctcaataaaatactggcaaaccgaatccagcagcacatcaaaaagcttatccaccatgatcaagtgggcttcatccctgggatgcaaggctggttcaatatacacaaatcaataaatgtaatccagcatataaacagaaccatcgacaaaaaccacatgattatctcaatagatgcagaaaaggcctttgacaaaattcaacaactcttcatgctaaaaactctcaataaattaggtattgatgggacatatctcaaaataagaataaaatacctaggaatccaacttacaagggaagtgaaggacctcttcaaggagaactacaaaccactgctcaatgaaataaaagaggacacaaacaaatggaagaacattccatgctcatgggtaggtagaatcaatatcatgaaaatggccatactgcccaaggtaatttatagattcaatgccatctccaacaagctaccaatgactttcttcacagaattggaaaaaactactttaaacttcatatggaaccaaaaaagagcccgcatcgccaagtcaatcctaagccaaaagaacaaagctggaggcatcacgctacctgacttcaaacaatactacaaggctacagtaaccaaaacagcatggtactggtaccaaaacagagatatagatcaatggaacagaacagagccctcagaaataacaccgcatatctacacctatctgatctttgacaaacctgagaaaaacaagcaatggggaaaggattccctatttaataaatggtgctgggaaaactggctggccgtatgtagaaagctgaaactggatcccttccttacaccttatacaaaaattaattcaagatggattaaagacttaaacgttagacctaaaaccataaaaaccctagaagaaatcctaggcattaccattcaggacacaggcatgggcaaggacttcatgtctaaaacaccaaaagcaatggcaacaaaagccaaaattgacaagtgggatcaaattaaactaaagagcttctgcacagcaaaagagactaccatcagagtgaacaggcaacctacaaaatgggagaaaattttcgcaacctattcatctgacaaagggctaatattcagaatctacaatgaacttaaacaaatttacaagaaaaagacaaacaaccccatcaaaaagtgggcgaaggacatgaacagacccttctcaaaagaagacatttatgcagccaaaaaatacatgaaaaaatgctcaccatcactggccatcagagaaatgcaaatcaaaaccacaatgagataccatctcacaccagttagaatggcgatcattaaaaagtcaggaaataacagacaaacagagagccaaatcatgagtgaactcccaatcacaattgcttcaaagagaataaaatacctaggaatccaacttacaaaggatgtgaaggacctcttcaaggagaactacaaaccactgctcaatgaaataaaagaggacacaaacaaatggaagaacattccatgctcatggataggaagaatcaatattgtgaaaaatggccatactgcccaagcccacaaatgtacatgtcaccaacctggcagcccaagacactacagctctggaggcagcccaaatatccttggaagggcacccacaggagaaagaaataagcgtgaccgctatgccattattaagtccctcctgaccactgggtcagccatgaagaagatagaagacaacaacacacttgtggatgtcaaaatcaacaagtaccagatcaaacaggttgtaaagaagctctatgacactgatgtggtcaacaccctgatcaggcctgagggagagaagaaggcagatgtttga

SEQ ID NO: 10206 - DNA, 2952 bp, Homo sapiens; identical to SEQ ID NO: 9112
  SIMILAR (1188)..(211): 991254mologous to Homo sapiens discs large protein P- dlg,accession number U61843,Smith-Waterman Score=1674.

SEQ ID NO: 10207 - DNA, 1800 bp, Homo sapiens
  SIMILAR (424)..(1797): 931254mologous to Homo sapiens putative p150,accession number U93563,Smith-Waterman Score=2235.
atggcacgagaactacgtgacgaatgcacaagcttcagtaaccgactcgatcaactggaagaaagggtatcagtgatggaagatgaaatgaatgaaatgaagcaagatgagaagtttagagaaaaaagaggaaaaagaaatgaacaaagcctccaagaaatatgggactatatgaaaagaccaaatctatgtctgattggtgtacctgaaagtgacagggagaatggaaccaagttggaaaacactgcaggatattatccaggagaacttccccaacctagcaggcaggccaccattcaaattcaggaaatacagagaatgccacaaagatactcctcaagaagagcaactccaagatacataattgtcagattcactaaagttgaaatgaaggaaaaaatgttaagggcagctagagagaaagatgcagaaaaggcctttgacaaaattcaacagcccttcacgctaaaaactctcaataaattaggtattgatgggacgtatctcaaaataataagagctatttatgacaaacccacagccaatgtcatactgaatgggcaaaaactggaagcattccctttgaaaaccggcacaagacagggatgccctctctcaccacttctattcaacatagtgttggaagttctggccaggacaatcaggcaggagaaagaaataaagggtattcaattaggaaaagaagaagtcaaattgtccctgtttgcagatgacatgatcgtatatttagaaaaccccattgtctcagcccaaaatctccttaagctgataagcagcttcagcaaagtctcaggatacaaaatcaatgtacaaaaatcacaagcattcttacacaccaataacagacaaacagagagccaaatcatgagtgaactcccattcaaaattgctactaagagaataaaatacctaggaatccaacttacaagggatgtgaaggacctcttccaggagaactacaaaccactgctcaacgaaataaaaaaggacacaaacaaatggaagaacattccatgctcatggataggaagaatcagtattgtgaaaatggccatactgcccaaggtaatttatagattcaatgccatccccatcaagctaccaatgactttcttcacagaattggaaaaaactactttaaagttcatatggaaccaaaaaagagcctgcattgccaagacaatcctaagccaaaagaacaaagctggaggcatcaagctacatgactgcaaactatactacaaggttatagtaaccaaaacagcatggtactggtaccaaaacagagatatagaccaatggaacagaacagagccctcagaaataatgccgcttatctacaactatctgatctttgacaaacctgacaaaaacaagcaatggggaaaggattccctatttaataaatggtgctgggaaaactggctagccatatgtagaaagctgaaactggatcccttccttacaccttatacaaaaattaattcaagttggattaaagacttaaatgttagacctaaaaccataaaaactctagaagaaaacctaggcaataccattcaggacataggcatgggcaaggacttcatgtctaaaacactaaaagcaatggcaacaaaagccaaaattgacaaatgggatctaattaaactcaagagcttctgcacagcaaaagaacctaccatcagagtgaacaggcaacctacagaatgggagaaaatttttgctatctactcatctgacaaagggctaatatccagaatctacaaagaactctaa

SEQ ID NO: 10208 - DNA, 2283 bp, Homo sapiens; identical to SEQ ID NO: 7844
  SIMILAR (1)..(1605): 941254mologous to Homo sapiens unknown protein,accession number M22333,Smith-Waterman Score=2642.

SEQ ID NO: 10209 - DNA, 4729 bp, Homo sapiens; identical to SEQ ID NO: 7861
  SIMILAR (1093)..(2538): 941254mologous to Homo sapiens putative p150,accession number U93564,Smith-Waterman Score=2460.

SEQ ID NO: 10210 - DNA, 1431 bp, Homo sapiens
  SIMILAR (1)..(1428): 921254mologous to Homo sapiens putative p150,accession number U93572,Smith-Waterman Score=2282.
atgggagactttaacacccaactgtcaacattagacagatcaacaagacagaaagttaacaaggatacccaggaattgaactcagctctgcaccaagcggacctaatagacatctacagaactctccaccctgaatcaacagaatatacatttttttcagcaccacaccacacctattccaaaattgaccacatagttggaagtaaagctctcctcagcaaatgtaaaagaacagaaattataacaaactgtctctcagaccacactgcaatcaaactagaactcaggattaagaaactcactcaaaaccgctcaactacatggaaactgaacaacctgctcctgaatgactactgggtacataacaaaatgaaggcagaaataaagatgttctttgaaaccaacgagaacaaagacacaacataccagaatctctgggacactttcaaagcagtgtgtagagggaaatttatagcactaaatgcccacaagagaaagcaggaaagatccaaaattgccaccctaacatcacaattaaaagaactagaaaagcaagagcaaacacattcaaaagctagcagaaggcaagacataactaaaatcagagcagaactgaaggaaacagagacacatgaatccaggagctggttttctgaaaggatcaacaaaattgatagactgctagcaagactaataaagaaaaaaagagagaagaatcaaatagacgcaataaaaaatgataaaggggatatcaccaccgatcccacagaaatacaaactaccatcagagaatactacaaacacctctacgcaaataaactagaaaatctagaagaaatggataaattcctcaacacatacaccctcccaagactaaaccaggaagaagttgaatctctgaatagaccaataacaggctctgaaattgtggcaataatcaatagcttaccaaccaaaaagagtccaggaccagatggattcacagccgaattctaccagaggtacaaggaggaactggtaccattccttctgaagctattccaatcaatagaaaaagagggaatcctccctaattcgttttatgaggccagcatcatcctgataccaaagccgggcacaggcacaaccaaaaaagagaattttagaccaatatccttgatgaacattgatgcaaaaatcctcaataaaatactggcaaaccaaatccaacagcacatcaaaaagcttatccaccaagatcaagtgggcttcatccctgggatgaaagcctggttcaatataggcaaatcaataaatgtaatccagcatataaacagaaccaaagacaaaaaccacatgattatctcaatagatgcagaaaaggcctttgacaaaattcaacaatgcttcatgctaaaaactctcaataaattaggtattgatgggacgtaa

SEQ ID NO: 10211 - DNA, 2721 bp, Homo sapiens; identical to SEQ ID NO: 6270
  SIMILAR (1234)..(2718): 781254mologous to Homo sapiens putative p150,accession number U93574,Smith-Waterman Score=2019.

SEQ ID NO: 10212 - DNA, 1230 bp, Homo sapiens
  SIMILAR (301)..(1227): 691254mologous to Homo sapiens putative p150,accession number U93572,Smith-Waterman Score=979.
atggaagatgaaatgaatgaaatgaagcatgaagagaagtttagagggaaaagaataaaaagaaatgaacaaagcctccaagaactatgggactatgtgaaaagaccacatctacatctgattgatgtacctgaaagtgatggggagaatggaaccaagttggaaaacactttgcaggatattatccaggagaacttccccaatctagcaagacaggccaacattcaaattcaggaaatgcagagaaagccacaaagatactcctcgagaagagcaactccaagacacataattgtcagattcaccaaagttgaaatgaaggaaaaaatgttaagggcagccagagacaaaggccaggttacccacaaagggaagcccatcagactaacagctgatctcttggcagaaactctacaagccagaagagagtgggggccaatattcaacattcttaaagaaaagaattttcaacccagaatttcatatccagccaaactacgcttcacaagtgaaggagaaataaaatcctttacagacaagcaaatgctgagagattttgtcaccaccaggcctgccctaaaacagctcctgaaagaagcactaaacatggaaaggaacaaccgactgccagcaagactaataaagaagaaaagagagaagaatcaaatagacgcaacgaaaaatgataaaggggatatcaccaccgatcccacagaaatacaaactaccatcagagaatactataaacacctctatgcaaataaactagaaaatctagaagaaatggataaattcccggacacatacaccctcccaaggctaaaccaggaagaagttgaatctctgaatagaccaataacaggctctgaaattgaggcaataattaagagcttaccaaccaaaaaaaggccaggaccagatagattcacagccgaattctaccagaggtataaggaggaactggtaccattccttctgaaactattccagtcaacagaaaaagagggaatcctccctaactcattttatgaggccagcatcatcctgatagcaaagcctggcagagacacaaccaaaaaagagaattttagaccaatatccttgttgaacattgatgcaaaaatcctcaataaaatattggcaaatcgaatccagcaacacatcaaaaagcttatccaccatgatcaagtgggcttcatccctgggatgcaagggtggttcaacatatga

SEQ ID NO: 10213 - DNA, 2168 bp, Homo sapiens
  SIMILAR (979)..(2166): 881254mologous to Homo sapiens putative p150,accession number U93563,Smith-Waterman Score=1863.
atcaacaaaattgatagaccactagcaagactaataaagaagaaaagagagaagaatcaaatagatgcaataaaaaatgataaaggggatatcaccaccaatcccacagaaatacaaactaccatcagagaatattataaacacctctacgcaaataaactagaaaatctagaagaaatggataaattcctcgacacatacatcctcccaagactaaaccaggaagaagttgaacctctgaatagaccaataacaggctctgaaattgaggaaataatcaatagcttaccaaccaaaaaaactccaggaccagatggattcacagccgaattctaccagaggtacaaagaggagctggtaccaatccttctgaaactattccaatcaatagaaaaagagggaatcctccctaactcattttatgaggccagcatcatcctgataccaaagcctgacagagacacaaccaaaaaagagaatttcagaccaatatccctgatgaacatcgatgtaaaaatcctcaataaaatactggcaaaccgaatccagcagcacatcaaaaagcttatccaccatgatcaagtgggcttcatccctgggatgcaaggctggttcaacatacgcaaatcaataaatgtaatccagcatataaacagaaccaaagacaaaaaccacatgattatctcaatagatgcagaaaaggcctttgacaaaattcaacaacccttcatgctaaaaactctcaataaattaggtattgatgggacgtatctcaaaataataagagctatctatgacaaacccacagccgatatcatactgaatgggcaaaaactggaagcattctctttgaaaactggcacaagacagggatgccctctctcaccactcctattcaacatagtgttggaagttctggccagggcagtcaggcaggagaaggaaataaagggcattcgattaggaaaagaggaagtcaaattgtccctgcttgcagatgacatgattgtatatctagaaaaccccatcgtctcagccccaaatctcctcaagctgataagcaacttcagcaaaagaataaaatacctaggaatccaacttacaagggatgtgaaggacctcttcaagaagaactacaaaccactgctcaatgaaataaaagaggatacaaacaagtggaagaacattccatgctcatgggtaggaagaatcaatatcgtgaaaatggccatactgcccaaggtaatttatagattcaatgccatcccaatcaagctaccaatgactttcttcacagaattggaaaaaactactttaaagttcatatggaaccaaaaaagagcctgcatcgccaagtcaatcctaaaccaaaagaacaaagctggaggcatcatgctacctgacttcaaactatactacaaggctacaggaaccaaaacagcatggtactggtaccaaaacagagatatagatcaatggaacagaacacagccctcagaaataatgccacatatctacaactatctgatctttgacaaacctgacaaaaacaagaaatggggaaaggattccctatttaataaatggtgctgggaaaactggctagccatatgtagaaagctgaaactggatcccttccttacaccttatacaaaaattaattcaagatggattaaagacttaaacgttagccctaaaaccataaaaaccctagaagaaaacctaggcaataccattcaggacataggcatgggcaaggacgtcatgtctaaaacaccaaaagcaatggcaacaaaagccaaaattgacaaatgggatctaattaaactaaagagcttctgcacagcaaaagaaacgaccatcagagtgaacaggcaacctacagaatgggagaaaatttttgcaacctactcatctgacaaagggctaatattcagaatctacaatgaactcaaacaaatttacaagaaaaaaacaaacaacctcatcaaaaagtgggcgaagaacatgaacagacacttctcaaaagaagacatttatgcagccaaaaaacacatgaaaaaatgctcatcatcactggccatcagagaaatgcaaatcaaaaccacaatgagataccatctcacaccagttggaatggcaatcattaaaaagtcaggaaacaacag

SEQ ID NO: 10214 - DNA, 1845 bp, Homo sapiens
atgattatctcaatagatgcagaaaaggcttttgacaaaattcaacagcccttcatgctaaaaactctcaataaattaggtattgatgggacgtatctcaaaataataagagctatttatgacaaacccacagccaatatcatactgaatgggcaaaaactggaagcattccctttgaaaaccggcacaagacagggatgccctctctcaccactcctattcaacatagtgttggaaattctggccagggcaatcaggcaggagaaagaaataaagggtattcaattaggaaaagaggaagtgaaattgtccttgtttgcagatgacatgattgtatatctagaaaaccccattgtctcagcccaatatctccttaagctgataagcaacttcagcgaagtctcaggatacaaaatcaatgtgcaaaaatcacaagcattcttatacaccaataacagacaaacagagagccaaatcatgagtgaactcccattcactattgcttcaaagagaataaaatacctaggaatccaacttacaagggatgtgaaggacctcttcaaggagaactacaaaccactgctcaacgaaatacaagaggacacaaacaaatggaagaacattccaagctcatggataggaagaatcaatatcgtcaaaatggccatactgcccaaggtaatttatagattcaatgccatccccatcaagctaccaatgactttcttcacagaattgggaaaaactactttaaagttcatatggaaccaaaaaagagctcgcattgccaagacaatcccaagccaaaagaacaaagctggaggcatcatgctacctgacctcaaactatactacaaggctacagtaaccaaaacagcatggtattggtaccaaaacagagatatagatcaacggaacagaacagagccctcagaaataataccacacatctacaaccatctcatctttgacaaacctgacaaaaacaagaagtggggaaaggattccctatttaataaatggtgctgggaaaactggctagccatatgtagaaagctgaaactggatcccttccttacaccttatacaaaaattaattcaagatggattaaagacttaaatgttagacctaaaaccataaaaaccctagaagaaaacctaggcaataccattcaggacataggcatgggcaagcacttcatgtctaaaataccaaaagcaatggcaacaaaagccaaaattgacaagtgggatctaattaaactaaagagcttctgcactacaaaagaaactaccatcagagtgaacaggcaacctacagaatgggagaaaatttttgcaatctacccatctgacaaacagctaatatccagaatctacaaagaacttaaacacatttacaataaaaaaaaaaaaaaaaacaaccccatcaacaagtgggcgaaggatatgaacagacacttctcaaaagaagacatttatgcagccaacagacacatgaaaaaatgctcatcatcactggccatcagagaaatgcaaatagaaaccacaatcagataccatctcacaccagttagaatggcaatcattaaaaagtcaggaaacaacagaattgaacatggggaaatgatgagggtagcaggtcattttgaaatggaccttcgggtagtatttggggtggaaaaatcccctttctccaaccacattttggctaccccagcaacaccacccccacagaggtatcagcgctttgtgatgtccaagccaccccaggactaccattggataggggtgccccattctggccaaacaaagctgaagggtggggctcctcattacccaggg

SEQ ID NO: 10215 - DNA, 2880 bp, Homo sapiens
  SIMILAR (7)..(243): 591254mologous to Jaculus orientalis NAD-dependent glyceraldehyde 3-phosphate dehydrogenase (phosphorylating),accession number X87226,Smith-Waterman Score=216.
atggagaatgactttgacgagttgagagaagaaggcttcagacaatcaaattactctgagctacgggaggacattcaaaccaaaggcaaagaagttgaaaactttgaaaaaaatttagaagaatgtataactagaataaccaatacagagaagtgcttaaaggagctgatggagctgaaaaccaaggctcaagaactacgtgaagaatggagaagcctcaggagccgatgcgatcaactggaagaaagggtatcagcgatggaagatgaaatgaatgaaatgaagggagaagggaagtttagagaaaaaagaataaaaagaaatgagcaaagcctccaagaaatatgggattatgtgaaaagaccaaatctatgtctgattggtgtacctgaaagggatgggcagaatggaaccaagttggaaaacacgttgcaggatgttatccaggagaacttccccaatctagcaaggcaggccaacgttcagattcaggaaatacagagaacgccacaaagatactcctcgagaagagcaactccaagacacataattgtcagattcaccaaagttgaaatgaaggaaaaaatgttaagggcagccagagagaaagaaatacaaactaccatcagtgaatactacaaacacctctacacaaataaactagaaaatctagaagaaatggataaattccttgacacatacactctcccaacactaaaccaggaagaagttgaatctctgaatagaccaataacaggagctgaaattgtggcaataatcaatagcttaccaacgaaaaagagtccaggaccagatggattcacagccgaattctaccagaggtacaaggaggaactggtaccattccttctgaaactattccaatcaatagaaaaagagggaatcctccctaactcattttatgaggccagcatcattctgataccaaagtcaggcagagacacaacaaaaaaagagaattttagaccaatatccttgatgaacattgatgcaaaaatcctcaataaaatactggcaaaccgaatccagcagcacatcaaaaagcttatccaccatgatcaagtgggcttcattcctgggatgcaaggctggttcaatatacgcaaatcaataaatataatccagcatataaacagagccaaagacaaaaaccacatgattatctcaatagatgcagaaaaagcctttgacaaaattcaacaacccttcatgctaaaaactctcaataaattagctgataagcaacttcagcgaagtctcaggatacaaaatcagtgtacaaaaatcacaagcattcttatacaccaacaacagacagagagccaaatcatgagtgaactcccattcacaattgcttcaaagagaataaaatacctaggaatccaacttacaagggatgtgaaggacctcttcaaggagaactacaaaccactgctcaaggaaataaaagaggatacaaacaaatggaagaacattccatgctcatgggtaggaagaatcaatatcgtgaaaatggccatactgcccaaggcaatttacagattcaatgccatccccatcaagctaccaatgactttcttcacagaattggaaaaaactactttaaagttcatatggaaccaaaaaagagcccgcatcgccaagtcaatcctaagccaaaagaacaaagctggaggcatcacactacctgacttcaaactatactacaaggctacagtaaccaaaacagcatggtactggtaccaaaacagagatatagatcaatggaacagaacagagccctcagaaataacgccgcatatctacaactatctgatctttgacaaacctgagaaaaacaagcaatggggaaaggattccctatttaataaatggtgctgggaaaactggctagccatatgtagaaagctgaaactggatcccttccttacaccttatacaaaaatcaattcaagatggattaaagacttaaatgttggacctaacaccataaaaaccctagaagaaaacctaggcattaccattcaggacataggcacgggcaaggacttcatgtctaaaacaccaaaagcaatggcaacaaaagccaaaattgacaaacgggatctaattaaactaaacagcttctgcacagcaaaagaaactaccatcagagtgaacaggcaacctacaaaatgggagaaaattttcacaacctactcatctgacaaagggctaatatccagaatctacaatgaactcaaacaaatctacaagaaaaaaacaaacaaccccatcaaaaagtgggcgaaggacatgaacagacacttctcaaaagaacacatttatgcagccaaaaaacacatgaaaaaatgctcaccatcactggccatcagagaaatgcaaatcaaaaccacaatgagataccatctcacaccagttagaatggcaatcattaaaaagtcaggaaacaacaggtcctcaaacctggctgtccaaaaaggacgccgcaaagtcctgcagagcccccaaaagacacaagcgcggacagaaaagcatcccccgagagacagcgaagccacacaccctctccgggccagctaccagggcgggcaacttcacccctcgaagcaaacgaaagcccctgttctccaagcaaaggaaaaggggatggcaaacagaaataaacaggaaccgctctcagccttcatcttccgcgccctcccccagcaaactccaggaaacagtttctccatctgtgcgatgattgaggtgctcttcgttttttctttcattcaaaaacatactgaactaggtgatggtgaacaagatggacataaggccttcctcagtggcaaggatctcaagatcccttcttga

SEQ ID NO: 10216 - DNA, 1689 bp, Homo sapiens
  SIMILAR (1)..(1635): 891254mologous to Homo sapiens putative p150,accession number U93574,Smith-Waterman Score=2531.
atgattttctcaatagatgcagaaaaggcctttgacaaaattcaacaacccttcatgctaaaaactctcaataaattaggtattgatgggatgtatctcaaaataataagagctatgtatgacaaacccgcagccaatatcatactgaatgggcaaaaactggaagcattccctttgaaaactggcacaagacagggatgccctctctcaccactcctattcaacatagtattggaagttctggccagggcaatcaggcaggagaaggaaataaagggtattcaattaggaaaagaggaagtcaaattgtccctgtttgcagatgacatgattgtatatctagaaaaccccatcacctcagcccaaaatctccttaagctgataagcaactacagcaaagtctcaggatacaaaatcaatgtgcaaaaatcacaagcattcttatacaccaataacagacaaacagagagccaaatcatgagtgaacttccattcacaattgcttcaaagagaataaaatacctaggaatccaacttacaagggatgtgaaggacctcttcaaggagaactataaaccactgctcaataaaataaaagaggatacaaacaaatggaagaacattccatgctcatgggtaggaagaatcaatatcgtgaaaatggccatactgcccaaggtaatttatacattcagtgccatccccatcaagctaccaatgactttcttcacagaattggaaaaaactacttcaaagttcatatggaaccaaaaaagagcccgcatcgccaagtcaatcctaagccaaaagaacaaagctggaggcatcacactacctgacttcaaactatactacaaggctacagtaaccaaaacagcatggtactggtatcaaaacagagatatagaccaatggaacagaacagagccctcagaaataatgccacacatctacaactatctgatatttgacaaacctgacaaaaacaagcaatggggaaaggattccctatttaataaatggtgctgggaaaactggctagacatatggagaaagctgaaactggatcccttccttacaccttatacaaaaattaattcaagatcgattaaagacttacatgttagacctaaaaccataaaaaccctagaagaaaacctaggcgataccattcaggacataggcatgggcaaggacttcatgtctaaaacatcaaaagcaatggcaacaaaagccaaaattgacaaatgggatctaattcaactcaagagcttctgcacagcaaaagaaactaccatcagagtgaacaggcaacctacagaatgggagaaaatttttgcaatctactcatctgataaaggactaatattcagaatctacaaagaactcaaacaaatttacaagaaaaaaacaaacagccccatcaaaaagtgggtgaaggatatgaacagacacttctcaaaagaagccatttatgcagccaaaagacacatgaaaaaatgctcatcatcactggccatcagagaaatgcaaatcaaaaccacactctcgttgccagctcaagtgtctgtggtggtcatgggctttccttctgctgggattccagaggcctgtggcaagagcgggctgttccttgcctattcaattaacccattccctcagagtcactgggaccaggaacaagtcatg

SEQ ID NO: 10217 - DNA, 2145 bp, Homo sapiens
  SIMILAR (1)..(1548): 941254mologous to Homo sapiens putative p150,accession number U93564,Smith-Waterman Score=2541.
atgctaaaaactctcaataaattacgtattgatgggacgtatctcaaaataataagagctatctatgacaaatccacagccaatatcatgctgaatgggcaaaaactggaagcattccctttgaaaactggcacaagacagggatgccctctctcaacactcctattcaacatagtgttggaagttctggccagggcaattaggcaggagaaggaaataaagggtattcagttaggaaaagaggaagtcaaattgtccctgtttgcagatgacatgattgtatatctagaaaaccccattgtctcagcccaaaatctccttaagctgataggcaacttcagcaaagtctcaggatacaaaatcaatgtacaaaaatcacaagcattcttatacaccaataacagacaaacagagagccaaatcatgagtgaactcccattcacaattgcttcaaagagaataaaatacctaggaatccaccttataagggacgtgaaggacctcttcaaggagaactacaaaccactcctcaatgaaataaaagaggatacaaacaaatggaagaacattccatgctcatgtataggaagaatcaatatcgtgaaaatggccatactgcccaaggtaatttatagattcaatgccatccccatcaagctaccaatgactttcttcacagaattagaaaaaactactttaaagttcatatggaaccaaaaaagagcccgcatcgccaagtcagtcctaagccaaaagaacaaagctggaggcatcacgctacctgacttcaaactatactacaaggctacagtaaccaaaacagcacggtactggtaccaaaacagagatatagatcaatggaacagaacagagccctcagaaataatgccgcatatctacaaatatctgatctttgacaaacttgagaaaaacaagaaatggggaaaggattccctatttaatcaatggtgctgggaaaactggctagccatatgtagaaagctgaaactggatcccttccttacaccctatacaacaatcaattcaagatggattaaagacttaaacgttagatctaaaaccataaaaaccctagaagaaaacctacgcattgccattcaggacactggcatgggcaaggacttcatgtctaaaacaccaaaagcaatggcaacaaaagccaaaattgacaaatgggatctaattaaactaaagagcttctgcacagcaaaagaaactaccatcagagtgaacaggcaacccacaaaatgggagaaaattttcgcaacctactcatctgacaaagggctaatatccagaatctacaatgaactcaaacaaatttacaagaaaaaaacaaacaaccccatcaaaaagtgggcgaaggacatgaacagacacttctcaaaagaagacatttatgcagccaaaaaacacatgaaaaaatgctcaccatcactggccatcagagaaatgcaaatcaaaaccacaatgagatatcatctcacaccagttagaatggcgatcattaaaaagtcaggaaacaacagtacgtttgactttggacaacatgagtttgaactacacaggtccacttatacgcggattgttttcagtaaaattacaccaatattggaagttctggccagggcaattaggcaggagaaggaaataaagggtattcaattaggaaaagaggaagtcaaattgtccctgtttgcagatgacatgattgtatatctagaaaaccccattgtctcagcccaaaatctcctcaagctgataggcaacttcagcaaagtctcaggatacaaaatcaatgtacaaaaatcacaagcattcttatacaccaataacagacaaacagagagccaaatcatgagtgaactcccattcacaattgcttcaaagagaataaaatacctaggaatccaacttacaagggacgtgaaggacctcttcaaggagaactacaaaccactgctcaatgaaataaaagaggatacaaacaaatggaagaacattccatgctcatgggtaggaagaatcaatattgtgaaaatggccatactgcccaaggtaatttatagattcaatgccatccccatcaagctacccatgactttcttcacagaattggaataa

SEQ ID NO: 10218 - DNA, 1816 bp, Homo sapiens
  SIMILAR (1)..(1575): 931254mologous to Homo sapiens putative p150,accession number U93564,Smith-Waterman Score=2567.
atgattatctcaatagatgcagaaaaggcctttgacaaaattcaacaacgcttcatgctaaaaactctcaataaattaggtattgatgggctgtatctcaaaataataagagctatctatgacaaacccacagccaatatcatactgaatgggcaaaaactggaagcactccctttgaaaactggcacaagacagggatgccctctctcaccactccaattcaacatagtgttggaagttctggccagggcaattaggcaggagaaggaaataaagggtattcaattaggaaaagaggaagtcaaattgtccctgcttgcagacgacatgattgtatatctagaaaaccccatcgtctcagcccaaaatctccttaaggtgataagcaacttcagcaaagtctcaggatacaaaatcaatgtacaaaaatcacaagcattcttatacaccaataacagacaaacagagagccaaatcatgagtgaactcccattcacaattgcttcaaagagaataaaatacctaggaatccaacttacaagggatgtgaaggacctcttcaaggagaactacaaaccactgctcaatgaaataaaagaggatacaaagaaatggaagaacattccatgctcatgggtaggaagaatcaatatcgtgaaaatggccatactgcccaaggtaatttatagattcaatgccatccccatcaagctaccaatgactttcttcacagaactggaaaaaactaccttaaagttcatatggtaccaaaaaagagcccgcatcaccaagtcaatcctaagccaaaggaacaaagctggagacatcacgctacctgacttcaaactatactacaaggctacagtaaacaaaacagcatggtactggcaccaaaacagacatatagatcaatggaacagaacaaagccctcagaaataacgctgcatatctacaactatctgttctttgacaaccctgacaaaaacaagaaatggggaaaggattccctatttaataaatggtgctgggaaaactggctagccatatgtagaaagctgaaactggatcccttccttacaccttatacaaaaattaattcaagatggattaaagacttaaacattagacctaaaaccataaaaaccctagaagaaaacctaggcattaccattcaggacataggcatgggcaagtacttcatgactaaaacaccaaaagcaatggcaacaaaagccaaaattgacaaatgggatctaattaaactaaagagcttctgcacaggcaaagaaactaccatcagagtgaacaggcaacctacaaaatgggagaaaattttcgcaacctactcatctgacaaagggctaatatccagaatctacaatgaactcaaacaaatttacaagaaaaaaacaaacaaccccatcaaaaagtgggcgaaggacatgaacagacacttctcaaaagaagacatttatgcagccaaaaaacacatgaaaaaatgctcaccatcactggccatcagagaaatgcaaatcaaaaccacaatgagataccatctcacaccaacccacttattgtcattggaattgaagaatgtctcagaggaaaagaaaaacttgaaacattatactattggaattcagacacggaccaccaggtctgatggctggggtggccgtaatggaagtcagaccacaaaaaggagcaacccagcttctgagagaacatttcagctaaagcataagttgatagatgtcacaatccaagttcttttagatttccacgcaggaacttcagagttggtgacaagaattg

SEQ ID NO: 10219 - DNA, 2079 bp, Homo sapiens
  SIMILAR (307)..(1779): 801254mologous to Mus musculus ubiquitin specific protease,accession number AF229643,Smith-Waterman Score=2216.
atggataaattcctcaacacatacaccatcccaagactaaaccaggaagaagttgaatctctgaatagatcaataacaggctctgaaattgaggcaataattaataacttaccaaccaaaagaagtccaggaccagatggattcacacctgaattctaccagaggtacaaggaggagctggtaccattccttctgaaactattccaatcaatagtaaaagagggattcctccctaactcattttatgagggcagcatcatcctgataacaaagtctggcagagacacaacaaaaaaagagaatttaagaccaatatccctgatgaacatcaatgcaaaaatcctcaataaaatactggcaaaccaaatccagcagcacatcaaaaagcttatccaccatgaacaagtggacttcatccctgggatgcaaggctggttcaacatacgcaaatcaataaatgtaatccagcatataaacagaaccaacgacaaaaaccacatgattatctcaatagatgcagaaaaggcctttgacaaaattcaacaactcttcatgctaaaaactctcaataaattaggtattgatgggacgtatctcaaaataataagagctatctatgacaaacacacagccaatatcatactgaatgggcaaaaactggaagcattccctttgaaaactggcacaagacagggatgccctctctcaccactcctattcaacatagtgttggaagttctggccagggcaatcagtcaggagaaggaaataaagggtattcaattaggaaaagaggaagtcaaattgtccctgtttgcagatgacatgattgtatatctagaaaaccccatcgtctcagcccaaaatctccttaagctgataggcaacttcagcaaagtctcaggatacaaaatcagtgtgcaaaaatcacaagcattcttatacaccaataagagacaaacagagagccaaatcatgagtgaactcccattcacaattgtttcaaagagaataaaatacctaggaatccaacttacaagggatgtgaaggacctcttcaaggagaactacaaaccactgctcaatgaaatacaagacgagacaaacaaatggaagaacatgctcatgggtaggaagaatcaatatcgtgaaaatggtcatactgcccaagaattggaaaaaactactttaaagttcatatggaaccaaaaaagagcccgcattgccaagacaatcctaagccaaaagaacaaagctggaggcatcacgctacctgacttcgaactacactacaaggctacagtaaccaaaacagcatgctacttgtaccaaaacagagatatagaccaaaggaacagaacagagccctcagaaataatgccgcatatctacaactatctgatctttgacaaatctgacaaaaacaagaaatggggaaaggattccctatttaataaatggtgctgggaaaactggctagccatatgtagaaagctgaaactggatcccttccttccaccttatacaaaaattaattcaagatggattaaagacttaaatgttagacctaaaaccataaaaactctagaagaaaacctaggcaataccattcaggacataggcatgggcaaggacttcatgtctaaaacaccaaaagcaatgtcaacaaaagccaaaattgacaaatgggatctaattaaactaaagagcttctgcacagcaaaagaaactgccatcagagtgaacagggaacctacagaatgggagaaaatttttgcaatctactcatctgacaaagggctaatatccagaatctacaatgaattcaaacaaatttacaagaaaaaaacaaacaaccccatcaaaaagtgggcaaaggatatgaacagacacttctcaaaagaagacatttatgcagccaacagacacatgaaaaaatgctcatcatcactggccatcagagaaatgcaaatcaaaaccacacaggttggaggcagtgaggaaaaaagtgccagtgaacttggaaataagttaatagaattggaccaatctgaagaatggagaggaaaagaagactga

SEQ ID NO: 10220 - DNA, 2685 bp, Homo sapiens; identical to SEQ ID NO: 7862
  SIMILAR (103)..(1452): 871254mologous to Homo sapiens putative p150,accession number U93564,Smith-Waterman Score=2055.

SEQ ID NO: 10221 - DNA, 1996 bp, Homo sapiens
  SIMILAR (2)..(1603): 981254mologous to Homo sapiens putative p150,accession number U93564,Smith-Waterman Score=2788.
atgattatctcaatagatgcagaaaaggcctttgacaaaattcaacaactcttcatgctaaaaactctcaataaattaggtattgatgggacatatctcaaaataataagagctatctatgacaaacccacagccaatatcatactgaatgggcaaaaactggaagcattccctttgaaaactggcacaagacagggatgtcctctctcaccactcctattcaacatagtgttggaagttctggccagggcaatcaggcaggagaaggaaataaagggcattcaattaggaaaagaggaagtcaaattgtccctgtttgcagatgacatgattgtctatctagaaaaccccattgtctcagcccaaaatctccttaagctgataagcaacctcagcaaagtctcaggatacaaaatcaacttgcaaaaatcacaagcattcttatacaccaataacagacaaacagagagccaaatcatgagtgaactcccattcacaattgcttcaaagagaataaaatacctaggaatccaacttacaagggatgcgacagatctcttcaaggagaactacaaaccactgctcaatgaaataaaagaggatacaaacaaatggaagaacattccatgctcatgggtaggaagaatcaatatcgtgaaaatggccatacttcccaaggtaatttatagattcaatgccatccccatcaagctaccaatgacttccttcacagaattggaaaaaactactttaaacttcttatggaaccataaaagagcccacactgccaagtcaatcctaagccaaaagaacaaaactggaggcatcatgctacctgacttcaaactatactacaaggctagagtaaccaaaacagcatggtactggtaccaaaacagagatgtagaccaatggaacagaacagagccctcagaaataatgctgcatatctacaactatctgatctttgacaaacctgagaaaaacaagcaatggggaaaggattccctatttaataaatggtgctgggaaaactggctagccatatgtagaaagctgaaactggatcccttccttacaccttatacaaaaattaattcaagatggattaaagacttaaatgttagacctaaaaccataaaaaccctagaagaaaacctaggcaataccattcaggacataggcatgggcaaggacttcatgtctaaaacaccaaaagcaatggcaacaaaaaccaaaattgacaaatgggatctaattcaactaaagagcttcttctgcacagcaaaagaaactaccatcagagtgaacaggcaacctacagaatgggagaaaatttttgcaacctactcatctgacaaagggctaatatctagaatctacaatgaactcaaacaaatttacaagaaaaaaacaaacaaccccatcaaaaagtggacaaacgatatgaacagacacttctcaaaagaagacatttatgcagccaaaaaacacatgaaaaaatgctcatcattaccggccatcagagaaatgcaaatcaaaaccacaatgagataccatctcacaccagttagaatcgcgatcattaaaaagtcaggaaacaacagcaaagtggatgatatccatgctatctgtagccttcttaaagactttcttcgaaacttcaaagaacctcttctgacctttcgcctaaacaaagcctttatggaagcagcagaaatcacagatgaagacaacagcatatctgccatgtaccaggctgttggtgaactgccccaggccaacagggacacattggttttcctcatgattcacttgcagagagtggctcagagtccatatactaaaatgaatgttgccaatctggctgaagtctttggctctacaatagtggcccatgctgtgcccaatccagaaccagtgacgatgttacaggacatcaagtgtcaacccaaggtggtcgagcgcctgccttccttgcccctggagtactgga

SEQ ID NO: 10222 - DNA, 1816 bp, Homo sapiens
  SIMILAR (700)..(1794): 931254mologous to Homo sapiens putative p150,accession number U93572,Smith-Waterman Score=1835.
atgattatctcaatagatgcagaaaaagcctttgacaaaattcaacaacccttcatgctaaaaactctcaataaattaggtattgatgggacatatctcaaaataataagagctatctatgacaaacccacagcaaatatcataccgaatgggcaaaaactggaagcattccctttgaaaactggcacaacacagggatgccctttctcaccactcctattcaacatagtgttggaagttctggccagggtaatcaggcaggagaaggaaataaagggtactcaattaggaaaagaggaagtcacattgtccctgtttgcagatgacatgattgtatatctacaaaaccccattgtctcagcccaaaatctccttaagctgataggcaacttcagcaaagtctcaggatacaaaatcaatgtgcaaaaatcacaagcattcttatacaccaataacagacaaacagagagccaaatcatgagtgaactcccattcacaattgcttcaaagagaataaaatacctaggaatccaacttacaagggacgtgaaggacctcttcaaggagaactacaaaccactgctcaaggagataaaagaggatacaaacaaatggaagaacattccatgctcatgggtaggaagaatcaatatcgtgaaaatggccatactgcccaaggtaatttatcgattcaatgccatccccatcaagctaccaatgactttcttcacagaattggaaaaaactactttaaagttcaaatggaaccaaaaaagagcctgcattgccaagtcaatcctaagccaaaagaacaaagctggaggcatcatgctacccgacttcaaactatactacaaggctacagtaatcaaaacagcatggtactggtaccaaaacagagatatagaccaatggaacagaacagagccctcagaaataatgccgcatatctacaactatctgatcttcgacaaacctgaccaaaacaagcaatggggaaaggattccctatttaataaatggtactgggaaaactgcctagccatatgtagaaagctgaaactagatcccttccttacaccttatacaaaaattaattcaagatggattaaagacttaaatgttagacttaaaaccataaaagccctagaagaaaacctaggcaataccattcaggacataggcatgggcaaggacttcatgtctaaaacaccaaaagcaatggcaacaaaagacaaaattgacaaatgggatctaattaaaccaaagagcttctgcacagcaaaagaaactaccatcagagtgaacaggcaacctacaaaatgggagaaaattttcgcaacctactcatctgacaaagggctaatatccagaaactacaatgaactcaaacaaatttacaagaaaaaaacaatcggccccatcaaaaagtgggcagaggatatgaacaggcacttctcaaaagaagacacttatgcagccaaaaaacacatgaaaaaatgctcatcatcactggccatcagagaaatgcaaatcaaaaccacaatgagataccatctcacaccagttagaatggtgatcattaaaaagtcaggaaacaacaggtgctggagaggatgtggagaaacaggaacactttcacactgttggtgggactgtaaactaatcaaccattgtggaatttttgagagattaaggaccgaagactggtggggactcataaatgatacaagtaaagtattagccacaacagaagaaaaaggggtgcccaaacgcataatcttgaaatttgatgtctgtgctgtcattaatagca

SEQ ID NO: 10223 - DNA, 2876 bp, Homo sapiens
  SIMILAR (226)..(2022): 751254mologous to Homo sapiens putative p150,accession number U93563,Smith-Waterman Score=2197.
acccaataaaaaatgataaaggggatatcaccactgatcccacagaaatacaaactaccatcagagaatactataaacacctctatgcaaataaactagaaaatctagaagaaatggataaattcctcgacacatacaccctcccaagactaaaccaggaagaagttgaatctctgaatagaccaataacaggctctgaaattgaggcaataattaatagcttaccaaccaaaaaaagtccaggaccagatggattcacatccgaattctaccagaggtacaaggagacagtggtttgccggctttcgccgccaagttttaatggggggctccctttagggtccgatttagtgttttacgcccctggaccccaaaaaattatttgggtgatggttcacgtaggggccctcgccctgaaagacggtttttcgcccttggacgttggagtccacggattttgccgatttcggaaccaccatcaaacaggattttcgcctgctggggcaaaccagcgtgacccgcttgctgcaactctctcagggccaggcggtgaagggcaatcagctgttgcccgtctcactggtgaaaagaaaaaccaccctggcgcccaatacgcaaaccgcctctccccgcgcgttggccgattcattaatgcagctggcacgacaggtttcccgactggaaagcgggcagtgagcgcaacgcaattaatggtaaaggacgatgtcacttatgcaataaagctctcttgctggccggggcttgacattattccttcctgtctggctctgcaccgcattgaaactgagttaatgggcaaatttgataaaggtagactgcccacccatccacacttgatgctccgactggccattgaaactgttgctcatgactatgatgtcatagttattgacagcgcgcctaacttgggtatcggcacgattaatgtcgtatgtgctgcagatgtgctgattgttcccacgcctgctgagttgcttgactacacctccgcactgcagtttttcgatatgcttcgtgatctgctcaagaacgttgatcttaaagggttcgagcctgatgtacgtattttgcttaccaaatacagcaatagtaatggctctcagtccccgtggatggaggagcaaattcggcaggcctggggaagcatggttctaaaaaatgttgaattttgccgatttcggaccccccatcaaccaggattttcgcctgctggggcaaaccagcgtggaccgcttgctgcaactctctcagggccagccggtgaagggcaatcagctgttgcccgtctcactggtgaaaagaaaaaccaccctggcgcccaatacgcaaaccgcctctccccgcgcgttggccgattcattaatgcagctggcacgacaggtttcccgactggaaagcgggcaggaattcgggaaatatctgacttaatgatcattggcgagacagtaatcacaagatcccccacaggcactaggtcgcccgtgggtcaattccttgcagtttggggagggaaattaccctctccagcttttggaagcgggagtagggattttgccgatttcggaaccaccatcaaacaggattttcgcctgctggggcaaaccagcgtggaccgcttgctgcaactctctcagggccaggcggtgaagggcaatcagctgttgcccgtctcactggtgaaaagaaaaaccaccctggcgcccaatacgcaaaccgcctctccccgcgcgttggccgattcattaatgcagctggcacgacaggtttcccgactggaaagcgggcaggcgtggtctttatgtacacccattatgtggttttatcctcgtgcattttctcgtctgcgtcaactaactaggtattctagctcggggggtgtcgcggggtgtcactcgggcaaaccgagtcgcaagctttcgacactcgggttcgcgtcgctggtacaacattcaaccctatctcgggctactcttttgatttataagggattttgccgatttcggaacccccatcaaacaggattttcgcctgctggggcaaaccagcgtggaccgcttgctgcaactctctcagggccaggcggtgaagggcaatcagctgttgcccgtctcactggtgaaaagaaaaaccaccctggcgcccaatacgcaaaccgcctctctccgcgcgttggccgattcattaatgcagctggcacgacaggttttccgactggaaagcgggcagtgagcgcaacgcaattaatggattttgccgatttcggaaccaccatcaaacaggattttcgcctgctggggcaaaccagcgtggaccgcttgctgcaactctctcagggccaggcggtgaagggcaatcagctgttgcccgtctcactggtgaaaagaaaaaccaccctggcgcccaatacgcaaaccgcctctccccgcgcgttggccgattcattaatgcagctggcacgacaggtttcccgactggaaagcgggcaggattttgccgatttcggaaccaccatcaaacaggattttcgcctgctggggcaaaccagcgtggaccgcttgctgcaactctctcagggccaggcggtgaagggcaatcagctgttgcccgtctcactggtgaaaagaaaaaccaccctggcgcccaatacgcaaaccgcctctccccgcgcgttggccgattcattaatgcagctggcacgacaggtttcccgactggaaagcgggcagttggcgggctttccccgtcaagctcttaatcgggggctccctttagggttccgatttagtgctttacggcacttggaccccaaaaaacttgatttgggtgatggttcacgtagtgggccatcgccctga

SEQ ID NO: 10224 - DNA, 1935 bp, Homo sapiens
  SIMILAR (1)..(1095): 941254mologous to Homo sapiens putative p150,accession number U93564,Smith-Waterman Score=1849.
atgattatcccaatagatgcagaaaaggcctttgacaaaattcaacagcccttcatgctaaaaactctcaataaattaggtattcatgggatgtatctcaaaatcataagagctatttatgacaaacccacagccaatatcatattgaatgggcaaaaactggaagcattccctttgaaaactggcacaagacagggatgccctctcccaccactcctattcaacatagtgttggaaattctggccagggcaatcaggcaggagaaagaaataaagggtattcaattaggaaaagaggaagtcaaattgtccctgtttgcagatgacatgattatatatttagaaaaccccattgtctcagcccaaaatctccttaagctgataagcaacttcagcaaagtctcaggatacaaaatcaatgtgcaaaaatcacaagcattcttatacaccaataacagacaaacagagagccaaatcctgagtgaactcccattcacaattgcttcaaagagaataaaatacttaggaattcaacttacaagggatgtgaaggacctcttcaaggagaactacaaaccactgctcaacgagataaaagaggacacaaacaaatggaagaacattccatgcttatcgataggaaaaatcaatatcatgaaaatggccatactgcccaaagtaatttatagattcaatgccatccccatcaagctaccaatgactttcttcacagaattggaaaaaactactttaaagttcatatggaaccaaaaaagagcccgcattgccaagacaatcctaagccaaaagaacaaagatggaggcatcacactacctgacttcaaactatactacaaggctacagtaaccaaaacagcatggtaccagtaccaaaacagagatatagaccaatggaacagaacagagccctcagaaataataccacacgtctacaaccatctgatctttgacaaacctgacaaaaacaagaaatggggaaaggattccctatttaataaatggtgctgggaaaactggctagccatatgtggaaagctgaaactggatccgttccttacaccttatacaaaaattaattcaagatggattaaagacttaaatgttagacctaaaaccataaaaaccctagaagaaaacctaggcaataccattcaggacataggcatgggcaaggacttcatgtctaaaataccaaaagcaatggcaacaaaagccaaaattgacaaatggaatctaattgaactaaagagcttctgcacagcaaaagaaactaccatcagtgtgaacaggcaacctacagaatgggagaaaatttttgcaatctgcttatctgacaaagggctaatatccagaatctacaaagaactcaaacaaagacacaagaaaaaaacaaacaaccccatcaaaaagtgggcgaaggatatgaacagacacttctcaaaagaagacatttatgcagccaacagacacatgaaaaaatgctcatcatcactggccatcagagaaatgccaatcaaaaccacaatgagataccatctcacaccagttagaatggcgatcattaaaaagtcaggaaacaacagatgctggagaggatgtggagaaataggaacgctttcacactgttggtgggactgtaacctagttcaaccattgtggaaggcagtgtggcgattccttaaggatctagaactagaaataccatttgacccagccatctcattactgggttatacccaaaggattataaatcatgctgctataaagacacatgcacacaaagcactttcacatgcagacaacatcttccgctataattgcttcattgaccatctcttagaacttgccaatcaatcttccaaactgccacctctgtccctcaacagacaatgtgagaatatagatattttctga

SEQ ID NO: 10225 - DNA, 2046 bp, Homo sapiens
  SIMILAR (109)..(1677): 931254mologous to Homo sapiens putative p150,accession number U93563,Smith-Waterman Score=2516.
atggagaaattcctcgacacatacactctccgaaggctaaaccaggaagaagttgaatctctgaatagaccaataacaggatctgaaattgtggcaataatcaatagcttaccaaccaaaaagaatccaggaccagatggattcacagccgaattctaccagagagctatctatgacaaacccacagccagtatcatactgaatgggcaaaaactggaagcattccctttgaaaactggcacaagacagggatgccctctctcaccactcctattcaacatagtgttggaagttctggccagggcaattaggcaggagaaggaaataaagggtattcaattaggaaaagaggaagtcaaattgtccctgtttgcagacgacatgattgtatatctagaaaaccccactgtctcagcccaaaatctccttaagctgataagcaacttcagcaaagtctcaggatacaaaatcaatgtgcaaaaatcacaagcattcttatacaccaataatagacaaacagagagccaaatcatgagtgaactcccattcacaattgcttcaaagagaataaaatacttaggaatccaacttacaagggacgtgaaggacctcttcaaggagaactacaaaccactgctcaaggaaataaaagaggatacaaacaaatggaagaacattccatgctcatgggtaggaagaatcaatattgtgaaaatggccatactgcccaaggtaatgtatagattcaatgccatccccatcaagctaccagtgactttctgcacagaattggaaaaaactactttaaagttcatatggaaccaaaaaagagcccgcatcaccaagtcaatcctaagccaaaagaacaaagctggaggcatcacgctacctgacttcaaactatactacaaggctacagtaaccaaaacagcatggtactggtaccaaaacagagatatagatcaatggaacagaacagagccctcagaaataacgccgcatatgtacaactatctgatctttgacaaacctgagaaaaacaagcaatggggaaaggattccctatttaataaatggtgctgggaaaactggctagccatatgtagaaagctgaaactggatcccttccttacacattatacaaaaattaattcaagttggattaaagacttaaacgttagacctaaacccataaaaaccctagaagaaaacctaggcattaccattcaggacataggcatgggcaaggatttcatgtctaaaacaccaaaagcaatggcaacaaaagccaacattgacaaatgggatctaattaaactaaagagcttctgcacagcaaaagaaactaccatcagagtgaaaaggcaacttacaaaatgggagaaaattttcgcaacctactcatctgacaaagggctaatatccagaatctacaatgaactcaaacagatttacaagaaaaaaacaaacaaccccatcaaaaagtgggcaaaggatatgaacagacacttctcaaaagaagacatttatgcagccaaaagacacatgaaaaaatgctcatcatcactggccatcagagaaatgcaaatcaaaaccacaatgagataccatctcacaccagttagaatggcaatcattaaaaagtcaggaaataacagaccggccttaggacctggcgcagcacggaatgaggcttcgaggccggctaggggaggccgtcgctcatatccgacgtcaccagttcgcgccggcgatagacgaggacgccaacagcagcggagaaacgtttctctttcctctcagtttgcgcacaccatggcggcccctgcccagcagactactcagcctggcggcgggaagcgcaaaggcaaggctcagtatgtgctggccaagcgcgctcggcgctgcgacgctggcgggccccgtcagctagagcccgggctacagggcatcctcatcacctgcaatatgaacgagcgcaagtgcgtggaggaggcctacagcctcctcaacgaatacggcgacgacatgtatgggccagaaaag

SEQ ID NO: 10226 - DNA, 1700 bp, Homo sapiens
  SIMILAR (583)..(1149): 931254mologous to Homo sapiens putative p150,accession number U93565,Smith-Waterman Score=955.
atggaagatgaaatgaatgaaatgaagcaagaagggaagtttagagaaaaaagaataaaaagaaacgaacaaagcctccaagaaatatgggactatgtgaaaagaccaaatctgcgtctgattggtgtacctgaaagtgacggggagaatggaaccaagttggaaaacactctgcaggatattatccaggagaacttccccaatctagcaaggcagaccaacattcagattcaggaaatacaaagaatgccacaaagatactcctcgagaagagcaactccaagacacataattgtcagattcaccaaagttgaaatgaaggaaaaaatgtcaagggcagccagagagaaagaaatacaaactaccatcagagaatactacaaacacctctacgcaaataaactagaaaatctagaagaaatggataaattcctcgacacatgcactctcccaagactaaaccaggaagaagttgaatctctgaatagaacagtaacaggatctgaaattgtggcaataatcaatagcttaccaaccaaaaagagtccaggaccagatggattcacagccgaattctaccagagacaatcagagagccaaatcatgagtgaattcccattcacaattgcttcaaagagaataaaatacctaggaatccaacttacaagggatgtgaaggatctcttcaaggagaactacaaaccactgctcaatgaaattaaagaggatacaaagaaatggaagaacattccatgctcatgggtaggaagaatcaatatcgtgaaaatggccatactgcccaaggtaatttatacattcaatgccatccccatcaagctaccaatgactttcttcacagaattggaaaaaactactttcaagttcatatggaatcaaaaaagagcccacgtcgccaagtcaatcctaagccaaaagaacaaagctggaggcatcacgctacctgacttcaaactatactacaaggctacagtaaccaaaacagcatggtactggtaccaaaacagagatatagatcaatggaacagaacagagccctcagaaataatgctgcatatctacagctatctgatctttgacaaacctgagaaaaacaagcaatggggaaaggattccctatttaataaatgggtgctgggaaaactgggctagccatatgtagaaagctgaaactggatcccttccttacaccttatacaaaaattaattcaagatggattaaagacttaaacattagacctaaaaccatagaaaccctagaagaaaacctaggcattaccattcaggacataggcatgggcaaggacttcatgtctaaaacatcaaaagcaatgtcaacaaaagccaaaattgacaaatgggatctaattaaactaaagagcttctgcacagcaaaagaaactaccatcaaagtgaacaggcaacctacaaaatgggagaaaattttcgcaacctactcatctgacaaagggctaatatccagaatctacaatgaactcaaacaaatttacaagaaaaaaaacaaacaaccccatcaaaaagtgggtgaaggatatgaacagacacttctcaaaagaagacatctatgcagccaaaagacacatgaaaaaatgctcatcatcactggccatcagagaaatgcaaatcaaaaccacaatgagataccatctcacaccagttag

SEQ ID NO: 10227 - DNA, 3213 bp, Homo sapiens; identical to SEQ ID NO: 2322
  SIMILAR (1)..(1821): 851254mologous to Homo sapiens putative p150,accession number U93563,Smith-Waterman Score=2589.

SEQ ID NO: 10228 - DNA, 2022 bp, Homo sapiens; identical to SEQ ID NO: 9105
  SIMILAR (280)..(1863): 921254mologous to Homo sapiens putative p150,accession number U93572,Smith-Waterman Score=2547.

SEQ ID NO: 10229 - DNA, 3147 bp, Homo sapiens
  SIMILAR (1198)..(2865): 891254mologous to Homo sapiens putative p150,accession number U93563,Smith-Waterman Score=2651.
atgggagactttaacaccccactgtcaacattagacagatcatcgagacagaaagttaacaaggatacccaggaattgaactcaactctgcaccatgcggacctaatagacatctacagaactctccacccgaaatcaactgaatatacatttttttcagcaccacaccacacctattccaaaattgaccacgtagttggaagtaaagctctcctcagcaaatgtaaaagaacagaaattataacaaactgtctctcagaccacagtgctatcaaaccagaactcaggattaagaaactcactcaaaaccgctcaactacatggaaactgaataacctgctcctgaatgactactgggtgcataacaaaatgaaggcagaaataaagatgttctttgaaaccaacgagaacaaagacacaacataccagaatctctgggacacattcaaagcagtgagtagagggaaatttatagcactaaatgcccacaagagaaagcagaaaagatgcaaaattgacaccctagcatcacaattaaaagaagtagaaaagcaagagcaaacacattcaaaagctagcagaaggcaagaaataactaaaataagagcagaactgaaggaaatagagacacaaaaaacccttcaaaaaattaatgaatccaggagctggtttcttgaaaggatcaacaaaattgatagaccactagcaagactaataaagaagaaaagagagaagaatcaaatagatgtaataaaaaatgataaaggggatatcaccactgatcccacagaaatacaaactaccatcagagaatactacaaacacctctacgcaaataaactagaaaatctagaagaactggataaattcctcgacacacacaccctccaaagactaaaccaggaagaagttgaatccctgaatagaccaataacaggctctgaaattgtggcaataatcaatagcttaccaaccaaaaagagtccaggaccagatggatccacagccgaattctaccagaggtacaaggaggagctgttaccattccttcttaaattattccaatcaatagaaaaagagggaatcctccctaactcattttatgaggccagcatcatcctgataccaaagccgggcagagacacagccaaaaaagagaattttagaccaatatccttgatgaacattgatgcaaaaatcctcaataaaatactggcaaaccaaatccagcagcacatcaaaaagcttatatacaccatgatcaagtgggcttcatccctgggatgcaaggctgtgttggaagttctggccagggcaattaggcaggagaaggaaataaagggtattcaattaggaaaagaggaagtcaaattgtccctgtttgcagatgacatgattgtatatctagaaaaccccatcgtctcagcccaaaatctccttaagctgataagcaacttcagtaaagtctcaggatacaaaatcaatgtacaaaaatcacaagcattcttatacaccaataacagacaaacagagagccaaatcatgagtgaaatcccattcacaattgtttcaaagagaataaaatacctaggaatccaacttacaagggacatgaaggacctcttcaaggagaactacaaaccactgctcaatgaaataaaagaggatacaaacaaatggaagaacattccatgctcatggctaggaagaatcaatatggtgaaaatggccatactgcccaaggtaatttatagattcaatgccatcctcatcaagctagcaatgactttcttcacagaatcggaaaaaactactttaaagttcatatggaaccaaaaaagagcctgcatcgccaagtcaatcctaagccaaaagaacaaagtcataggcatcacgctacctgacttcaaactatactacaaggctatagtcaacaaaacagcatggtactggtaccaaaacagagatatagatcaatggaacagaacagagccctcagaaataacaccgcatatctacaactatctgatctttgacaaacctgagaaaaacaagcaatggggaaaggattccctatttaataaatggtgctgggaaaactggctagccatatgtagaaagctgaaactggatcccttccttacaccttatacaaaaattaattcaagatggattaaagacttccatgttagacctaaaaccataaaaaccctagaagaaaacctaggcattaccattcaggacataggcatggacaaggacttcatgtctaaaacaccaaaagcaatggcaacaaaagccaaaattgacaaatgggatctaatcaaactaaagagcttctgcagagcaaaagaaactaccatcagagtgaacaggccacctacagaatgggagaaaattttcgtaacctactcatctgacaaagggctaatatccagaatctacaatgaactcaaacaaatttacaagaaaaaaacaaacaaccccatcaaaaagtgggcaaaggacatgaacagacacttctcaaaagaatacatttatgcagccaaaagagacatgaaaaaatgctcatcatcactggccatcagagaaatgcaaatcaaaaccacaatgagataccatctcacaccagttagaatggtgatcattaaaaagtcaggaaacaacaggtgctggagaggatgtggagaaataggaacacttttacactgttggtgggactgtaaactagttcatccattgtggaagtcagtgtggcgattcctcagggatctagaactagaaataccatttgacccagccatcctattactgggtatatacccaaaggattataaatcatgctgctataaagacacatgcacacatgagaaagcagagatccagaaaagtaaaggaatcagagattatggagaaataggtactagaactgaggatatggactcccagttcagacctctttccgttgttcgggcacaaattatcccctttgaatttccctgggaaggaatacctctgggtggacccttcccccggcattcctgcagctaccctgtgggcctagcccttttgtaccacagtagctcagcagctggaccagtgagaggacacctctccctgcagtggaattccaggatgactagttga

SEQ ID NO: 10230 - DNA, 2277 bp, Homo sapiens; identical to SEQ ID NO: 5445
  SIMILAR (172)..(1752): 951254mologous to Homo sapiens putative p150,accession number U93564,Smith-Waterman Score=2634.

SEQ ID NO: 10231 - DNA, 2253 bp, Homo sapiens; identical to SEQ ID NO: 9126
  SIMILAR (172)..(1989): 941254mologous to Homo sapiens putative p150,accession number U93572,Smith-Waterman Score=3008.

SEQ ID NO: 10232 - DNA, 825 bp, Homo sapiens
  SIMILAR (451)..(702): 911254mologous to Homo sapiens NAG13,accession number AF194537,Smith-Waterman Score=405.
atgccccacttccacctaaaagtggactcgccagccagaagacttcacatcctgcaccgctactcacgtcgatgtttccgcagactagatgctcgcccgctgcggtccttatccctcatcttaaaattggaggaaacctggtgtttagtaacttcctacagcacgagagttcgagaggactcactcacagaggcatgctgcgatttcagcccagctgcatgctgctgctattttggggtagcaagaagcataaaggcaaaactgtactggcttcgtgtctccttcctgagaccctacatctgctccaccgaggctgaccctggaaccagtgctggatctctgatgactaggaggacccggtggttaccagggtcccacagccagtctgcagacctgcccaggcatgacagtgtttccatgtcctcatcaaaacgagagaaaagacggctggaaatacaaactaccatcagagaatactataaacacctctacgcaaataaactagaaaatctagaagaaatggataaattcctggacacatacaccctcccaagactaaaccaggaagaagttgaatccctgaatagaccaataacaggctctgaaattgaggcaataattaatagcctaccaatcaaaaaaagtccaggaccagacggattcacagccaaattctaccagaggtacaaagacgagctgatcgtgagctctgtgggaacattgcccaggcttgtcttgttcaccaacgtgcttccagtgcctggcactgtgctcaacccctccacgccctcgctcaaactcaatcgatgtttgatagaaagatga

SEQ ID NO: 10233 - DNA, 3012 bp, Homo sapiens
  SIMILAR (670)..(2196): 981254mologous to Homo sapiens putative p150,accession number U93574,Smith-Waterman Score=2630.
atgaaggcagaaataaagatgttctttgaaaccaacgagaacaaagacaccacataccagaatctctgggacgcattcaaagcagtgtgtagagggaaatttatagcactaaacgcctacaagagaaagcaggaaagatccaaaattgacaccctaacatcacaattaaaagaactagaaaagcaagagcaatcacattcaaaagctggcagaaggcaagaaataactaaaatcagagcagaactgaaggaaatagagacacaaaaaacccttcaaaaaatcaatgaatccaggagctggttttttgaaaggatcaacaaaattgatagaccgctagcaagactaataaagaaaaaaagagagaagaatcaaatagacacaataaaaaatgataaaggggatatcaccaccaatcccacagaaatacaaactaccatcagagaatactacaaacacctctacgcaaataaactagaaaatctagaagaaatggatacattcctcgacacatacaccctcccaagactaaaccaggaagaagttggatctctgaatacaccaataacaggctctgaaattgtggcaataatcaatagtttaccaaccaaaaagagtccaggaccagatggattcacagccgaattctaccagaggtacaaggaggaactgccgggcagagtaccaacgaaaaaagagaattttagaccaatatccttgatgaacattgatgcaaaaatcctcaataaaatactggcaaaccgaatccagcagcacatcaaaaagcttatccaccatgatcaagtgggcttcatccctgggatgcaaggctggttcaatatacgcaaatcaataaatgtaatccagcatataaacagagccaaagacaaaaaccacatgattatctcaatagatgcagaaaaagcctttgacaaaattcaacaacccttcatgctaaaaactctcaataaattaggtattgatgggacgtatttcagaataataagagctatctatgacaaacccacagccaatatcatactgaatgggcaaaaactggaagcattccctttgaaaactggcacaagacagggatgccctctctcaccgctcctattcaacatagtgttggaagttctggccagggcaatcaggcaggagaaggaaataaagggtattcaattaggaaaagaggaagtcaaattgtccctgtttgcagacgacatgattgtttatctagaaaaccccattgtctcagcccaaaatctccttaagctgataagcaacttcagcaaagtctcaggatacaatttctatgtacaaaaatcacaagcattcttatacaccaacaacagacaaacagagagccaaatcatgagtgaactcccattcacaattgcttcaaagagaataaaatacctaggaatccaacttacaagggatgtgaaggacctcttcaaggagaactacaaaccactgctcaaggaaataaaagaggacacaaacaaatggaagaacattccgtgctcatgggtaggaagaatcaatatcgtgaaaatggccatactgcccaaggtaatttacagattcaatgccatccccatcaagctaccaatgactttcttcacagaattggaaaaaactactttaaagttcatatggaaccaaaaaagagcccgcatcgccaagtcaatcctaagccaaaagaacaaagctggaggcatcacactacctgacttcaaactatactacaaggctacagtaaccaaaacagcatggtactggtaccaaaacagagatatagatcaatggaacagaacagagccctcagaaataatgccgcatatctacaactatctgatctttgacaaacctgagaaaaacaagcaatggggaaaggattccctatttaataaatggtgctgggaaaactggctagccatatgtagaaagctgaaactggatcccttccttacaccttatacaaaaatcaattcaagatggattaaagatttaaatgttagacctaaaaccataaaaaccctagaagaaaacctaggcattaccattcaggacataggcgtgggcaaggacttcatgtccaaaacaccaaaagcaatggcaacaaaagccaaaattgacaaatgggatctaattaaactaaagagcttctgcacagcaaaagaaactaccatcagaaaactgaaaggatcagcattcccagcttttaaagtagatgcttcctgtgagacccagcgcccagaagccactcacagacccttgcgggtgtctcttcacatgctgttcagtgccattgtagagatgaggcatccagaaacgtttgaccttgtgcaagaacttggcatccacttctgtcctccttcttccctagaagggaagcgctggactgggatcattagcatgagcaggcagtgctgccagctgcccgcctgtgtcctctgggctccggctgaatggctgccatcagaaaaacaaaataacaacagcaacaacaacaaaaatcgaatgttggtgaggatgtggagaaaaggaaattcttatattacattcttgggctcagtacaaaatgaaaatgcaggccccctaagaatttcaagccagcgacaaaagccggaccgccagatggaaaaagctgagcacggtcacatagacctcagtcaggcaccgtgtatgaaatctaacaatgcgctcatcgtcatcctcggcaccgtcaccctggatgctgtaggcataggcttggttatgccggtactgccgggcctcttgcgggatatcgtccattccgacagcatcgccagtcactatggcgtgctgctagcgctatatgcgttgatgcaatttctatgcgcacccgttctcggagcactgtccgaccgctttggccgccgcccagtcctgctcgcttcgctacttggagccactatcgactacgcgatcatggcgaccacacccgtcctgtggatctacccactagtcaattcaccatcttgttga

SEQ ID NO: 10234 - DNA, 2461 bp, Homo sapiens
  SIMILAR (2)..(2245): 901254mologous to Homo sapiens putative p150,accession number U93563,Smith-Waterman Score=3473.
gatcaacaaaattgatagaccgctagcaagactaataaagaaaaaaagagagaagaatcaaatagatgcaataaaaaatgataaaggggatatcaccaccgatcccacagaaatacaaactaccatcagagaatactacaaacacctctacgcaaataaactagaaaatctagaagaaatggataaattcctcgacacatacactctcccaaggctaaaccaggaagaagttgaacctctgaatagaccaataacaggatctgaaattgtggcaataatcaatagcctaccaactaaaaagagtccaggaccagatggattcacagccgaattctaccaggggtacaaggaggaactggtaccattccttctgaaactattccaatcaatagagaaagagagaatccaccctaactcactttatgaggccagcatcatcctggtactaaagccagccagagacacaaccaaaaaagagaattttagaccaatatccttgatgaacattgatgcaaaatcctcaataaaatactggcaaaccgaatccagcagcacatcaaaaagcttatccaccatgatcaagtggcttcatccctgggatgcgaggctgcatataaacagaaccaaagacaaaaaccacatgattatctcaatagatgcagaaaaggcctttgacaaaattcaacaacccttcatgctaaaaactctcaataaattaggtattgatgggacgtatctcaaaataataagagctatctatgacaaacccacagccaatatcatactgaatgggcaaaaactggaagcattccctttgaaaactggcacaagacagggatgccttctctcaccactcctattcaacatagtgttggaagttctggccagggcaattaggcaagagaaggaaataaagggtattcaattaggaaaagaggaagtcaaattgtccctgtttgcagatgaaatgattgtatatctagaaaacccaattgtctcagcccaaaatctccttaagctgataagcaaattcagcaaagtctcaggatacaaaatcaatgtacaaaaatcacaagcactcttatacaccaaaaacagacaaacagagagccaaatcatgagtgaactcccattcacaattgcttcaaagagaataaaatacctaggaatccaacttacaagggacgtgaaggacctcttcaaggcgaactacaaaccactgctcagtgaaataaaagaggatacaaacaaatggaagaacattacatgctcatgggtaggaataatcaatatcgtgaaaatggccatactacccaagataatttacgcattcaatgccatccccatcaagctaccaatgactttcttcacagaattggaaaaaactactttaaagttcatatggaaccaaaaaagagcccgcatcgccaagtcaatcctaagccaaaagaacaaagctggaggcatcacactacctgacttcaaactatactacaaggctacagtaaccaaaacagcatggtactggtaccaaaacagagatatagaccaatggagcagaacagagccctcagaaataacgccgcatatctacaaccatctgatctttgacaacaaacctgagaaaaacaagcaatggggaaaggattccatgtttaataaatggtgctgggaaaactggctagccatatgtagaaagctaaaactggatcccttccttacaccttatacaaaaatcaattcaagatggattaaagacttaaacttcagacctaaaaccataaaaaccctagaagaaaacctaggcattaccattcaggacataggcatgggcaagggcttcatgtctaaaacaccaaaggcaatggcaacaaaagccaaaattgacaaatggaatctaattcaactaaagagcttctgcacagcaaaagaaactaccatcagagtgaacaggcaacctacaaaatgggagaaaattttcgcaacctactcatctgacaaagggctaacatccagaatctacaatgaactcaaacaaatttacaagaaaaaaacaaacaaccccatcaaaaagtgggtgaaggacatgaacagacacttctcaaaagaagacatttatgcagccaaaaaacacatgaaaaaatgctcaccatcactggccatcagagaaatgcaaatcaaaaccacaatgagataccatctcacaccagttagaatggcaatcattaaaaagtcaggaaacaacagttcactgaacaatgtgatgaaaggaaatgatgaactgggggattctgtctcccggtttcagaagcagacactgagcctcaaatctgctaagattgccctgtgtgagagtcttatctcctgtagagaaagagctaaaattgtggaaaaacagacacaagctcttatcatgagagtggctgacctgaaacaaaaggtgcatgcacagccttgccag

SEQ ID NO: 10235 - DNA, 1795 bp, Homo sapiens
atgattatctcaatagatgcagaaaaggcctttgacaaaattcaacaacccttcatgctaaaaactctcaataaattaagtattgatgggacgtatttcaaaataataagagctatctatgacaaacccacagccaatatcatactaaatgggcaaaaactggaagcattccctttgaaaactggcacaagacagggatgccctctctcaccactcctattcaacatagtgttggaagttctggccagggcaattaggcaggagaaggaaataaagggtattcaattaggaaaagaggaagtcaaattgtccctgtttgcacacgacatgattgtatatctagaaaaccccattgtctcagcccaaaatctccttaagctgataagcaacttcagcaaagtctcaggatacaaaatcaatgtacaaaaatcacaagcattcttatacaccaacaacagacaaacagagagccaaatcatgagtgaactcccattcacaattgcttcaaagagaataaaatacctaggaattcaacttacaagggatgtgaaggacctcttcaaggagaactacaaaccactgctcaaggaaataaaagaggatacaaacaaatggaagaacattccatgctcaggagtaggaagaatcaatatcgtgaaaatggccatactgcccaaggtaatttacagattcaatgccatccccatcaagctaccaatgactttcttcacagaattggaaaaaactactttaaagttcatatggaaccaaaaaggagcctgcatcaccaagacaatcctaagcccaaaagaacaaagttggaggcatcacgctacctgacttcaaactatactacaaggctacagtaaccaaaacagcatggtactggtaccaaaaacagagatatagatcaatggaacagaataaagccctcagaaataatgccacattatctacaactatctgatctttgacaaacctgagaaaaacaggcaatggggagaggattccctatttaataaatggtgctgggaaacctggctagccatatggagaaagctgaaactggatcccttccttacactttatgcaaaaattaactgaagatggattaaagacttaaacgttagacctaaaaccataaaaaccctagaagaaaacctaggcattaccatgccaggaccataggcatgggcaaggacttcatgtccaaaacaccaaaagcaatggcaacaaaagccaaaattgacaaatgggatctaattcaactaaagagctactgcacagcaaaagaaaataccatcagagtgaacaggcaacctacaaaatgggagaaaattttcgcaacctactcatctgacaaagggctaataaccagaatctacaatgaactcaaacaaatttacaagaaaaaaacaaacaaccccatcaaaaagtgggcaaaggacatgaacagacacttctcaaaagaagacatttatgcagccaaaaaacacatgaaaaaatgctcatcatcactggccatcagagaaatgcaaatcaaaaccacaatgagataccatctcacaccagttagaatggcaatcattcaaaagtcaggaaacaacagaacaaagagaactatttatagaaggaatgatgatgatgatgacaatgatgataatgatgatgatagtttgatgagcctcagccgcactgagattcctttttccagttactcagagctaaatgtagtccttcacaagccaaggcctgagccctctgccagcaccatcctccttttacacacagctag

SEQ ID NO: 10236 - DNA, 2851 bp, Homo sapiens
  SIMILAR (1)..(912): 911254mologous to Homo sapiens putative p150,accession number U93572,Smith-Waterman Score=1422.
atgtctggctttctgatctctcctaaacataagcatggcactaactctggaattgtcagttgggcagatgtacagagtcagctcaggcacatagaagcagcatttgaccaggaggctgcggcagtgttgatggcacggcttggggtgttccgagcggagtcagaggaggggcccgatgtgctccggtggctggaccgacaactcatccgactgcactctctactgacaacgcttgatatcgtgccagctggcaaaggagaggtagtgaaagggcccatgtccatttcacagcaggcaaaggggtgtcaaaagtttggacagtataacaaagaagaccccacttcttttaggttatcagattccttttctctatatcctcagtttatgttccatctgagaagatctccatttcttcaagtgtttaacaacagtcctgatgagtcgtcatattacagacatcattttgcccggcaggacctgacccagtccctcatcatgatccagcccattctctactcttactcctttcatgggccaccagagccagtactcttggatagcagcagcattctagctgacagaattttgctgatggatactttctttcaaattgtcatttatcttggtgagaccatagcccagtggcgtaaagctggctaccaggacatgcccgagtatgaaaacttcaagcaccttctgcaggcaccactggatgatgctcaagaaattctgcaagcacgcttcccgatgccacgttacatcaacacggagcatggaggcagtcagaagaaaagagagaagaatcaaatagacgcaataaaaaatgataaaggggatatcaccaccgagcccacagaaatacaaactaccatcagagaatactataaacacctctatgcaaataaactagaaagtctagaagaaatgaataaattcctcgacacatacactctcccaagactaaaccaggaagaagttgaatctctgaatagacaaataacaggctctgaaattgaggcaataattaatagcttaccaaccaaaaaaagtccaggaccagacagattcacagccaaattctaccagagaaccaatgaccaaaaacacatgattatctcaatagatgcagaaaaagcctttgacaaaattcaacaaccctttatgctaaaaactctcaataaattaggtattgatgggacgtatttcaaaataataagagctatttatgacaaacccacagccaatatcatactgaatgggcaaaaactggaagcattccctttgaaaactggcacaagacagggatgccctctctcactgctcctattcaacataatgttggaagttctggccagggcaatcaggcaggagaaggaaataaagggtattcaatttggaaaagaggaagtcaaattgtccctgtttgcagatgacatgattgtatatctagaaaaccccattgtcttagcccaaaatctccttaagctgataagcaacttcagcaaagtctcaggatacaaaatcaatgtgcaaaaatcacaagcattcttatacaccagtaacagacaaacagagagccaaatcatgagtgaactcccattcacaattgcttcaaagagaataaaatacctaggaatccaacttacaagggatgtgaaggacctcttcaaggagaactacaaaccactgctcaatgaaataaaagaggatacaaacaaatggaagaacattccatgctcatgggtaggaagaatcaatatagtgaaaatggccatactgcccaaggtaatttacagattcaatgccatccccatcaagctatcaatgactttcttcacggaattggaaaaaactactttagagttcatatggaaccaaaaaagagcccgcattaccaagtcaatcctaagccaaaagaacaaagctgaaggcatcacgctacctgacttcaaactacagtacaaggctacagtaaccaaaacagcatggtactcgtaccaaaacagagatatagatcaatggaacagaacagagccctcagaaatagtgccatgcatctacaactatctcatctttgacaaacctgacaaaaacaagaaatggggaaaggattccctatttaataaatggtgctgggaaaactggctagccatatgtagaaagctgaaactggatcccttccttacaccttatacaaaaattaattcaagacggattaaagacttaaatgttagacctaaaaccataaaaaccctagaagaaaacctaggcaataccattcaggacataggcatgggcaaggacttcatatccaaaacaccaaaagcaatggcaacaaaagccaaaattgacaaatgggatctaattaaactaaagagcttctgcacagcaaaagaaactaccatcagagtgaacaggcaacctacaacatgggagaaaattttcacaacctactcatctgacaaagggctaatatccagaatctacaatgaactcaaacaaatttacaagaaaaaaacaaacaaccccatcaaaaagtgggtgaaggacatgaacagacacttctcaaaagaagacatttatgcagccaaaaaacacatgattaaatgctccgcatcactggccatcagagaaatgcaaatcaaaaccactatgagatatcatctcacaccagttagaatggcaatcattaaaaagtcaggaaacaacagtgttcttaagagagaaggtcaaagaatagatatttctactgtttcatttccaatctgtttgtccgttgtccattcactgaagaacaggtactctctctacaacatcactgaagctgctcttgccaacgtccccagagaag

SEQ ID NO: 10237 - DNA, 3226 bp, Homo sapiens
atgaagcgagaaggaagtttagagaaaaaaagaataaaaagaaatgaacaaagcctccaagaaatatgtgactatgtgaaaagagcaaatctacgtctgattggtggacctgaaagtgacggggaaaatggaaccaagttggaaaacactctgcaagatatgcaggagaaattccccaatctagcaaggcaggccaacattcaaattcaggagatacagagaacgccacaaagatactcctcaagaagagcaactccaagacacataattgtcagattcaccaaagttgaaatgaaggaaaaaatgttaagggcagccagagagaaaggtcaggttacccacaaagggaagtccatcagactaacagctgatctctcggcagaaactctacaagccagaagagagtgggggccaatattcaacattcttaaagaaaagaattttcaacccagaatttcatatccaggcaaactaagcttcataagtgaaggagaaataaaatcctttacagacaagcaaatgctgagagattttgtcaccaccaggcctgccctaaaagagctcctgaaggaagcactaaacatggaaaagaacaagcagtaccagccaccacaaaaacatgccaaattaactagagaagcaagagcaaacacattcaaacctagcagaaggcgagaaataacaaagatcagagcagaactgaaggaaatagagacaccaaaaaccgctcaaaaaattaatgaatccaggagctggttttctgaaaggatcaacaaaattgatagaccgctagcaagactaagaaagaagaaaagagagaagaatcaaatagacacaataaaaaatgatgaaggggatatcaccacccatcccacagaaatacatactatcatcagagaatactataaacacctctatgcaaataaactagaaaatctagaagaaatggataaattcctcgacacctacaccctcccaagaccaaaccaggaagaagttgaatctctgaatggaccaatagcaggctctgaaattcaggcaataattaatagcttaccaaccaaaaaaagtccaggaccagatggattctaccagaggtacaaggaggagctggtaccattccgtctgaaactattccaatcaatagaaaaagagggaatcctccctaactcattttatgaggccagcatcatcctgataccaaagcctggcagagacacaacaaaaaaagagaattttagaccaatatccctgttgaacatcaatgcaaaaatcctcaataaaatactggcaaaccgaatccagcagcacatcaaaaagcttatgcaccatgatcaagtgggcttcatccctggaatgcaaggctggttcaatatacgcaaatcaataaatgtaatccagcatataaacagaaccaaagacaaaaaccacatgattatctcaatagatgcagaaaaggcctttgacaaaattcaacaacccttcatgctaaaaactctcaataaattaggtattgatgggacatatcacaaaataataagagctaactatgacaaacccacagccaatatcatactgaatgggcaaaaactggaagcattccctttgaaaactggcacaagacagggatgccctctctcaccactcctattcaacatagtgttggaagttctggccagggcaatcaggcaggagaaggaaacagagggtattcaattaggaaaagaggaagtcaaattgtccctgtttgcagatgacatgattgtatatctagaaaaccccattgtctcagcccaaaatctccttaagctgataagcaacttcagcaaagtctcaggatacaaaatcaatgtgcaaaaatcacaagtattcttatacaccgataacagacaaacagagagccaaatcatcagtgaactccccattcacaattgcttcaaagagaataaaatacctaggaatccaacttacaaggtacgtgaaggacctcttcaaggagaattacaaaccactgctcaatgaaataaaagaggatacaaacaaatggaagaacattccatgctcatgggtaggaagaatcaatatcatgaaaatggccatactgcccaatgtaatttatagattcaatgccatccccatcaagctaccaatgactttcttcacagaattggaaaaaactactttaaagttcatatggaaccaaaaaggagcccacattgccaagtcaatcctaagccaaaagaacaaagctggaggcatcatgctacctgacttcaaagtatactacaaggctacagtaaccaaaatagcatggtactggtaccagaacagaggtatagatcaagggaacagaacagagccctcagaaataatgccacatatctacaaccatgtgatctttgacaaacctgacaaaaacaagcaatggggaaacgattccctagttaataaatggtgctgggaaaactggctagccatgtgtagaaagctgaaactggatcccttccttacaccttatacaaaaattaattcaagatggattaaagacttacatgttagacctaaaaccataaaaaccctagaagaaaacctaggcaatatcattcaggacataggcatgggcaaggacttcatatctaaagcaccaaaagcaacagcaacaaaagccaatattgacaaatgggatctaattaaactaaagagcttctgcacagcaaaagcaactaccatcagagtgaacaggcaacctacagaatgggagaaaatttttgcaatctactcatctgacaaagggctaatatccagaatctacaatgaactcaaacaaatttacaagaaaaaaacaaacaaccccatcaaaaagtgggcaaaggatatgaacagacacttctcaaaagaagatatttatgcagccaaaagacacatgaaaaaatgctcatcatcactggccatcagagaaatgcaaattgaaaccacaatgagataccatctcacaccagttagaatggcgatcattaaaaagtcaggaaacaacaggaatatccagactgtgctcctactcaggatcccattccagggcctggttccttcccccagcgggcagacacatccagtaggcgaccagccagcagcgcatgtagacagcatcgacgccgataccaggctcagaggacagaaccatattccagaggagctggggagaggcgttgtctccaatccagttgag

SEQ ID NO: 10238 - DNA, 2047 bp, Homo sapiens
  SIMILAR (374)..(619): 801254mologous to Homo sapiens PHAPII (Putative HLA DR Associated Protein II),accession number X75091,Smith-Waterman Score =326.
atggagaatgactttgaggagctgagagaagaaggcttcagacgatcaaattactctgagctacgggaggacattcaaaccaaaggcaaagaagttgaaaactttgaaaaaaatttagaagaatgtataactagaataaccaatacacagaagtgcttaaaggagctgatggagctgaaaaccaaggctcgagaactacgtgaagaatgcagaagcctcaggagccgatgcgatcaactggaagaaagggtatcagcgatggaagatgaaatgaatgaaatgaagcgagaagggaagtttagagaaaaaagaatacaaagaaatgaacaaagcctccaagaaatatgggactatgtgaaaagaccaaatctacgtctgattggtgtacctgaaaccttgcatcccagggatgaagcccacttgaagaatctaatagatgcaataaaaaatgataaaggggatatcaccaccgatcccacagaaatacaaactaccatcagagaatactacaaacacctctatgcaaataaactagaaaatctagaagaaacggataaattcctcgacacatacactctcccaagactaaaccaggaagaagttgaatctctgaatagaccaataacaggatctgaaattgtggcaataatcaatagcttaccaaccaaaaagagtccaggaccagatggattcacagctgaattctaccagaggtacaaggaggaactgctgataagcaacttcagcaaagtctcaggatacaaaatcaatgtacaaaaatcacaagcattcttatacaccagcaacagacaaacagagagccaaatcatgagtgaactcccattcacaattgcttcaaagagaataaaatacctaggaatccaacttacaagggatgtgaaggacctcttcaaggagaactacaaaccaccgctcaaggaaataaaagaggatacaaacaaatggaagaacattccatgctcatgggtaggaagaatcaatatcatgaaaatggccatactgcccaaggtaatttacagattcaatgccatccccattaagctaccaatgcctttcttcacagaattggaaaaaactactttaaagttcatatggaaccaaaaaagagcccgcatcgccaagtcaatcctaagccaaaagaacaaagctggaggcatcacactacctgacttcaaactatactacaaggctacagtaaccaaaacagcatggtactggtaccaaaacagagatatagatcaatggaacagaacagagctctcagaaataacgccgcatatctacaactatctgatctttgacaaacctgagaaaaacaagaaatggggaaaggattccctatttaataaatggtgctgggaaaactggctagccatatgtagaaagctgaaactggatcccttccttacaccttatacaaaaatcaattcaagatggattaaagacttaaacgttagacctaaaaccataaaaaccctagaagaaaacctaggcattaccattcaggacataggcatgggcaaggacttcatgtctaaaacaccaaaagcaatggcaacaaaagccaaaattgacaaatgggatctaattaaactaaagagcttctgcacagcaaaaaaaaaaaaaactactaacagactgaacaggcaacctgcaaaatgggagaaaattttcacaacctactcatctgacaaagggctaatatccagaatctacaatgaactcaaacaaatttacaagaaaaaaacaaacaaccccatcaaaaagtgggcaaaggacatgaacagacacttctcaaaagaagacatttatgcagccaaaaaaacacatgaaaaaatggtcaccatcactggccatcagagaaatgcaaatcaaaaccacaatgagataccatctcatgccagttagaatggcaatcattaaaaagtcaggaaacaggtgctggagaggatgtgcagaaacaggaacacttttacactgttggtgggactgtaaactagttcaaccattgtggaagtcagtgtga

SEQ ID NO: 10239 - DNA, 2704 bp, Homo sapiens
  SIMILAR (80)..(277): 411254mologous to Homo sapiens Type III procollagen (prior art),accession number R28916,Smith-Waterman Score=109.
atgtactcacatgtgatcacggtgtgccggcatgtgaagaatggggacattctgctactgaaccgacagcccacactgcacagaccctccatccaggcccaccgtgcccgcatcctgcctgaagagaaagtgctgcggctccactatgccaactgcaaggcctataatgccgactttgatggagacgagatgaatgcccatttcccccagagtgagctgggccgggccgaggcctacgtcctggcctgcactgatcagcagtaccttgttcccaaggatggccaaccattggcgggactgatccaggatcacatggtttcaggggcaagcatgactactcggggttgctttttcacccgggagcactatatggagctggtgtaccgaggactcacggacaaagtggggcgcgtgaagctcctttctccttccatcctgaagccctttccgctgtggacaggaaaacagcatataaacagaaccaaagacaaaaaccacatgattatctcaatagatgcagaaaaggcctttgataaaattcaacaacccttcatgctaaaaactctcaataaattaggtattgatgggacgtatctcaaaataataagagctatctatgacaaacccacagccagtatcatactgaatgggcaaaaactggaagcattccctttgaaaactggcacaagacagggatgccctctctcaccactcctattcaacatagtgttggaagttctggccagggcaatcaggcaggagaaggaaataaagagcattcagttaggaaaagaggaagtcaaattgtccctgtttgcagatgacatgattgtatatctagaaaaccccactgtctcagcccaaaatctccttaagctgatgagcaacttcagcaaagtctcaggatacaaaatcaatgtgcaaaaatcacaagcattcttatacaccaataacagacaaacagagagccaaatcatgagtggactcccattcacaatcacttcaaagagaataacatacctaggaatccaacttacaagggatgtgaaggacctcttcaaggagaactacaaaccactgctcaaggaaataaaagaggatacaaacaaatggaagaacattccatgctcatgggtaggaagaatcaatatcgtgaaaatggccatactgcccaaggtaatttatagattcaacaccatccccatcaagctaccaatgactttcctcacagaattggaaaaaactactttaaagttcatatggaaccaaaaaagagcccacattgccaagtcaatcttaagccaaaagaacaaagctggaggcatcatgctacctgacttcaaactatactacaaggctacagtaaccaaaacagcatggtactggtaccaaaacagagatatagaccaatggaacagaacagagccctcagaaataatgccacatatatctacaactatctaatctttgacaaacctgagaaaaacaagcaatggggaaaggataccctatttaataaatggtgctgggaaaactggctagccatatgtagaaagctgaaactggatcccttccttacaccttatacaaaaattaattcaagatggattaaagacttaaatgttagacctaaaaccataaaaaccctagaagaaaacctaggcaataccattcaggacataggcatgggcaaggacttcatgtctaaaacaccaaaagcaacggcaacaaaagccaaaattgacaaatgggatctaattcaactaaagagcttctgcacagcaaaagaaaccaccatcagagtgaacaggcaacctacagaatgggaggaaatttttgcaatctactcatcggacaaagggctaatatccagaatctacaatgaactcaaacaaatttacaagaaaaaaacaaacaaccccatcaaaaagtgggcaaaggatatgaacagacacttctcagaagaagacatttatgcagccaaaaaacacatgaaaaaatgctcatcatcactggccatcagagaaatgcaaatcaaaaccacaatgagataccatctcacaccagttagaatggtgatcattaaaaagtcaggaaacaataggtgctggagaggatgtggagaaataggaacacttttacactgttggtgggactgtaaactagttcaaccattgtggaagtcggtgtggcaattcctcagggatctagaactagaaataccatttgacccagccatcccattactgggtatatacccagaggattataaaccatgctgctataaagacacatgcacacgtatgtttattgcggcactattcacaatagcaaagacttggaaccaacccaaatgtccaacaatgatagacgggattaagaaaatgtggcacatatacaccatggaatactatgcagccataaaaaaggatgagttcatgtcctttgtagggacatggatgaagctggaaaccatcattctcagcaaactatcgcaaggacagaaaaccaaacaccgcatgttctcactcatagtcaggaccctcagctgcaggtctgttggagtttactcgaagtccactccagaccctgtttgcctgagtatcagcagcagtggctgcagaacagcagatattagtgtatcacaaatgctactgcctgattgttcctctggaagttttgtctcagaggagtacccgaaggt

SEQ ID NO: 10240 - DNA, 3726 bp, Homo sapiens
  SIMILAR (715)..(927): 831254mologous to Homo sapiens Human secreted protein, SEQ ID NO: 6297,accession number G02216,Smith-Waterman Score=297.
atggcgccagcatctgctcctggtgaggcctcaggaagtttacaattgtggcggaaggtgaaggaagagcagtcatgcttgttaagcaaggttgctggccccttcaggatgggagaaaggagaggaaaccagagtagacactctgacatccaccagccagtgctccccagtggagggattgctgtgttaaaggctgtggtccctcactcccatggtgcccacgcccttgaccccacaccccacctctcttctctgaggaacatagctatcaggggtagcactgtggggaaacatttgggagagatctccggctgtgacccactgttaaaagcatctccactggctattgctaaacagaaaagattgtggcttcccagcaaggctgatttcccagaaaacagccctggtaggccaaggggtaggaacgcgagaccacctgggggaaggggcggctgtgggtgcatcttcagcagacttaaacgttcctgcctgctgactctgaagagagcagtggatttcccaacacagcacttcagctctgctaagggacaggctgcctcctcaaatgggtccctgactcctatgcctcctgactgggtcaacagacacctcatacaggagagctccagctggcatctggagggtgtccctctgggacgaagcttccagaggaaggagcaagcagcaatctttgctgttctgcagcctccactggtgataccctggcaaacaggatctggagtggacctcctgcaaactccaccagacctgcagaagagggtcctgactgttagaaggaaaactaacaatcagaaagcaatagcatcaacatcaacaaaaaggacgcccacgcaaaaaccccatccgaaggtcaccaacatcaaagatcaaagaactaatgacaaaaaccagatgattatctcaatagatgcagaaaagcccttcaataaaattcaacttcccttcatgctaaaaactctcaataaattaggtattgatgggacatatttcaaaataataagagctatctatgacaaacccacagccaatatcatactgaatgggcaaaaactggaagcattccctttgaaaactggcacaagacagggatgccctctctcaccgctcctattcaacatagtgttggaagttctggccagggcaatcaggcaggagaaggaaataaaaggtattcaattaggaaaagaggaagtcaaattgtccctgtttgcagacgacatgactgtttatctagaaaaccccatcgtctcagcccaaaatctccttaagctgataagcaacttcagcaaagtctcaggatacaaaatcaatgtaaaaaaatcacaagcattcttatacaccagcaacagacaaacagagagccaaatcatgagtgaactcccattcacaattgcttcaaagagaataaaatacctaggaatccaacttacaagggatgtgaaggacctcttcaaggagaactacaaaccactactcaaggaaataaaagaggatacaaacaaatggaagaacattccatgctcatgggtaggaagaatcaatatcgtgaaaatggccatactgcccaaggtaatttacagattcaatgccatccccatcaagctaccaatgactttcttcacagaattggaaaaaactactttaaagttcatatggaaccaaaaaagagcctgcatcgccaagtcaaccctaagccaaaagaacaaagctggaggcatcacactacctgacttcaaactatactacaaggctacagtaaccaaaacagcatggtactggtaccaaaacagagatatagatcaatggaacagaacagagccctcagaaataacgccgcatacctacaactatctgatctttgacaaacctgagaaaaacaagcagtggggaaaggattccctatttaataaatggtgctgggaaaactggctagccatatgtagaaagctgaaactggatcccttccttacaccttatacaaaaatcaattcaagatggattaaagatttaaacgttagacctaaaaccataaaaaccctagaagaaaacctaggcattaccattcaggacataggcatgggcaaggacttcatgtccaaaacaccaaaagcaatggcaacaaaagacaaaattgacaaatgggatctaattaaactcaagagcttctgcacagcaaaagaaactactatcagagcgaacaggcaacctacaacatgggagaaaattttcgcaacctactcatctgacaaagggctaatatccagaatctacaatgaactcaaacaaatttacaagaaaaaaacaaacaaccccatcaaaaagtgggcgaaggacatgaacagacacttctcaaaagaagacatttatgcagccaaaaaacacatgaaaaaatgctcatcatcactggccatcagagaaatgcaaatcaaaaccactatgagatatcatctcacaccagttagaatggcaatcattaaaaagtcaggaaacaacaggtgctggagaggatgtggagaaataggaacacttttacactgttggtgggactgtaaactagttcaaccattgtggaagtcagtgtggcgattcctcagggatctagaactagaaataccatttgacccagccatcccattactgggtatatacccaaatgactataaatcatgctgctataaagacacatgcacacgaaaaatacgaacaaatgggagaaattgtgccagcaaaaaaggaaacatcaacaaagaagctagaagcctatttaaccactggcccctgcaaaggccaaggcgagtgtatagcctgcacgttctctgtggagacaccgcgttcaggcacggtttgagacctgcccaccatcatccatcattggactgcctgtcctcaacccaccatggagaacaagcttttctaagggaaggacatctgcaggataaaatgggaaaagaggaagagcatcactcttgtctggtgagtccagcgtggttcatcattgcatctggacttcagccagcagcaagtgggaacagatgtccaacagagggacgaagagtcaaaattctctgcattataagaggaattcaggagaagcaccttccaggagggaaggctctagcaacaccagaggaagctgcagctgggaaggaggcagccagggaacagttcttgtctgggcaacaaagtgagatcctgtctcaaaaaaaggaagaggaggagaagaagaagaagaagaagaagaagaagaagaagaaggaggaggaggaggaggaggaggaggaggaggaggaggaggaagagagaagaggaggaggaaaagaaagagtaaggaaagaaggaaggaaggaaagaatgaatgaaggcaggcaggcaggcagggagggaggggagaggaagagagaagaaagaaggagaagaaaagaagaagaagaaggaagaggaggaggaggaaggggagaggaggaggaaaaagaagaagacatgcttagagaactaaggaaggagctgcccttgggacctctccagctaggaaaggatggagggatgggatgtgctttaggggagctgtgctcgggacttctccacctgggcgaggacggaagggtgggatgcgctttagggggccactccatagaacaccatgcagatggtgcccccccgcacgacccccagcatcagagttgtgcactgatggcctgcagatga

SEQ ID NO: 10241 - DNA, 2623 bp, Homo sapiens
  SIMILAR (33)..(119): 1001254mologous to Homo sapiens HSPC320,accession number AF161438,Smith-Waterman Score=153.
atggtggcctccagatcctctagagtcggtgtcttctatggaggtcaaaacagcgtggatggcgtctccaggcgatctgacggttcactaaacgagctctgcttatatagacctcccaccggggcgtacttggcatatgatacacttgatgtactgccaagtgggcagtttaccgtaaatactccacccattgacgtcaatggaaagtccctattggcgttactatgggaacatacgtcattattgacgtcaatgggcgggggtcgttgggcgatgcagccacttggccagctgggtcagctcgaacacctcggagaccggcgcgatcaggtcctcgaccgaagtggacgctcccgacgactcgatgctgctcagcacctgcgacatcgacctgaccgccgcccgcagggcatggttggggtgcttaccaaccaaaaagagcccaggaccagatggattcacagcagaattctaccagaggtgcaaggaggaactggtaccgttccttctgaaactattccaatcgatagaaaagagggaatccttcctaacttatttgatgaggccagcatcatcctgataccaaagcggggcagagacaccaccaaaaaagagaattttagaccaatatccttgatgaacattgatgcaaaaatcctcaataaaatactggcaaaccgaaaccagcagcacatcaaaaagcttatccaccatgatcaagtgggtttcatccctgggatgcaaggctggttcaatatatgcaaatcaataaatgtaatccagcatataaacagaaccaaagacaaaaaccacatgattatctcaatagatgcagaaaaggcctttgacaaaattcaacaacccttcatgctaaaaactcttaataaattaggtattgatgggacgtatctcaaaataataagagctatctatgacaaacccacagccaatatcatactgaatgggcaaaaactggaagcattccctttgaaaactggcacaagacagggatgccctctctcaccactcctattcaacatagtgttggaagttctggccagggcaatcaggcaggagaaggaaataaagggtattcaattaggaaaagaagaagtcaaattgtccctgtttgcagatgacatgattgtatatctagaaaaccccatcgtctcagcccaaaatctccttaagctaataagcaacttcagcaaagtctcagcatacaaaatcaatgtacaaaaatcacaagcattcttatacaccaataacagacaaacagagagccaaatcatgagtgtattcccattcacaattgcttcaaagagaataaaatacttaggaatccaacttgcaaggaatgcgaaggacctcttcaaggagaactacaaaccactgctcaatgaaataaaagaggatacaaagaaatggaagaacattccatgctcatgggtaggaagaatcaatatcgtgaaaatggccatactgcccaaggtaatttacagattcaatgccatccccatcaagctaccaatgactttcttcacagaattggaaaaaactactttaaagttcatatggaaccaaaaaagagcccgcatcgccaagtcaatcctaagccaaaagaacaaagctgggaggcatcacggctacctgacttcaaactatacctacaaggcctacagtaacccaaaacagcatggtactggtacccaaaacagagatatagaccaatggaacagaacagagccctcagaaataacaccgcatatctacaactatctgatctttgacaaacctgagaaaaacaagcaatggggaaaggattccctatttaataaatggtgctgggaaaactggctagccacatgtagaaagctgaaactggatcccttccttacaccttatacaaaaattaattcaagatggattaaagacttaaacgttagacctaaaaccataaaaaccctagaagaaaacctaggcattaccattcaggacataggcgtgggcaaggacttcatgtccaaaacaccaaaagcaatggcaacaaaagccaaaattgacaaatgggatctaattaaactaaagagcttctgcacagcaaaagaaactgccatcagagtgaacaggcaacctacaacatgggagaaaattttcgcaacctactcatctgacaaagggctaatatccagaatctacaatgaactcaaacaaatttacaagaaaaaaaacaaacaaccccatcaaaaagtgggcgaaggacatgaacagacacttctcaaaagaagacatttatgcagccaacaaacacatgaaaaaatgctcaccatcactggccatcagagaaatgcaaatcaaaaccactatgagataccatctcacaccagttagaatggcagtcattaaaaagtcaggaaacaacaggtcacatttcaacatgagatttggagaggacagacacccgaatcacagcaatgggtctcagcaagcagctccatcagctgcctcagacttgtctggaaggtggcagacgtgggcaattcctgccttgctgaagagggatacactgctgagtgaatgctctgaagcagaggagcatttggtgcaactgaagttgtctgaa

SEQ ID NO: 10242 - DNA, 2468 bp, Homo sapiens
  SIMILAR (1)..(990): 901254mologous to Homo sapiens putative p150,accession number U93572,Smith-Waterman Score=1537.
atgggagactttaacatcccactgtcaacatcagacagatcaacgagacagaaagttaacaaggatacccaggaattgaactcagctctgcaccaagcggacctaatagacatctacagaactctccaccccaaatcaacagaatatacattcttttcagcaccacaccacacctactccaaaattgaccacatagttggaagtaaagcactcctcagcaaatgtagaagaacagaaattataacaaactgtctctcagaccacagtgcaatcaaactagaaatcaggattaagaaactcactcaaaactgctcaactacatggaaactgaacaacctgctcctgaatgactactgggtaaataatgaaatgaaggcagaaataaagatgttctttgaaatcaacgaggacaaagacacaacataccagaatcgctgggacacattcaaagcagtgtgtagagggaaatttatagcactaaatgcccacaagagaaagcaggagagatctaaaattgacaccctaacgtcacaattaaaagaactagaaaagcaagagcaaacacattcaaaagctagcagaaggcaagaaataaccgagatcagagcagaactgaaggaaatagagacacaaaaaacccttcaaaaaatgaatgaatccaggagctggttttttgaaaagatcaacaacattgatagactgctagcaagactaatcaagaagaaaagagagaagaatcaaatagacgcaataaaaaatcataaaggggatatcaccaccaatcccacagaaatacaaactaccatcagagaatatgataaacacctctacgcaaataaactagaaaatctagaagaaacggataaattcctcgacacatacatcctcccaagactaaaccaggaacaagttgaatctctgaatagaccaataacaggagctgaaattgaggcaataatcaatagcttacgaaccaaaaaaagtccaggaaccaggtggattcacagccgaattctaccagaggtacaaggagaagctgatagtgttggaagttctggccagggcaatcaggcaggagaaagaaataaagggtattcaattaggaaaagaggaactcaaattgtccctgtttgcagatgacatgattgtatatctagaaaaccccatcgtctcagcccaaaatctcctcaagctgataagcaacttcagcaaagtctcaggatacaaaatcaatgtgcaaaaatcacaagcattcttatacagtaataacagacaaacagagagccaaatcatgagtgaactcccattcacaattgcttcaaagagaataaaatacctaggaatccaacttacaagggatgtgaaggacctcttcaaggagaactacaaaccactgctcaatgaagttaaagaggatacaaacaaatggaagaacattccatgctcatggataggaagaatcaatattgtgaaaatggccatactgcccaaggtaatttatagattcagtgccatccccatcaagctaccaatgactttcttcacagaactggaaaaaactactttaaagttcatatggaaccaaaaaaggagcctgcattgccaagtcaatcctaagccaaaagaacagagctggaggcatcacgctatctgacttcaaactgtactacaaggctacagtaaccaaaacagcatggtactggtaccaaaacagagatatagatcaatggaacaaaacagagccctcagaaataatgccacatatctacaactatctgatctttgacaaacctgacaaaaacaagaaatggggaaaggattccctatttaataaatggtgctgggaaaactggttagccatatgtagaaagctgaaactggatcccttccttacaccttatacaaaaattaattcaagatggattaaagacttaaatgttagacctaaaaccataaaaaccctagaagaaaacttaggcattaccattcaggacacaggcatgggcaaggacttcatgtctgaaacaccaaaagcaatggcaacaaaagacaaaattgacaaatgggatctaattaaactaaagagcttctgcacagcaaaagaaactaccatcagagtgaacaggcaacctacagaacgggagaaaagttttgcaagctactcatctgacaaagggctaatatccagaatctacaatgaactccaacaaatttacaagaaaaaaacaaacaaccccatcaacaagtgggcaaaggatatgaacagacacttctcaaaagaagacatttatgcagccaaaagacacacgaaaaaatgctcatcatcactggccatcagaggaatacaaatcaaaaccacaaggagataccatctcaaaccagttagaatggcgatcattaaaaagtcaggaaacaacaggtgctggagaggatgtggagaaataggaacacttttacactgttggtag

SEQ ID NO: 10243 - DNA, 2482 bp, Homo sapiens
  SIMILAR (170)..(2206): 931254mologous to Homo sapiens putative p150,accession number U93563,Smith-Waterman Score=3330.
ccaggccatgaccttagagggaagatggcagcaatcccagagaagttctacaaaacagagagatgggacttcttttcccatggtagagcccacaaagactgaagagcccttcatgagctccctgccccctcatcctaaccaggccgcagagtggcaaagtggaagacctagaccaaaaacaggagctgaaattgtggcaataaccaatagcttaccaaccaaaaagagtccaggaccagatggattcacagcagaattctaccagaggtacaaggaggaactggtaccattccttctgaaactattccaatcagtagaaaaagagggaatcctccctaactcattttatgaggccagcatcatcctgctaccaaagccaggcagagacaaaaccaaaaaagagaattttagaccaatatccttgatgaacattgatgcaaaaatcctcaataaaatactggcaaaccgaattcagcagcacatcaaaaagcttatccaccatgatcaagtgggcttcgtccctgggatgcaaggctggttcaatatacgcaaatcaataaatgcaatccagcatataaacagaaccaaagacaaaaaccacatgattatctcaatagatgcagaaaaggcctttgacaaaattcaacaacccttcatgctaaaaactctcaataaattaggtattgatgggaagtatctcaaaataataagagctttctatgacaaacccacagccaatatcatactgaatgggcaaaaactggaagcattccctttgaaaactggcacaagacagggatgccctctctcaccactcctattcaacatagtgttggaagttctggacagggcaattaggcaggagaaggaaataaagggtattcaattaggaaaagaggaagtcaaattgtccctgtttgcagatgacatgattgtatatctagaaaaccccattgtctcagcccaaaatctccttaagctgataagcaacttcagcaaagtctcaggatacaaaatcaatgtacaaaaatcacaagcattcttacacaccaataacagacaaacagagagccaaatcatgagtgaactcccattcacaattgcttcaaagagaataaaatacctaggaatccaaattacaagggacgtgaaggacctcttcaaggagaactacaaaccactgctcaaggaaataaaagaggatacaaacaaatggaagaacattccatgctcatgggtaggaagaatcaatattgtgaaaatagccatactgcccaagataatttacagattaaatgccatccccatcaagctactaatgactttcttcacagaattggaaaaaactactttaaagttcatatggaaccaaaaaagagcccgcatcgccaagtcaatcctaagccaaaagaacaaagctggaggcatcacgctacctgacttcaaactatactacaagcctacagtaaccaaaacagcatggtactggcaccaaaacagagctatagagcaatggaacagaacagagccctcagaaataacgacacatatctacaactatctgacctttgacaaacctgagaaaaacaagcaatggggaaaggattccctatttaataaatggtgctgggaaaactggctagccatatgtagaaagctgaaactggatcccttccttacaccttatacaaaaatcagttcaaaatggattaaagacttaaacgttagacctaaaaccataaaaacccaagaagaaaacctaggcattaccattcaggacataggcatgggcaaggacttcatgtctaaaacacaaaaagcaatggcaacaaaagccaaaattgacaaaggggatctaattaaactaaagagcttctgcacagcaaaagaaactagcagcagtgtgaacaggcaacctacaaaatgggagaaaatttttgcaacctactcatctgacaaagggctaatatccagaatctacaatgaactcaaacaaattcacaagaaaaaaacaaacaaccccatcaaaaagtgggcaaaggatatgaacagacacttctcaaaagaagacatttatgcagccaaaaaacacatgaaaaactgttcaccatcactggccatcagagaaatgcaaatcaaaaccacaatgagataccatctcacaccacttagaatggcaatcattaaaaagtcaggaaacaacagacgcacagcaactttaagtttgctgccagctatacgtcatgaaagggaagcttttcatcaaagggaagaagaaaaggaagggggaagaatcctacttttacaaaacagagtaattctttgctcctgctccctttgcccacatctctcacctgcgtccaaaccaaaacacaggggcctagatcgctttaagtcacaaagcacgtctatgttctcaggtgtgctcagcgttcggaattctctgcatgctcctcaggttgtttcctggttgcagcgctaa

SEQ ID NO: 10244 - DNA, 4795 bp, Homo sapiens
  SIMILAR (1)..(1644): 861254mologous to Homo sapiens putative p150,accession number U93563,Smith-Waterman Score=2429.
atgggagactttaacaccccactgtcaacattagacagatcaacgagacagaaagtcaacaaggatacccaggaactgaactcagctctgcaccaagcggacctaatagacatctacagaacactccaccccaaatcaacagaatatacatttttttcagcaccacaccacacctattccaaaattgaccacatactgggaagtaaagctctcctcagcaaatgtaaaagagcagaaattataacaaactatctctcagaccacagtgcaatcaaactagaactcaggattaagaatctcactcaaagccgctcaactacatggaaactgaacaacctgctcctgaatgactactgggtaaataacgaaatgaaggcagaaataaagatgttctttgaaaccaaagagaacaaagacacaacataccagaatctctgggacgcattcaaagcagtgtgtagagggaaatttatagcactaaatgcgcacaagagaaagcaggaaagatctaaaattgacaccctaacatcacaattaaaagaactagaaaagcaagagcaaacacattcaaaagctagcagaaggcaagaaataactaaaatcagagcagaactgaaggaaatagagacacaaaaaacccttcaaaaaatcaatgaatccaggagctggttttttgaaaggatcaacaaaattgatagaccgctagcaagactaataaagaaaaaaagagagaagaatcaaatagacacaataaaaaatgataaaggggatatcaccactgatcccacagaaatacaaactaccatcagagaatactacaaacacctctacgcaaataaactagaaaatctagaacaaatggatgcattcctcgacacatacactctcccaagactaaaccaggaagaagttgagtctctgaatagaccaataacaggagctgaaattgtggcaataatcaatagtttaccaaccaaaaagagtccaggaccagatggattcacagccgaattctcccagaggtacaaggaggaactggtaccattccttctgaaactattccaatcaatagaaaaagagggaatcctccctaactcattttatgaggccagcatcattctgataccaaagccaggcagagacacaaccaaaaaagagaattttagaccaatatccttgatgaacatcgatgcaaaaatcctcaataaaatactggcaaaccgaatccagcagcacatcaaaaagcttatccaccatgatcaagtgggcgtcatccctgggatgcaaggctggttcagtatacgcaaatcaataaatgtaatccagcatataaacagagccaaagacaaaaaccatatgattatctcaatagatgcagaaaaagcctttgacaaaattcaacaacccttcatgctaaaaactctcaataaattagcccaaaatctccttaagctgataagcaacttcagcaaagtctcaggatacaaaatcaatgtacaaaaatcacaagcattcctatacaccaacaacagacaaacagagagccaaatcatgagtgaactcccattcacaattgcttcaaagagaataaaatacctaggaatccaacttacaagggatgtgaaggacctcttcaaggagaactacaaaccactgctcaaggaaataaaagaggatacaaacaaatggaagaacattccatgctcatgggtaggaagaatcaatatcgtgaaaatggccatactgccccaggtaatttacagattcaatgccatccccatcaagctaccaatgactttcttcacagaattggaaaaaactactttcaagttcatatggaaccaaaaaagagcccgcatcgccaagtcaatcctaagccaaaagaacaaagctggaggcatcacactacctgacttcaaactatactacaaggctacagtaaccaaaacagcatggtactggtaccaaaacagagatatagatcaatggaacagaacagagccctcagaaataacgccgcttacctacaactatctgatctttgacaaacctgacaaaaacaagcaatggggaaaggattccctatttaataaatggtgctgggaaaactggctagccatatgtagaaagctgaaactggatcccttccttatgccttatacaaaaattaattcaagatggattaaagatttaaacattagacctaaaaccataaaaaccctagaagaaaacctaggcattaccattcaggacataggcatgggcaaggacttcatgactaaatcagcaaaaaggaatggcaacaaaagccaaaattgataaatgggatctaattcaactaaagagcttctgcacagcaaaagaaactaccatcagagtgaataggcaacctacagaatgggagaaaatttttggaatctactcatctgacaaagggctcatatacagaatctacaaagaacttaaacaaatttacaagaaaaaaacaaacaaccccatcaaaaagtgggcgaaggacatgaacagacacttctcaaaagaagacatttatgcagccaaaaaacacatgaagaaatgctcatcatcactggccatcagagaaatgcaaatcaaaaccactatgagatatcatctcacaccagttagaatggcaatcatgaaaaagtcaggaaacaacaggtgctggagaggatgtggagaaataggaacacttttacactgttggtgggactgtaaactagttcaaccattgtggaagtcagtgtggcgattcctcagggatctagaactagaaataccatttgacccagccatcccattactgggtatatacccaaaggactataaatcatgctgctataaagatacatgcacacctctcaagaaacacatcagctttcatctttatcagtatgacactgacatgataggaaatgctgggctggtgattcagcagccatccattttacagtcagaggacaagtcgtacaatggtggaggaataggttcttcaaataggatcatggacttcttggaggagccaatccctggtgtagggacctatgatgatttcaatacaattgattgggtgagagagaagtctcgagaccgggataggcaccgagagggagcctttgcctacatagtcaattatttcatgtacgtcctctgggctctcctatttgccttccttgccgtatctcttgtcaaggtgtttgcgccttatgcctgtggctctggaatccctgagataaaaactatcttgagtggtttcattattaggggctatttgggtaagtggactctggttatcaaaaccatcaccttggtgctggcagtgtcgtctggcttgagcctgggcaaagagggccctctagtgcacgtggcttgctgctgtgggaacatcctgtgccactgcttcaacaaatacaggaagaatgaagccaagcgcagagaggtcttgtcggctgcagcagcagctggtgtatctgtagcctttggagcacctataggtggagtattattcagccttgaagaggtcagctactattttcccctcaaaacattgtggcgttcattctttgctgccttggtggcagcattcactctacgctccatcaatccatttgggaacagccgcctggtactattttatgtggagtttcacaccccatggcatctctttgagctcgtgccattcattctgctgggcatatttggtggtctgtggggagcactgtttatccgcacaaacattgcctggtgtcggaagcgaaagaccacccagttgggcaagtatcctgttatagaggtactcgtcgtgacagccatcactgccatcctggctttccccaatgaatacactcggatgagcacaagtgagctcatttctgagctgtttaatgactgtggccttctggactcctccaagctctgtgattatgagaaccgtttcaacacaagcaaagggggtgaactgcctgacagaccggctggcgtgggagtctacagtgcaatgtggcagctggctttaacactcatactgaaaattgtcattactatattcacctttggcatgaagatcccttctggcctctttatccctagcatggctgttggtgctatagcaggtcgacttctaggagtaggaatggaacagctggcttattaccaccaggaatggaccgtcttcaatagctggtgtagtcagggagctgattgcatcacccccggcctttatgcaatggttggggctgcagcctgcttagccaaagaagagtttgctcataagaccctggcaatggatgtgatgaaaccccggagaaatgatcctttgttgactgtccttactcaggacagtatgactgtggaagatgtagagaccataatcagtgaaaccacttacagtggcttcccagtggtggtatcccgggagtcccaaagacttgtgggctttgtcctccgaagagatctcattatttcaattgaaaatgctcgaaagaaacaggatggggttgttagcacttccatcatttatttcacggagcattctcctccattgccaccatacactccacccactctaaagcttcggaacatcctcgatctcagccccttcactgtgactgaccttacacccatggagatcgtagtggatattttccgaaagctgggactgcggcagtgcctggttacacacaacgggcgattgcttggaatcattaccaaaaaggatgtgttaaagcatatagcacagatggcgaaccaagatcctgattccattctcttcaactag

SEQ ID NO: 10245 - DNA, 4323 bp, Homo sapiens
  SIMILAR (2464)..(4059): 961254mologous to Homo sapiens putative p150,accession number U93564,Smith-Waterman Score=2689.
atgggagactttaacaccccactgtcaacattagacagatcaatgagacagaaagtcaaaaaggatacccaggaattgaactcagctctgcaccaagcagacctaatagacatctacagaactctccaccccaaatcaacagaatatacatttttttcagcaccacaccacacctattccaaaattgaccacatacttggaagtaaagctctcctcagcaaatgtaaaagaacagaaattataacaaactatctctcagacggcagtgcaatcaaactagaactcaggattaagaatctcactcaaaaccgctcaactacatggaaactgaacaacctgctcctgaatgactactgggtacctaacgaaatgaaggcagaaataaagatgttctttgaaaccaacgagaacaaagacacaacataccagaatctctgggacgcattcaaagcagtgtgtagagggaaatttatagcactaaatgcccacaagagaaagcaggaaagatccaaaattgacaccctaacatcacaattaaaagaactagaaaagcaagagcaaacacattcaaaagctagcagaaggcaagaaataactaaaatcagagcagaactgaaggaaatagagacacaaaaaacccttcaaaaaattaatgaatccaggagctggttttttgaaaggatcaacaaaatagatagaccgctagcaagactaataaagaaaaaaagagagaagaatcaaatagatacaataaaaaatgataaaggggatatcaccaccaatcccacagaaatacaaactaccatcagagaatactacaaacacctctacgcaaataaactagaaaatctagaagaaatggataaattccttgacacatacactctcccaagactaaaccaggaagaagttgaatctctgaatagaccaataacaggatctgaaattgtggcaataatcaatagcttaccaaccaaaaagagtccaggaccagatggattcacagccgaattctaccagaggtacaaggaggaactggtaccattccttctgaaactattccaatcaatagaaaaagagggaatcctcctgttggaagttctggccagggcaattaggcaggagaaggaaataaagggtattcaattaggaaaagaggaagtcaaattttccctgtttgcagacgacatgattgtatatctagaaaaccccattgtctcagcccaaaatctccttaagctgataagcaacttcagcaaagtctcaggatacaaaatcaatgtacaaaaatcacaagcattcttatacaccaacaacagacaaacagagagccaaatcatgagtgaactcccattcacaattgcttcaaagagaataaaatacctaggaatccaacttacaagggatgtgaaggacctcttcaaggagaactacaaaccactgctcaaggaaataaaagaggatacaaacaaatgcaagaacattccatgctcatgggtaggaagaatcaatatcgtgaaaatggccatactgcccaaggtaatttacagattcaatgccatccccatcaagctaccaatgcctttcttcacagaattggaaaaaactactttaaagttcatatggaaccaaaaaagagcccgcatcgccaagtcaatcctgagccaaaagaacaaagctggaggcatcacgctacctgacttcaaaccatactacaaggctacagtaaccaaaacagcatggtactggtaccaaaagagagatatagatcagtggaacagaacagagccctcagaaataacgccgcatatctacaactatctgatctttgacaaacctgagaaaaacaagcaatggggaaaggattccctatttaataaatggtgctgggaaaactggctggccatatgtagaaagctgaaactggatcccttccttacaccttatacaaaaatcaattcaagatggattaaagacttaaacgttagacctaaaaccataaaaaccctagaagaaaacctaggcaataccattcaggacataggcatgggcaaggacttcatgtctaaaacaccaaaagcaatggcaacaaaagacaaaattgacaaatgggatctaattaaacttaagagcttctgtacagcaaaagaaactaccatcagagtgaacaggcaacctacaaaatgggagaaaattttcacaacctactcatctgacaaagggctaatatccagaatctacaatgaactcaaacaaatttacaagaaaaaaacaaacaaccccatcaaaaagtgggcgaaggacatgaacagacacttctcaaaagaagacatttatgcagccaaaaaacacatgaaaaaatgctcatcatcactggccatcagagaaatgcaaatcaaaaccacaatgagataccatctcacaccagttagaatggcgatcattaaaaagtcaggaaacaacagtcttgctagtggtctatcaattgacaaaattcaacaacccttcatgctaaaaactctcaataaattaggtattgatgggacgtatttcaaaataataagagctatctatgacaaacccacagccaatatcatactgaatgggcaaaaactggaagcattccctttgaaaactggcacaagacagggatgccctctctcaccgctcctattcaacatagtgttggaagttctggccagggcaatcaggcaggagaaggaaataaagggtattcaattaggaaaagaggaagtcaaattgtccctctttgcagacgacatgattgtttatctagaaaaccccatcgtctcagcccaaaatctccttaagctgataagcaacttcagcaaagtctcaggatacaaaatcaatgtacaaaaatcacaagcattcttatacaccaacaacagacaaacagagagccaaatcatgagtgaactcccattcacaattgcttcaaagagaataaaatacctaggaatccaacttacaagggatgtgaaggacctcttcaaggagaactacaaaccactgctcaaggaaataaaagaggatacaaacaaatggaagaacattccatgctcatgggtaggaagaatcaatatcgtgaaaatggccatactgcccaaggtaatttatagattcaatgccatccccatcaagctaccaatgactttcttcacagaattggaaaaaactactttaaagttcatatggaaccaaaaaagagcccgcattgccaagtcaatcctaagccaaaagaacaaagccggaggcatcacactacctgacttcaaactatactacaaggctacagtaaccaaaacagcatggtactggtaccaaaacagagatatagatcaatggaacagaacagagccctcagaaataacgccgcttacctacaactatctgatctttgacaaacctgagaaaaacaagcaatggggaaaggattccctatttaataaatggtgctgggaaaactggctagccatatgtagaaagctgaaactggatcccttccttacaccttatacaaaaatcaattcaagatggattaaagatttaaacgttagacctaaaaccataaaaaccctagaagaaaacctacgcattaccattcaggacatagggatgggcgaggacttcatgtccaaaacaccaaaagcaatggcaacaaaagccaaaattgacaaatgggatctaattaaactaaagagcttctgcacagcaaaagaaactaccatcagagtgaacaggcaacctacaaaatgggagaaaattttcgcaacctactcatctgacaaagggctaatatccagaatctacaatgaactcaaaccaatttacaagaaaaaaacaaacaaccccatcaaaaagtgggcgaaggacatgaacagacacttctcaaaagaagacatttatgcagccaaaaaacacatgaaaaaatgctcatcatcactggccatcagagaaatgcaaatcaaaaccacaatgagatatcatctcacaccagttagaatggcaatcattaaaaagtcaggaaacaacagaagtaaagacataaaagatagagaagatcctttggcttatggagtttttgctccagtcgtaagggtggaatcaagtttacaggaaggaagctggtgggtttcattttggacagaacgaggacgagctatgtgggagaacattcaaatagagctaggattcaggaagaagcaggacccaggatgccaccttacgtggaaatgtggatactacttctatgatggacgaagaggaggaagttgtttgcagatgcaactgactctgtag

SEQ ID NO: 10246 - DNA, 3230 bp, Homo sapiens
  SIMILAR (437)..(1654): 871254mologous to Homo sapiens putative p150,accession number U93567,Smith-Waterman Score=1792.
atgggagactttaacaccccactgtcaacattagacagatcaacgagacagaaagtcaacaaggatacccaggaattgaactcagctctgcaccaagcagacctaatagacatctacagaactctccaacccaaatcaacagaatatacatttttttcagcaccacaccacacctattccaaaattgaccacatagttggaagtaaagctctcctcagcaaatgtaaaagaacagaaattataacaaactatctctcagaccacagtgcaatcaaactagaactcaggattaagaatctcactcaaagccgctcaactacatggaaactgaacaacctgctcctgaatgactactgggtacataacgaaatgaaggcagaaataaagatgttctttgaaaccaacgagaacaaagacacaacataccagaatctcttgggacgcattcaaagcagtgtgtagagggaaatttatagcactaaatgcccacaagagaaagcaggaaagatccaaaattgacacccctaacatcacaattaaaagaactagaaaagcaagagcaaacacattcaaaagctagcagaaggcaagaaataacttaaaatcagagcagaactgaaggaaatagagacaaaaaaaaacacttcaaaaaattaatgaatccaggagctggttttttgaaaggatcaaaaaaactgatagaccgctagcaagactaataaagaaaaaaagagagaagaatcaaatagacacaataaaaaatgataaaggggatatcaccaccgatcccacagaaatacaaactaccatcagagaatactacaaacacctctacgcaaataaactagaaaatctagaagaaatggataaattcctcgacacatacactctcccaagactaaaccaggaagaagttgaatctctgaatagaccaataacaggagctgaaaatgtggcaataatcaatagcttaccaaccaaaaagggtccaggaccagatgaattcacagccgaattctaccagaggtacaaggaggaactggtaccattccgtctgaaactattccaatcaatagaaaaagagggaatcctccctaactcattttatgaggccagcatcattctgataccaaagccaggcagagacacaaccaaaaaagagaattttagaccaatatccttgatgaacattgatgcaaaaatcctcaataaaatactggcaaaacgaatccagcagcacatcgaaaagcttatccaccatgatcaagtgggcttcatccctgggatgcaaggctggttcaatatacgcaaatcaataaatgtaatccagcatattaacagagccaaagacaaaaaccacatgattatctcaatagatgcagaaaaggcctttgacaaaattcaacaacccttcatgctaaaaactctcaataaattaggtattgatgggacgtatttcaaaataataagagctatctatgacaaacccacagccaatatcatactgaatgggcaaaaactggaagcattccctttgaaaactggcacaagacagggatgccctctctcaccactcctattcaacatagtgttggaagttctggccagggcaattaggcaggagaaggaaataaaggcccaaaatctccttaagctgataagcaacttcagcaaagtctcaggatacaaaatcaatgtacaaaaatcacaagcattcttatacaccaataacagacaaacagagagccaaatcatgagtgaactcccattcataattgcttcaaagagaataaaatacctaggaatccaacttacaagggacgtgaaggacctcttcaaggagaactacaaaccactgatcaaggaaataaaagaggatacaaacaaacggaagaacattccatgctcacgggtaggaagaatcaatatcgtgaaaatggccatactgcccaaggtaatttacagattcaatgccatccccatcaagctaccaatgactttcttcacagaattggaaaaaactactttaaagttcatatggaaccaaaaaagagcccacatcgccaagtcaatcctaagccaaaagaacaaagctgggggcatcacactacctgacttcaaactatactacaaggctacagtaaccaaaacagcatggtactcgtaccaaaacagagatatagatcaatggaacagaacagagccctcagaaataacgccacatatctacaactatctgatctttgacaaacctgagaaaaacaagcaatggggaaaggattccctatttaataaatggggctgggaaaactggctagccatatggagaaagctgaaactggatcccttccttacaccttatacaaaaatcaattcaagatggattaaagacttaaacgttagacctaaaaccataaaaaccctagaagaaaacctaggcattaccattcaggacataggcatgggcaaggacttcatgtctaaaacaccaaaagcaatggcaacaaaagacaaaattgacaaatgggatctaatgaaactaaagagcttctgcacagcaaaagaaactaccatcagagtgaacaggcaacctacagagaggggagaaaattttcgcaacctactcatctgacaaagggctaatatccagaatctacaatgaactcaaactaatttacaagaaaaaaacaaacaaccccatcaaaaagtgggcgaaggacatgaacagacacttctcaaaagaagacatttatgcagccaaaaaacacatgaaaaaatgctcatcatcactggccatcagagaaatgcaaatcaaaaccacagtgagataccatctcacaccagttagaatggcgatcattaaaaagtcaggaaacaacagggacatggatgaagttggaaatcatcattctcagcaaactgtcacaaggacaaaaaaccaaacaccgcatattctcactcatacgtgggaactgaacaatgagatcacatggacacaggaaggagaatatcacactctggggactgtgacatcagaactccaggttctctggtctttggattctgggacttacagcagtgggccccttgtgttctcaggtttggggcttgagagttacacgatttgctgtcctgagtctgagaccttgggacttggactgaaccacactaccaacttccttagttctccaacttgcagacaacttaatatgggacttcttagcttctaa

SEQ ID NO: 10247 - DNA, 3394 bp, Homo sapiens
  SIMILAR (1058)..(3064): 941254mologous to Homo sapiens putative p150,accession number U93563,Smith-Waterman Score=3349.
atgggagactttaacaccccactgtcaacattagacagatcaaggaggcagaaagttaacaagaatacccaggaattgaactcagctctgcaccaagtgcaactaatagacatctacagaactctccaccccaaatcaacagaatatacattattttcagcaccacaccacacctattccgaaattgaccacgtagttggaagtaaagcactcctcagcaaatgtaaaagaacagaaattataacaaactgtctctcagaccacagtgcaatcaaactagaactcaggattaagaaactcactcaaaactgctcaactacatggaaactgaacaacctgctcctgaatgactactgggtacataacgaaatgaaggcagaaatcaagatgttctttgaaaccaatgagaacaaagacacaacatacccgaatctctgggacacattcaaagcagtgtgcagagggaaatttatagcactaaatgcccacaagagaaagcaggaaagatctgaaattgacaccctaacatcacaactaaaagaactagaaaagcaagagcaaacacattcaaaagctagcagaaggcaagaaataactaagatcagagcagaactgaaggaaatagagacacaaaaaacccttcaaaaaattaatgaatccaggagctggttttttgaaaagatcaacaaaatagatagaccgctagcaagactaataaagaagaaaagagagaagaatcaaatagactcaataaaaaatgacaaaggggatatcaccaccgatcccacagaaatacaaactaccatcagagaatactataaacacctctacgcaaataaactagaaaatctagaagaaatggataaattcctcgacacatacatcctcccaagactaaaccaggaagaagttgaatctctgaatagaacaataacaggctctgaaattgaggcaataatcaatagcttaccaaccaaaaaaagtccaggaccatatggattcacagccgaattctaccagaggtacaaggaggaactgccgggcagagacacaaccaaaaaaagagaattttagaccaatatccttcatgaacattgatgcaaaaatcctcaataaaatactggcaaaccaaatccagcagcacatcaaaaagcttatccaccatgatcaagtgggcttcatccctgggatgcaaggctggttcaacatacgcaaatcaataaatgtaatccagcatacaaacagaaccaaagacaaaaaccacatgattatctcaatagatgcagaaaaggcctttgacaaaattcgacaacccttcatgctaaaaactctcaagaaattaggtattgatgggacgtatctcaaaataataagagctatctatgacagacccacagccaatatcatactgaatgggcaaaaactggaagcattccctttgaaaatgggcacaagacagggatgccctctctcaccactcctattcaacatagtgttggaagttctggccagggcaatcaggcaggagaaggaaataaagtgtattcaattaggaaaagagaaagtcaaatcgtccctgtttgcagatgacatgactgtatatctagaaaaccccatcatctcagcccaaaatctccttaaggtgataagcaacttcagcaaggtctcaggatacaaaatcaatgtacaaaaatcacaaccattcttatacaccaataacagacaaacagagagccaaatcatgagtgaactcccattcacaattgcttcaaagagaataaaatacctaggaatccaacttacaagggatgtgaaggacctcttcagggagaactacaaaccactgctcaaggaaataaaagaggatacaaacaaatggaagaacattccacgctcatgggtaggaagaatcaatatggtgaaaatggccatactgcccaaggtaatttacagattcaatgccatccccatcaagctaccaatgcctttcttcacagaattggaaaaaactactttaaagttcatatggaaccaaaaaagagcccgcatcgccaagtcaatcctaagccaaaagaacaaagctggaggcatcacaccacctgacttcaaactatactacaaggctacagtaaccaaaacagcatggtgctggtaccaaaacagagatatagaccaatggaacagaacagagccctcagaaataacgccgcatatctacaactatctgatctttgacaaacctgagaaagacaagcaatggggaaaggattccctatttaataaacggtgctgggaaaactggctagccatatgtagaaagctgaaactggatccgttccttacaccttatacaaaaatcaattcaagatggattaaagacttaaaggttagacctaaaaccataaaaaccctacaagaaaacctaggctttaccattcaggacataggcatgggcaaggacttcatgtctaaaacaccaacagcaatgggaacaaaagacaaaattgacaaatgggatctaattaaactaaagagcttctgcacagcaaaagaaactaccatcagagtgaacaggcaacctacaaaatgggagaaaattttcacaacctactcatctgacaatgggctaatatccagaatctacaatgaactcaaacaaatttacaagaaaaaaacaaacaaccccatcaaacagtgggcaaaggacatgaacagacacttctcaatagaagacatttatgcagccaaaaaacacatgaaaaaatgttcatcgtcactggccatcagagaaatgcaaatcaaaaccacaatgagataccatctcacaccagttagaatggcaatcattaaaaagtcaggaaacaacaggtgctggagaggatgtggagaaataggaacacttttacactgttggtgggactgtaaactagttcaaccattgtggaagtcagtgtggcgattcctcagggatctagaactagaaataccatttgacccagccatcccattactgggtatatacccgaatgactataaatcatgctgctataaagacacatgcacacctgggcaccctagaaagcagcccaccctgggttctataccccagaagtcacaggatcattgcgctgaagtgctaaaggacatcctgtttctagcagggactggaggagcccaggctcttctggccagtttctccttatctcaggatgttgaattcccagcaccttctgcagttattcttgagaactacaagcaaaagactgaaatgagcaccacctactggcagagcctaacagggccagccggcaaacaagaaaactgttcacagtcccagccccaagatcccaagtatacagtatggatgtgggggtttagatccaagaaacaatag

SEQ ID NO: 10248 - DNA, 4137 bp, Homo sapiens
atgggaaaaaaacagaacagaaaaactggaaactctaaaaagcagagggcctctcctcctccaaaggaacacagctcctcaccagcaacggaacaaagctggatggagaatgactttgatgagctgagagaagaaggcttcagacgatcaaattactctgagctacgggaggacattcaaaccaaaggcaaagaagttgaaaactttgaaaaaaatttagaagaatgtataactagaataactgatatagagaagtgcttaaaggagctgatggagctgaaaaccaaggctcgagaactacatgaagaatgcagaagcctcaggagccgatgtgatcaactggaagaaagggtatcagcaatggaagatgaaatgaatgaaatgaagcaagaagggaagtttagagaaaaaagaataaaaagaaatgaacaaagcctccaagaaatatgggactatgtgaaaagaccaaatctacctccgattgatgtacctgaaagtgacagggagaatggaaccaagttggaaaacactctgcaggatgttatccaggagaacttccccaacctagcaaggcaggccaacattcagattcaggaaatacagagaatgccacaaagatactcctcgagaagagcaactccaagacacataattgtcagattcaccaaagttgaaatgaaggaaaaaatgttgagggcagccagagagaaagcattcaagcaggcctcccggagagaagatgacattgccaaggtaaccagtggcatgagagttttattcaagccaggaaccacagaggtacaggagctggccctttgctatggtggaatggccaacagaaccatctcagccctcaagaccactcagaggcagctttccaagctctggaaggaggagctgctgcaggacgtgtgtgcaggactggcagaggagctgcatctgcctcccgatgcccctggtggcatggtggacttccggtgcaccctcaccctcagcttcttcttcaagttctacctgacagtccttcagaagctgggccaagagaacctggaagacaagtgtggtaaactggaccccactttcgccagtgcaactttactgtttcagaaagaccccccagccgatgtccagctcttccaagaggtgcccaagggtcagtctgaggaggacatggtgggccggcccctgccccacctggcagcggacatgcagcctctggtgaggccgtgtactgtgacgacattcctcgctacgagaatgagctgtctctccggctggtcaccagcacccgggcccacgccaagatcaagcatcgagatgaagttcaagaatatgctgtttcctatgattgtctgcccagcctggatccctgagctgaattcggtagaacatggacccgacggtatctcctttggagctgcttgccccctgagcattgtggaaaaaaccctggtggatgctgttgctaagcttcctgcccaaaagacagaggtgttcagaggggtcctggagcagctgcgctggtttgctgggaagcaagtcaagtctgtggcgtccgttggagggaacatcatcactgccagccccatctccgacctcaaccccgtgttcatggccagtggggccaagctgacacttgtgtccagaggtgagctgcctgaagcagaggtccaggaagaaggacttgggggagaaaagtctcaccagataggtcattttctggagaaacagagctcaaagttcagtgacccagctttccctgtgatttggatccagggaagcatggagaatgtacctggtttggtggacgggaaagctggatattttctctgtagagaattcacagcaggaactgctacctgcatgccttacctagtggggcaccaggagaactgtccagatggaccacaccttcttccctggctacagaaagaccctgctgagcccggaggagatactgctctccatagagatcccctacagcagggagaaatacaaactaccatcagagaatactacaaacacctctccgcaaataaactagaaaatctagaagaaatggataaattcctcgacacatacactctcccaagactaaaccagaaagaagttgaatctctgaatagaccaataacaggagctgaaattgtgccaataatcaacagcttaccaaccaaaaagagttcaggactagatggattcacagccgaattctaccagaggtacaaggaggaactgcatataaacagaaccaaagacaaaaaccacatgattatctcaatagatgcagaaaaggcctttgacaaaattcaacaacccttcatgctaaaaactctcaataaattaggtattgatgggacgtatctcaaaataataagagctatctatgacaaacccacagccaatatcatactgaatgggcaaaaactggaagcattccctttgaaaactggcacaagacagggatgccctctctcaccactcctattcaacatagtgttggaagttctggccagggcaatcaggcaggagaaggaaataaagggtattcaattaggaaaagaggaagtcaaattgtccctgtttgcagatgacatgattgtatatctagaaaaccccattgtctcagcccaaaatccccttaagctgataagcaacttcagcaaagtctcaggatacaaaatcaatgtacaaaaatcacaagcattcttatacaccaataacagacaaacagagagccaaatcatgagtgaactcccattcacaattgcttcaaagagaataaaatacctaggaatccaacttacaagggacgtgaaggacctcttcaaggagaactacaaaccactgctcaatgaaataaaagaggatacaaacaaatggaagaacattccatgctcatgggtaggaagaatcaatatcatgaaaatggccatactgcccaaggtaatgtatagattcaatgccatccccatcaagctaccaatgcctttcttcacagaattggaaaaaactactttaaagttcatatggaaccaaaaaagagcccgcatcatcaagtcaatcctaagcccaaagaacaaagctggaggcatcacgctacctgacttcaaactatactgcaaggctacagtaaccaaaacagcatggtactggtaccaaaacagaaatatagatcaatgcaacagaacagagccctcagaaataatgccacatatctacaactatctgatctttgacaaacctgacaaaaacaagcaatggggaaaggatcccctatttaataaatggtgctgggaaaactggctagccatatgtagaaagctgaaactggatcccttccttacaccttacacaaaaattaattcaagatggattaaagacttaaacattaggcctaaaaccataaaaaccctagaagaaagcctaggcattaccattcaggacataggcatgggcaaggacttcatgtctaaaacaccaaaagcaatggcaacaaaagacaaaattgacaaatgggatctaattaaactaaagagcttctgcacagcaaaagaaactaccatcagagtggacaggcaacctacagaatgggagaaaattttcacaacctactcatctgacaaagggctaatatccagaatctacaatgaactcaaacaaatttacaagaaaaaatcaaacaaccccatcaaaaagtgggcaaagcatatgaacagatgcttctcaaaagaagacatttatgcagccaaaagacacaggctgaaagacactcctcggaagcagctgcgatttgaaggggagcgtgtgacgtggatacaggcctcaaccctcaaggagctgctggacctcaaggctcagcaccctgacgccaagctggtcgtggggaacacggagattggtaagggccagggaggctgccctggggctgccagggggtctgggggtgtttctaggtcctcttgcccatcctcacctccccctgactttacttgcctctgcaccctatccctctgccccactgactacctggagcccactggaaatccctggacactccagttcctgcaaaggcccctagctgtggagtcccacaggcctgctcagccccttgctggatgtgtgacctcagaatag

SEQ ID NO: 10249 - DNA, 5195 bp, Homo sapiens
  SIMILAR (766)..(527): 651254mologous to Mus musculus synembryn,accession number AF288813,Smith-Waterman Score=259.
atgggagactttaacaccccactgtcaacattagacagatcaacgagacagaaagtcaacaaggatacccaggaattgaactcagctctgcaccaagcggacctaatacacatctacagaactctccaccccaaatcaacagaatatacatttttttcagcaccacaccacacctattccaaaattgaccacatagttggaagtaaagctctcctcagcaaatgtaaaagaacagaaattataacaaactatctctcagaccacagtgcaatcaaactagaactcaggattaagaatctcactcaaagccgctcaactacatggaaactgaacaacctgctcctgaatgactactgggtacataacgaaatgaaggcagaaataaagatgttctttgaaaccaatgagaacaaagacacaacataccagaatctctgggacgcattcaaagcagtgtgtagagggaaatttatagcactaaatgcccacaagagaaagcaggaaagatccaaaattgacaccctaacatcacaattaaaagaactagaaaagcaagagcaaacacattcaaaagctagcagaaggcaagaaataatgaaaatcagagcagaactgaaggaaatagagacacagaaaaccctttcaaaaaattaatgaattccaggagctggtttttttgaaaggatcaacaaaattgatagaccgctagcaagactaataaagaaaaaaagagaggagaatcaaatagacggcaataaaaaatgataaaggggatatcaccactgatcccacagaaatacaaactaccatcagagaatactacaaacacctctacgtaaataaactagaaaatctagaagaaatgaataaattcctcgacacatgcactctcccaagactaaaccaggaagaagttgaatctctgaatagaccaataacaggagctgaaattgtggcaataatcaatagcttaccaaccaaaaagagtccaggaccagatggattcacagccgaattctaccagaggtacaaggaggaactgcatataaacagaaccaaagacaaaaaccacatgattatctcaatagatgcagaaaaggcctttgacaaaattcaacaacgcttcatgctaaaaactctcaataaattaggtattgaagggacgtatttcaaaataataagagctatctatgacaaacccacagccaatatcataatgaatgggcaaaaactggaagcattccttttgaaaactggcacaagacagggatgccctctctcaccactcctattcaacatagtgttggaagttctggccagggcaattaggcaggacaaggaaataaagggtattcaattaggaaaagaggaagtcaaattgtccctgtttgcagatgacatgattttatatctagaaaaccccattgtctcagcccaaaatctccttaagctgataagcaacttcagcaaagtctcaggatacaaaatcaacgtacaaaaatcacaagcattcttatacaccaacaacagacaaacagagagccaaataatgagtgagctcccattcacaattgcttcaaagataataaaatacctaggaatccaacttacaagggatgtgaaggacctcttcaaggagaactacaaaccaatgctcaaggaaacaaaagaggatacaaacaaatggaagaacattccatgctcatgggtaggaagaatcaatattgtgaaaatggccatactgcccaaggtaatttatagattcaatgccatccccatcaagctaccaatgactttcttcacagaattggaaaaaactactttaaagttcatatggaaccaaaaaagagcccacatcgccaagtcaatcctaagccaaaagaacaaagctggaggcatcacactacctgacttcaaactatactacaaggctacagtaaccaaaacagcatcggtactggtaccaaaacagagatatagatcaatggaacagaacagagccctcagaaataatgccgcatatctacactattctgatcctttggacaaacctgagaaaaacaagcatgggggaaaggcatccctaatttataaaatggctgctggggaaaactggctagcccatatgtaggaagctgaaactggatcccttccttacatcttatacaaaaatcaattcaagatggattaaagacttaaatgttagacctaaaaccataaaaacctcagaagaaaacctaggcattaccattcaggacataggcatgggcaaggacttcatgtctaaaacaccaaaagcaatgccaacaaaagccaaaattgacaaatgggatctaattaaactaaagagcttctgcacagcaaaagaatctaccatcagagcgaacaggcaacctacaaaatgggagaaaattttcgcaacctactcatctgacaaagggctaatatccagaatctacaatgaactccaacaaatttacaagaaaaaaacaaacaaccccatcaaaaagtgggcgaaggacatgaacagacacttctcaaaagaagacatttatgcagctaaaaaacacgtgaaaaaatgctcatcatcactggccatcagagaaatgcaaatcaaaaccacaatgagataccatctcacaccagttagaatggcaatcattaaaaagtcaggaaacaacaggagctggtattttgaaaagatcaacaaaattgatagactgctagcaagactaataaagaaaaaaagagagaagaatcaaatagacgcaataaaaaatgataaaggggatatcaccactgatcccacagaaatacaaactaccaccagagaatactataaacacctctatgcaaataaactagaaaatctagaagaaatggataaattcctcgacacatacaacctcccaagactaaagcaggaagaagttgaatctctgaatagaccaataagaggctctgaaattgtggcaataatcaatagcttaccaaccaaaaaaagtccaggaccagatggattcacagccgaattctaccacaggtacaaagaggagctggtaccattgcttctgaaactattccaatcaatagaaaaagaggtaatcctccctaactcattttatgaggccagcatcatcctgataccaaagcctgacagagacacagcaaaaaaagagaattttagaccaatatccttgatgaacatcgatgcaaaaatcctcaataaaatactggcaaaccgaatccagcagcacatcaaaaagcttatccaccatgatcaagtgggcttcatccctgggatgcaaggctggttcaacatacgcaaatcagtaaatgtaatccagcatataaacagaaccaaagacaaaaaccacatgatcatctcaatagatgcagaaaagtcctttgataaaattcaacaacacttcatgctaaaaactctcaataaattaggtattgatgggtcatatctcaaaataataagagctacctatgacaaacccacagccaatatcatactgaatgggcaaaaactggaagcattccctttgaaaactggcacaagacacggatgccccctctcaccactcctattcaacatagtgttggaagttctggccagagcaatcaggcaggagaaggaaataaagggtattcaattaggaaaagaggaagtcaaattgtccctgttcatagatgacatgattgtatatctagaaaaccccatcatctcagcccaaaatctccttaagctgataagcaacttcagcaaagtctcaggatacaaaatcaatgtgcaaaaatcacaagcattcttatacaccaacaacagacaaacagagagccaaatcatgagtgaactcccattcacaattgcttcaaagagaataaaatacctaggaatccaacttacaagggatgtgaaggacctcttcaaggagaactacaaaccactgctcaaggaaataaaagaggacacaaacaaatggaagaacattccatgctcatgggtaggaagaatcaatatcgtgaaaatggccgtactgcccaaggtaatttacagattcgatgccatccccatcaagctaccaatgactttcttcacagaattggaaaaaactactttaaagttcatatggaaccaaaaaagagcccgcatcgccaagtcaatcctaagccaaaagaacaaagctggaggcatcacactacctgacttcaaactatactacaaggctacagtaaccaaaacagcatggtactggtaccaaaacagagatatagatcaatggaacagaacagagccctcagaaataatgccgcatatctacaactatctgatctttgacaaacctgagaaaaacaagcaatggggaaaggattccctatttaataaatggtgctgggaaaactggctagccatatgtagaaagctgaaactggatcccttccttacaccttatacaaaaatcaattcaagatggattaaagatttaaacgttagacctaaaaccataaaaaccctagaagaaaacctaggcattaccattcaggacataggcgtgggcaaggacttcatgtccaaaacaccaaaagtaatggcaacaaaagccaaaattgacaaatgggatctaattaaactcaagagcttctgcacagcaaaagaaactaccatcagagtgaacaggcaacctacaacatgggagaaaattttcgcaacctactcatctgacaaagggctaatatccagaatctacaatgaactcaaacaaatttacaagaaaaaaacaaacaaccccatcaaaaagtgggcgaaggacatgaacagacacttctcaaaagaagacatttatgcagccaaaaaacacatgaagaaatgctcatcatcactggccatcagagaaatgcaaatcaaaaccactatgagatatcatctcacaccagttagaatggcaatcattcaaaagtcaggaaacaacagggacaacacaaaggaagcactgctgtgtaacaacttggtggctgaagtcttggaggccaaacaggctcagaagcttcaaggcaaagcagccgtcctcagcctctcaaaaatctatgcgatcacagagacaaatgctgagacacccaacaggaagatgaaaattaaactgaagagacccatgaccaaattgcacccaagcatccaaatgttggtg

SEQ ID NO: 10250 - DNA, 4397 bp, Homo sapiens
  SIMILAR (2335)..(2994): 631254mologous to Homo sapiens ORFII,accession number X52235,Smith-Waterman Score=667.
atgaagcaagaagggaagtttagagaaaaaagaataaaaagaaatgaacaaagcctccaagaaatatgggactatgtgaaaagaccaaatctacatctgattggtgtacctgaaagtgacagggagaatggaaccaagttggaaaacactctgcaagatattatccaggaggacttccccaatctagcgaggaaggccaacattcagattcaggaaatacagagaactccacaaagatactcctcgagaagagcaactccaagacacacaattgtcagattcaccaaagttgaaatgaaggaaaaaatgttaagggcagccagagagaaaggtcgggttacccacaaagggaagcccatcagactaacagcggatctctcggcagaaactctacaagccaggagagaactaaaccaggaagaagttgaatctctgaataaaccagtaacaggctctgaagttgtggcaataatcaatagcttaccaaccaaaaagagtccaggaccagatggattcacagccgaattctaccagaagtacaaggaggaaccggtaccattccttctgaaactattccaatcaatagaaaaagagggaatcctccctaactcattttatgaggccagcatcatcctgataccaaagcctggcagagacacaacaaaaaaagagaattttagaccaatatccttgatgaacattgatgcaaaaatcctcaataaaatactggcaaaccgaatcccagcagcacatccaaaaagcttatccacccatgatccaagtgggcttcatccctgggatgcaaggctggttcaacatatgcaaatcaataaacgtaatccagcatataaacaaaaccaaagacaaaaaccacatgattatctcaatagatgcagaaaaggcctgtgacaaaaattcaacaacgcttcatgctaaaaacttttaataaatttgctattgatgggacgtatctcaaaataataagagctatctatgacaaacccacagccaatatcatcctgaatgggcaaaaactggaagcattccctttgaaaactggcacaaggacagggatgccctctctcaccactcctattcaacataggtgtttgggaagttctgggccaggggcaattaggcaggagaaggaaataaagggcattcgattaggaaaagaggaagtcaaattgtccctgtttgcagacgacatgattgtatatctagaaaaccccattgtctcagcccaaaatcttcttaagctgataagcaacttcagcaaactgaatctgcaaactcaggaatacaaaatcaatgtgcaaaaatcaccaagcattcctatacaccaacaacagacaaacagagagccaaatcatgagtgaactcccatttcacaattgcttccaagagaattaaatacctaggaatccaccttacaagggacgtgaaggacctcttcaaggagaactacaaaccactgctcaatgaaataaaagaggacataaacaaatggaagaacattttcattccatgcttatgggtaggaagaatcaatatcgtgaaaatggccatactgcccaagggaatttatagattcaatgccatccccatcaagctaccaatgactttcttcacagtactggaaaaaactactttaaagttcatatggaaccaaaaaagagcccgcattgccaagtcaatcctaagcaaaaaggaacaaagctggaggtatcacactacctgacttcaaactatactacaaggctacagtaaccaaaacagcattgtacttgtaccaaaacagagatgtagatcaatggaacagaacagagccctcagaaataatgccacttatactacaactatctgatctttgacaaacctgagaaaaacaagcaatgggggaaaggattcccttatttaataaatggtgctgggaaaaactggcttagccatatgtagaaagctgaaacttggatcccttccttacaccttatacaaaaattaattcaagatggattaaagacttaaatgttagacctaaaaccataaaaaccctagaagaaaacctaggcaataccattcaggacataggcatgggcaaggacttcaatgtttaaaacagcaaaagcaatggcaacaaaagcccaaaattgacaaatgggatctaattcaactaaagagcttctgcacagcaaaagaaactaccatcagagtgaacaggcaacctacaaaatgagagaaaatattcgcaacctactcatctgacaaagggctaatatccagaatctacaatgaactcaaacaaatttacaagaaaaaaacaaacaaccctatcaaaaagtgggcaaagcacatgaacagacacttctcaaaagaagacacttatgcagccaaaaaacacatgaaaaaatgctcatcatcactggccatcagagaaatgcaaatcaaaaccacaatgagataccatctcacaccagttagaatggcaatcattaaaaagtcaggaaacaacaggtgctgttgaggatgtggagaaataggaacacttttacactgttggtgggactgtaaactagttcaaccgttgtggaagtcagtgtggcgattcctcagggatctagaaccagaaataccatttgacccagccatcccattactgggtatatacccaaaggactctaaatcatgctgctataaagacacatgcacacgtatgtttattgcggcattattcacaatagcaaagacttggaaccaacccaaatgtccaacaatgatagactggattaagaaaatgtggcacatatacaccatggaatactatgcaagccataaaaaaatgatgagtttatgtcctctgtcgggacgtggatgaagctggaaaccatcattctcagcaaactatcgcaagaacaaaaaaaccaaacaccgcgtattctcactcataggtgggaattgaacaatgagaacacatggacacagaaaggggaacatcacactctggggactgtgtaacaagttttgtgcagattgccagtctaaaggtagcgcatcccacctggcgggccaggggtccagccgcgccggggtggtgggggtgggctgcgtgatgagccagatctgcctcagctgtggccatccgtcagcgtaaggttgctctggtggtcgtcttcagtttgtccagctcttccccttatcccccatcctccctgctgaggtgtgtgggcgcacagcgcgggactggcgggcagctccacctgcagccccagtgcgagatccactggatgaagccagctgggctcctgagtctggtggggccttggagaacctttatgtctagctcagggattgtaaatacaccagtcggcactctgtgaatctgggggtgcacatatccagggtaaagtcagttaacctcgaccagtggactcaagaacagattcaggtacttagcccaagagtgagtcagctgcttccatatatctatgtaaaaggaattccagatgaatttgtttttgagaaggtgaaaatggtaagttgggaagtatttgcactgtatggacagcctcaggtatgtgtatatttgtgaaagggaatggatttgttgggccttggtaagagttggacttttcagcttccatgttcttacaaattttgataaattctcagtgaccctggtctgttggcctctgttccatccccttcttcttccggttccagaaaggtgagtcttgtgggctcctcaggattaaagaacattctgaaatgggtgattttgatatcttaatcggagccagggagcaaatcagaagaaataggcaagaaacagctctctaaagactccattctttcactgtatggatcccagacgcctcaaatgcctactcaaggtagatttcatgggtgtcatggccatgtgccaggtagagacatgagggcttccatgcaggaattacctcctaacagcataatggggagcatgatgcctccaccagtaggcatggttgctcagccaggagcttctgggatggttgcccccatggccatgcctgcaggctatatgggtggcatgcaggcatcaatgatgggtgtgccgaatggaatgatgaccacccagcaggctggctacatggcaggcatggcagctatgccccagactgtgtatggggtccagccagctcagcagctgcaatggaaccttactcaggtaagctaccccattttacttgcagcaagagttttgagccttcctcaagtttttctcggtttgtcaatgagtggcggaaatggacaggcagcaaatcagactctcagtcctcagatgtggaaataaaaacaaaacacctgtatggctgccattctcttcagccctcgctctcccctttccacagcctcca

SEQ ID NO: 10251 - DNA, 7688 bp, Homo sapiens
  SIMILAR (557)..(3): 241254mologous to Leishmania major proteophosphoglycan,accession number AJ243460,Smith-Waterman Score= 125.
aagagagcagtggttctcccagcacgcagctggagatctgagaacgggcagactgcctcctcaagtgggtccctgacccctgacccccgagcaggcctaactgggagggcaccccccagcagggggcacactgacacctcacacacggcagggtattccaacagaccttcagctgagggccctgtctgttagagggaaaactaacaaccaggaaaggacatctacaccgaaaacccatctgtacattcaccatcattcaaagacccaaaagtaaataaaacccaccaaagatggggaaaaaaaacagagcgggaaaatctggaaactcttaaaacccagagcgcctttccctcctccaaaggaacgcagttccctcaagagccaacggaaccaaagcttggagggagaatgactttgaagagctgagagaagaaggcttcagacgatcaaattacttctgagcctacgggaggacattcaaaccaaaggcaaagaagttgaaaactttgaaaaaaaatttagaagaatgtataactagaataaccaatacagagaagtgcttaaaggagctgatggagctgaaaaccaaaggctcgagaaactacgtgaaagaatgcagaacgcctcaggagccgatgcgatcaactggaagaaagggtatcagcaatggaagatgaaatgaatgaaatgaagcgagaagggaagtttagagaaaaaagaataaaaagaaatgagcaaagcctccaagaaatatgggactatgtgaaaagaccaaatctacgtctgattggtgtacctgaaagtgatgtggagaatggaaccaagttggaaaacactctgcgggatattatccaggagaacttccccaatctagcaaggcaggccaacgttcagattcaggaaatacagagaacgccacaaagatactcctcgagaagagcaactccaagacacataattgtcagattcaccaaagttgaaatgaaggaaaaaatgttaagggcagccagagagaaagacagatcaacgagacagaaagtcaacaaggatacccaggaattgaactcagctctgcaccaagcggacctaatagacatctacagaactctccaccccaaatcaacagaatatacatttttttcagcaccacaccacacctattccaaaattgaccacatagttggaagtaaaactctcctcagcaaatgtaaaagaacagaaattataacaaactatctctcagaccacagtgcaatcaaactagaactcaggattaagaatctcactcaaagccgctcaactacatggaaactgaacaacctgctcctgaatgactactgggtacataacgaaatgaaggcagaaataaagatgttctttgaaaccaacgagaacaaagacaccacataccagaatctctgggacgcattcaaagcagtgtgtagagggaaatttatagcactaaatgcctacaagagaaagcaggaaagatccaaaattgacaccctaacatctcaattaaaagaactagaaaagcaagagcaaacacattcaaaagctagcagaaggcaagaaataactaaaatcagagcagaactgaaggaaatagagacacaaaaaacccttcaaaaaatcaatgaatccaggagctggttttttgaaaggatcaacaaaattgatagaccgctagcaagactaataaagaataaaagagagaagaatcaaatagacacaataaaaaatgataaaggggatatcaccaccaatcccacagaaatacaaactaccatcagagaatactacaaacacctctatgcaaataaactagaaaatctagaagaaatggatacattcctcgacacatacactctcccaagactaaaccaggaagaagttgaatctctgaatagaccaataacaggctctgaaattgtggcaataatcaatagtttaccaaccaaaaagagtccaggaccagatggattcacagccgaattctaccagaggtacaaggaggaactggtaccattccttctgaaactattccaatcaatagaaaaagagggaatcctccctaactcattttatgaggccagcatcattctgataccaaagccgggcagagacacaaccaaaaaagagaattttagaccaatatccttgatgaacattgatgcaaaaatcctcaataaaatactggcaaaccgaatccagcagcacatcaaaaagcttatccaccatgatcaagtgggcttcatccctgggatgcaaggctggttcaatatacacaaatcaataaatgtaatccagcatataaacagagccaaagacaaaaaccacatgattatctcaatagatgaagaaaaagcctttgacaaaattcaacaacccttcatgctaaaaactctcaataaattagagaataaaatacctaggaatccaacttacaagggatgtgaaggacctcttcaaggagaactacaaaccactgctcaaggaaataaaagaggacacaaacaaatggaagaacattccatgctcatgggtaggaagaatcaatatcatgaaaatggccatactgcccaaggtaatttatagactcaatgccatccccccttcaaggttacccaatgactttcttcacagaattggaaaaaactaccttttaaaggtcattatggaaccaaaaaaggagcccgcatcgccaaggcaatcctaagccaaaagaacaaagctggaggcatcacactacctgacttcaaactatactacaaggctacagtaaccaaaacagcatggtactggtaccaaaacagagatatagatcaatggaacagaacagagccctcagaaataacgccgcatatctacaactatctgatctttgacaaaccctgggaaaaaccaagcaatgggggaaaggattccctatttaataaatggtgctgggaaaactggctagccatatgtagaaagctgaaactggatcccttccttacaccctatacaaaaatcaattcaagatggattaaagacttaaacgttagacctaagaccataaaagaccctagaagaaaacctaggcaataccattcaggacataggcacgggcaaggacttcatgtctaaaacaccaaaagcaatggcaacaaaagacaaaattgacaaatgggatctaattaaattaaagagtttctgcacagcaaaagaaactaccatcagagtgaacaggcaacctacgaaatgggagaaaattttcacaacctactcatctgacaaagggctaatatccagaatctacaatgaactcaaacaaatttacaagaaaaaaacaaacaaccccatcaaaaagtgggcgaaggatttgaacagacacttctcaaaagaagatatttatgcagccaaaagacacatgaaaaaatgctcatcatcactggccatcagagaaatgcaaatcaaaaccacaatgagataccatctcacaccagttagaatggcgatcattaaaaattcaggaaacaacagatgggacacaacagtcatgggctgtctcagctgcccaaagcctgaggcagaccacatgagagctgtggcttcttcttggattcagagagaagtaatggaaggcctgtctgatgttgcttcttttgcaactaaacttaaaaacactctcatccagtaccatagcattgaagaagataagtggcgagttgctaagaaaacgcatgtaaacagaaccaaagacaaaaaccacatgattatctcaatagatgcagaaaaggcctttgataaaattcaacagcgcttcatgctaaaaactctcaataaattaggtattgatgggacatatctcaaaataataagagctatctatgacaaacccacagccaatatcatactgaatgggcaaaaactggaagcattccctttgaaaactggcacaagacagggatgccctctctcaccactcctattcaacacagtgttggaagttctggccagggcaatcaggcaggagaaagaaataaagggtattcaactagaaaaagaggaagtcaaattgtccctgtttgcagatgacatgattgtatatctaggaaaccccatcttctcagaccaaaatctccttaagctgataagcaacttcagcaaaatctcaggatacaaaatcaatgtgcaaaaatcacaagcattcttatacaccaataacagacaaacagagagccatatcatgagtgaactcccattcacaattgcttcaaagagaataaaatacctaggaatccaacttacaagggatgtgaaggacctcttcaaagagaactacaaacacctgctcaaccgaaataaaagaggacacaaacaaatggaagaacattccatgctcatggataggaagaatcaatatcgtgaaaatggccatactgcccaaggtaatttatagattcaaggccatccccatcaagctaccacagactttcttcacagaattggaaaaaactactttaaagttcatatggaaccaaaaaagagcccgcattgccaagtcaatcttaagccaaaagagcaaagctggaggcatcacgctacctgacttcaaactatactacaaggctacagtaaccaaaacagcatggtactggtaccaaaacagagatatagaccaatggaacagaacagagccctcagaaataataccacacatctacaaccatctgatctttgacaaaactgataaaaacatgaaatgggggaaaggattccctatttaataaatggtgctgggaaaactggctagccatatgtaggagaaagctgaaactggatcccttccttacaccttatacaaaaattaattcaagatggattaaagacttaaatgttagattaaaaaccataaaaaccctagaagaaaacctaggcaataccattcaggacataggcatgggcaaggacttcatgtctaaaacaccaaaagccatggcaacaaaagccaaaattgacaaatgggatctaattaaactaaagagcttctgcacagcaaaagagaaactaccatcatagtgaacaggcaacctacagaatgggagaaaatttttaaaatctacccatctgacaaaggactaatatccagaatctacaaagaacttaaacaaatttacaagaaaaaaatcaaacaaccccatcaaaaatgtgggcaaaggatatgaacagacacttctcaaaagaagacattttatgcagccaaaagacacatgaaaaaatgttcatcatcactggccatcagagaaatgcaaatcaaaaccacataccatgctggaccagatggatttacagccgaattctaccagaggtacaaggaggaactggtaccattccttctgaaactattccaatcaatagaaaaagagggaatcctccctaactcattttatgaggccagcatcattctgataccaaagccgggcagagacacaaccaaaaaaagagaattttagaccaatatccttgatgaacattgatgcaaaaatcctcaataaaatactggcaaaacgaatccagcagcacatcaaaaagcttatccaccatgatcaagtgggcttcatccctgggatgcaaggttggttcaatatacgcaaatcaataaattgtaatccagcatataaacagagccaaagacaaaaaccacatgattatctcaatagatgcagaaaaagcctttgacaaaattcaacaacccttcatgctaaaaactctcaataaattaggtattgatgggacgtatttcaaaataataagagctatctatgacaaccccacagccaatatcatactgaatgggcaaaaactggaagcattccctttgaaaactggcacaagacagggatgccctctctcaccactcctattcaacatagtgttggaagttctggccagggcaattaggcaggagaaggaaataaagggtattcaattaggaaaagaggaagtcaaattgtccctgtttgcagacaacatgattgtatatctagaaaaccccattgtctcagcccaaaatctccttaagctgataagcaacttcagcaaagtctcaggatacaaaatcaatgtacaaaaatcacaagcattcttatacaccaacaacagacaaacagagagccaaatcatgagtcaactcccattcacaattgcttcaaagagaataaaatacctaggaatccaacttacaagggatgtgaaggacctcttcaaggagaactacaaaccactgctcaaggaaataaaagaggatacaaacaaatggaaaaacattccatgctcagggggaaggaagaatcaatatcgtgaaaatggccatactgcccaagaattggaaaaaaactactttaaagttcatatggaaccaaaaaagagcccgcattgccaagtcaatcctaagccaaaagaacaaagctggaggcatcacggtacctgacttccaactatactacaaggctacagtaaccaaaacagcatggtactggtaccaaaacagagatatagaccaatggaacagaaaagagccctcagaaataatgccacatatctatgactctctcatctttggcaaacctgacaaaaacaagcaatggggaaaggattccctatttaataaatggtgctgggaagactggctagccatatgtagaaagctgaaactggatcccttccttacaccttgtacaaaaatcaactcaagatgggttaaagacttaaatattagacctaaaaccataaaaaccctagaagaaaacctaggcaataccattcaggacataggcatggccaaggacttcatgtctaaaacaccaaaagcaatggcaacaaaagccaaaattgacaaatgggatctaattaaactaaagagcttctgcacaagaatagcaaaggaacctaccatcagagtgaacaggcaacctacaaaatgggagaaaattttcgcaacctactcatctgacaaagggctaatatccagaatctacaatgaactcaaacaaatttacaagaaaaaaacaaacaaccccatcaaaaagtgggcaaaggacatgaacagacacttctcaaaagaagacatttatgcagccaaaaaacacatgaaaaaatgctcatcatcactggccatcagagaaatgcaaatcaaaaccactatgagataccatctcacaccagttagaatggcaatcattaaaaagtcaggaaacaacaggtgctggagaggatgtggagaaacaggaacgcttttacactgttggtgggactgtaaactagctcaaccattgtggaagtcagtgtggcgattcctcagggatctagaactagaaataccatttgacccagccatcccattactgggtatatacccaaatgactataaatcatgctgctataaagacacatgcacacgtatgtttattgcggcattattcacaatagcaaagacttggaaccaacccaaatgtccaacaattatagactggattaagaaaatgtggcacatatacaccatggaatactatgcagccataaaaaatgatgagttcgtgtcctttgtagggacatggatgaaattggaaatcatcattctcagtaaactatcacaagaacaaaaaaccacacaccgcatattctcactcataggtgggaattga

SEQ ID NO: 10252 - DNA, 4526 bp, Homo sapiens
  SIMILAR (184)..(510): 981254mologous to Homo sapiens Human adult brain secreted protein nh899_8,accession number Y31830,Smith-Waterman Score=609.
atgggagactttaacaccccactgtcaacattagacagatcaacgagacagaaagttaacaaggatacccaggaattgaactcagctctgcatcaagcagacctaatagacatctacagaactctccaccacaaatcaacagaacatacattttttgcagcaccacaccacacctattccaaaattgaccacatacttggaagtaaagctctcctcagcaaatgtaaaagaacagaaattataacaaactatctctcagaccacagtgcaatcaaactagaactcaggattaagaatctcactcaaaaccgctcaactacatggaaactgaacctgctcctgaataactactgggtacataacgaaatgaaggcagaaataaagatgttctttgaaaccaacaagaacaaagacacaacataccagaatctctgggacacattcaaagcagtgtgtagagggaaatttatagcactaaatgcccacaagagaaagcaggaaagatccaaaattgacaccctaacatcacaattaaaacaactagaaaagcaagagcaaacacattcaaaagctagcagaaggcaagaaataactaaaatcagaggagaactgaaggaaatagagacacaaaaaacccttcacaaaattaacgaatccaggagctggttttttgaaaggatcaacaaaattgatagactgctagcaagactaataaagaaaaaaagagagaagaatcaaatagatgcaataataaatgataaaggggatatcaccaccgatcccacagaaatacaaactaccttcagagaatactacaaacacctctacgcaaataaactagaaaatctagaagaaatggataaattcctcgacacatacactctcccaagactaaaccaggaagaagttgagtctctgaatagaccaataacaggagctgaaattgtggcaataatcaatagcttaccaacgaaaaagagtccaggaccagatggattcacagccaaattctaccagaggtacaaggaggaactgagaataaaatacctaggaatccaacttacaagggatgtgaaggacctcttcaaggagaactacagaccactgctcaaagaaataaaagaggatacaaacaaatggaagaacattccatgctcatgggtaggaagaatcaatataatgaaaatggccatactgcccaaggtaatttacagattcaatgccatccccatcaagctaccaatgactttcttcacagaattggaaaaagctactttaaagttcatatggaaccaaaaaagagcctgcatcgccaagtccatcctgagccaaaagaacaaagctggaggcatcacactacctgacttcaaactatactacaaggctacagtaaccaaaacagcatggtactggtaccaaaacagagatatagatcaatggaacagaacagagcccacagaaataacaccacatatctacaactatctgatctttgacaaacctgagaaaaacaagcaatggggaaaggattccctatttaataaatggtgcttggaaaactggctagccatatgtagaaagctgaaactggatcccttccttacaccttatacaaaaatcaattcaagatggattaaagacttaaacgttagacctaaaaccataaaaaccctagaagaaaacctaggcattaccattcaggacataggcatgggcaaggacttcatgtctaaaacaccaaaagcaatggcaacaaaagccaaaattgacaaatgggatctaattaaactaaagagcttctgcacagcaaaagaaactaccatcagagaatttgagcagtttaacaggaggctaaatgaagtttctaagagagttcgcatacccttgcctgtgtctaatatactttgggaacattgtatacgattggctaatcgaactattgtagaaggatatgccaatgtcaagaaatgcagtaatgagggtcgtgccctgatgcaattggattttcaacagtttttaatgaaacttgaaaaactaacagatattagacccattcctgataaagaatttgtagaaacttatattaaagcttattacctaactgagaatgacatggaacggtggatcaaagagcacaggttgaggggaagaagagagtctgtagagaagagagacccagaacttcatctgtgtgttctgctgtgcatccttgacagcacctggcacagaatctcagctaagatggatgaaatgcaagtactcaggccctttgaactagaatttttgcctaaactgaaagagttgaaatacctgagactgggcgatttacaaacgaaagaggcttataatggacttaccattccacgtggctggggaagcttcacaatcatggtggaaggcaaggaggagcaggtcatgtcttacatggatggcagcaggcaaaaagagaatgaggaagacactgcagatgacatgattatatatctagaaaaccccattgtctcagcccaaaatctccttaagctgataagcaatttcagcaaagtctcaggatacaaaatatacaaaatcgatgtgcaaaaatcacaagcattcctatacaccaataatagacaaacagagagccaaatcatgagtgaactcccagttcacaattgcttcaaagagaataaaatacctaggaatccaacttacaagggatgtgaaggacctcttcaaggagaactacaaaccactgctcaaggaaataaaagaggatacaaacaaatggaagaacattccatgctcatgggtaggaagaatcaatatcatgaaaatggccatacttgcccaaggtaatttacagattcaatgccatccccatcaagctaccaatgactttcttcacagaattggaaaaaaactactttaaagttcatatggaaccaaaaaagagcccgcatcgcccaagtccaatccctaagcccaaaagaacaaaagccgggggcatcaaccctacctgacttcaaactatactacaagggctacagtaaccaaaacagcataggtactggtaccaaaacagagatatagaccaatggaacagaacagagcccctcagaaataaggcccacataccctacaactatctgatctttggacaaacctgacaaaaacaagcaatgggggaaaggattcccctatttaataaatggtgctgggaaaactggctagccatatgtagaaagctgaaactggatcccttccttacaccttatacaaaaaatcaaattcaagatggattaaagacttaaacgttagacctaaaaccataaaaaaccctagaagaaaacctaggcatttaccattcaggacataggcatgggcaaggacttcatgtctaataaaacaccaaaagccaatggcaaccaaaagacaaaattgacaaatgggatctaatttaaactaaagagcttcctgcacagcaaaagaaactaccatcagagtaaacaggccaacctacaaaatggaagaaaattttcacaacctactcatctgagaaaagggctaatatccagaatctacaatgaactcaagcaaatttacaagaaaaaaaaaacaaacaatcccatcaaaaagtgggcgaaggatatgaacagacacttctcaaaagaagacacttatgcagccaaaaaaacacatgaaaaaatgctcaaccatcactggccatcagagtaatgcaaatcaaaaccacaatgagataccatctcacaccagttagaatggcaatcattaaaaagtcaggaaacaacaggtgctggagaggatgcggagaaataggaacacttttacactgttggttggactgtaaactagttcaaccattgtggaagtcagtgtggcgattcctcagggatctagaactagaaataccatttgacccagccatcccattactgggtatatacccaaatgagtataaatcatgctgctataaagacacatgcacacgtatgtttattgcggcattattcacaatagcaaagacttggaaccaacccaaatgtccaacaatgatagactggattaagaaaatgtggcacatatacaccatggaatactatgcagccataaaaaatgatgagttcatgtcctttgtagggacatggatgaaattggaaaccatcattctcagtaaactatcgcaagaacaaaaaaccaaacaccgcatattctcactcatagaccgtcttgaccagcgcaacttcctcctaggttccagcggggcctttccactgtcccatgacctggctgagcgggaccaggcctctgggacaggcaaggcctctcctcacaggcaactcaacccttcacatccagcccagccctcggtggactccggaccgctgaccgccaatcacaacacagcctctgctactttcagcctgccctgcctttgggctaaggctcccccagctggccacctggaacatggcacctttcgagtgaaaagttttctgggccacagtcctgccatcaatcaataa

SEQ ID NO: 10253 - DNA, 1217 bp, Homo sapiens
  SIMILAR (694)..(915): 691254mologous to Homo sapiens dJ50O24.4 (novel protein with DHHC zinc finger domain),accession number AL034380,Smith-Waterman Score=296.
atggaagatataaaaaggacccaaaataaactttcagagatgaaagctacactggctgagatgaaaaatacgttggatgggattaatgaccatggaagagattccagaagaaagattcgtaaacttcaagacaatggcggagatgacccaacaggaaacacacagagaaagaagaatttaataaatggtccatcactgagtgtgcacattggagaaaagagaggaggaagaaggagttgggcagagactctcacccctctgcaaaccaaggctctgaggctgggacctactactccttctgctaggagaaaatgtggtattgtgcccaatttacagacaaggaaaactgaggcctatagatacccagacactcacccaggggagacgcctgttggcactgcagtcctcagcattcagaagccaaaattagagtctgtgattgatgtgcgagtcaatatgtcgtcctttcacccagagcctgagctgcagccaactcaaaccagtgtgcttcctgatcaggatgccacagtcgctggctccacaacgaaattcccggaagagcaggaagcaaggcaaggccgggtgagagagaggccagcaactagagagaggcctgtgcccgggggtgtttcggttccaggcctccatcacatccacttcttgcgcggtccctcacttccgcttgcctccttgactcgcatcaccgtcctggaggctgtggtgtgcttcttctctgtctggtccatcgttggcctctcaggattccacacctacttgatcagctccaaccagacaacaaatgaggacattaaaggatcctggtcaaataaaagaggtaaagaaaattacaatccctacagctacggaaatatctttaccaactgctgtgttgccctgtgtgggcccatctcaccaaggacaccagccacactggacaaaggcccaccccaattgagtgtgaacctcatcttaacttggttacatctgcagagacgctacttgcaagtaagcctgatcgacagaagagggtacatccagcccgacacgccgcagccagcagcaccctccaatggcatcaccatgtacggggccacgcagtcacagagtgacatgcacattggagaaaagagaggaggaagaaggagttgggcagagactctcacccctctgcaaaccaaggctctgaggctgggacctactactccttctgctaggag

SEQ ID NO: 10254 - DNA, 466 bp, Homo sapiens
  SIMILAR (268)..(1431): 681254mologous to Homo sapiens selenium donor protein,accession number U34044,Smith-Waterman Score=1236.
  misc_feature (1)...(466): n = a,t,c or g
aggtccagcgggacttgtaggccaaagtcatctgcatctgtgagggcttctcggaccaggcccccccactgcttgctgatgcggcccacactgcgggattcatcccgagtcttcacctcaaagttggtgtctgtgccacagccacaggtccagcagggccccaccactcgcaagactgtctggcgatcggcatcctggatggagaacttggggaggaagggatgccaggtctgtagcacgtggccaatggtggtgcctggtggagcctgtacttccattttccactcgctcagccttctggtgaatcaaaatctgatcaatctgccatgggagaagggctggggttttcgagatgatggtgtctgggtggcttagttctggaagcggaggcaaactcggagatagccagacagacacagagcggacgcgtgggtcaatnnnnaattccggagcggtccgcaaggat

SEQ ID NO: 10255 - DNA, 2183 bp, Homo sapiens
  SIMILAR (66)..(194): 461254mologous to Capsicum annuum proline-rich protein,accession number AJ006984,Smith-Waterman Score=96.
  misc_feature (1)...(2183): n = a,t,c or g
atatccgtgaccctgggaagaagcctgtgatgctgtttctccatggcggctcctacatggaggggaccggaaacatgttcgatggctcagtcctggctgcctatggcaacgtcattgtagccacgctcaactaccgtcttggggtgctcggttttctcagcaccggggaccaggctgcaaaaggcaactatgggctcctggaccagatccaggccctgcgctggctcagtgaaaacatcgcccactttgggggcgaccccgagcgtatcaccatctttggccggtactcacagcctggcctgagctaccacatcgcctttgggcccgtggtggatggcgacgtggtccccgatgaccctgagatcctcatgcagcagggagaattcctcaactacgacatgctcatcggcgtcaaccagggagagggcnctcaagttcgtggaggactctgcagagagcgaggacgcgcctttgacttcactgtctccaactttgtggacaacctgtatggctacccggaaggcaaggatgtgcttcgggagaccatcaagtttatgtacacagactgggccgaccgggacaatggcgaaatgcgccgcaaaaccctgctggcgctctttactgaccaccaatgggtggcaccagctgtggccactgccaagctgcacgccgactaccagtctcccgtctacttttacaccttctaccaccactgccaggcggagggccggcctgagtgggcagatgcggcgcacggggatgaactgccctatgtctttggcgtgcccatggtgggtgccaccgacctcttcccctgtaacttctccaagaatgacgtcatgctcagtgccgtggtcatgacctactggaccaacttcgccaagactggggaccccaaccagccggtgccgcangataccaagttcatccacaccaagcccaatcgcttcgaggaggtggtgtggagcaaattcaacagcaaggagaagcagtatctgcacataggcctgaagccacgcctctggagccgattccgtggtgtcttataccaagtgttccatgataccatttgtgagaaagaagctcccaagtcatcattactcagaaagcagacccagccccctaagaagcagagttctcctgcagtccatcttcggtgcaccatggaccctgtgatgatgactgtgtccccgcccccagctcaccgccatcgccgtcgaggctctcccacacgctgtgctcactgcccagtagcttgggctcctgacactgatgacgagaagcctcatcagtacccagccatctgctcctaccactgggatgtccctgaggactgggaaggcttccaacacactcaggggacctgggttccctggtctcaggatgccccagagtcccctccccagaccatccgcttccagcctaccgtagaggaaaggcccctcaaaacaggcatatggtccgagctgggcctaagggcctatgtgtatcctgtgaaccccccacctcccagccctgaggctcctagccacaagaacggccgaatagtgtatgatgcccgggacatgagacggcggcttcgggaactgacccgggaggtggaggccctgtccggctgctaccccctagcctctggatccagcactgccgaggagacaagcaagaattgggtgtaccgttccctaactgggagccaaaagatgtcacaactacaccgagtgcctttctttgatcaggaggacccggattcctacctggaggaggaggacaacctgcccttcccgtatcccaagtacccacgtcgcggctggggcgggttttatcagagagcgggcctgccctccaatgtggggctgtggggccaccagggtggtatcctggccagtctgccaccaccctctctctacctgtcacctgagctgcgctgcatgcccaagcgtgtagaggccaggaagtgccaggacttaggagactcgattcttcttcttctgggcagcttcatcttgctcaacgtgtggatcaatgtggtgactctgctctggaagcatctgaagagctccttgcggattcttttccgtcattttttccccaaaggaatgcgcaggaaagctcagcaggccgcggaaaaagaaggccctggccctgcatacggggcacacacgaacgaccaccagcgcaaatga

SEQ ID NO: 10256 - DNA, 392 bp, Homo sapiens
  SIMILAR (3)..(416): 891254mologous to Homo sapiens dJ483K16.1.2 (novel protein (isoform 2)),accession number AL034374,Smith-Waterman Score=628.
attcggcacgagggtaacccacatcgcagccaaaagatgtcacaactacaccgagtgcctttctttgatcaggaggacccggattcctacctggaggaggaggacaacctgcccttccagtatcccaagtacccacgtcgcggctggggcgggttttatcagagagcgggcctgccccccaagtggtcccccagacaaggctcaggatgtccacattcactgcatcctggaccctgtgcaggtgaagatgtcccgacccacgcagtactcctctttctcctgccaccatttctccaaccatcacagtagcagtcttcttcgctgtgttcgtcgccgccgccgccgccaccgccgttgtcgccgtcgctgctgcaaccaccagcagcggccgc

SEQ ID NO: 10257 - DNA, 815 bp, Homo sapiens
  SIMILAR (2)..(772): 971254mologous to Rattus norvegicus neuroligin 2,accession number U41662,Smith-Waterman Score=1359.
cgtggaccaggacgtgcagcctgcccgctaccacatcgcctttgggcccgtggtggatggcgacgtggtccccgatgaccatgagatcctcatgcagcagggagaattcctcaactacgacatgctcatcggcgtcaaccagggagagggcctcaagttcgtggaggactctgcagagagcgaggacggtgtgtctgccagcgcctttgacttcactgtctccaactttgtggacaacctgtatggctacccggaaggcaaggatgtgcttcgggagaccatcaagtttatgtacacagactgggccgaccgggacaatggcgaaatgcgccgcaaaaccctgctggcgctctttactgaccacaaatgggtggcaccagctgtggccactgccaagctgcacgccgactaccagtctcccgtctacttttacaccttctaccaccactgccaggcggagggccggcctgagtgggcagatgcggcgcacggggatgaactgccctatgtctttggcgtgcccatggtgggtgccaccgacctcttcccctgtaacttctccaagaatgacgtcatgctcagtgccgtggtcatgacctactggaccaacttcgccaagactggggaccccaaccagccggtgccgcaggataccaagttcatccacaccaagcccaatcgcttcgaggaggtggtgtggagcaaattcaacagcaaggagaagcagtatctgcacataggcctgaagccacgcctctggagccgattccgtggtgtcttataccaagtgttccatgataccatttgtgagaaag

SEQ ID NO: 10258 - DNA, 943 bp, Homo sapiens
  SIMILAR (1)..(348): 1001254mologous to Homo sapiens dJ393D12.2 (novel LIM domain protein),accession number AL132776,Smith-Waterman Score=671.
cgggcaggcggccagggagtagggtagggatggggccccccttctgtcccctgcagtgtacatggaggaaaggggctgccccagaggaggggccagggcaggtgacccatctggagttctggtcgaggtgatggtctcctcacaccatggtggcctctaactggtgatggcagagggcccagcgcttcctcgcttctcaaagaacatgtagtcaatgaggaatgtggctcccagcagcacagccttcaccttcacatccaggtccagcgggaactgtaggccaaagtcatctgcatctgtgagggcttctcggaccaggccccccccactgcttgctgatgcggcccacactgcgggattcatcccgagtcttcacctcaaagttggtgtctgtgccacagccacaggtccagcagggccccaccactcgcaagactgtctggcgatcggcatcctggatggagaacttggggaggaagggatgccaggtctgtagcacgtggccaatggtggtgcctggtggagcctgtacttccatctgggagtgggaagcagacagggtcactcctggaggccacaggggcagcagctgcagccacagtgcagcgggcggagcaaacgcagcacctcacggtccccggggtcggccaggcggacacgcagcggccggcgggcgccacagcacagacgggcgcagcagttgctctcctcggccgcctgacccaggggctgcccggccccagagcgcagttcataccgattacaggtctcccagcctaggaacgtttccactcgctcagccttttggtgaatcaaaatctgatcaatctgcaccaggaattcgaggccagaaggcacccctggcagtggcaagaagggggcagcagaccccaaggccacggggccaggcgaggggaagagggcgtggcacgaggcctcgtcc

SEQ ID NO: 10259 - DNA, 742 bp, Homo sapiens
  SIMILAR (298)..(1164): 991254mologous to Homo sapiens Tumour rejection antigen precursor DAGE,accession number R94918,Smith-Waterman Score=1477.
cagagtcaccacattgatccacacgttgagcaagatgaagctgcccagaagaagaagaatcgagtctcctaagtcctggcacttcctggcctctacacgcttgggcatgcagcgcagctcaggtgacaggtagagagagggtggtggcagactggccaggataccaccctggtggccccacagccccacattggagggcaggcccgctctctgataaaacccgccccagccgcgacgtgggtacttgggatacgggaagggcaggttgtcctcctcctccaggtaggaatccgggtcctcctgatcaaagaaaggcactcggtgtagttgtgacatcttttggctcccagttagggaacggtacacccaattcttgcttgtctcctcggcagtgctggatccagaggctagggggtagcagccggacagggcctccacctcccgggtcagttcccgaagccgccgtctcatgtcccgggcatcatacactattcggcctgaggagcggtgccgggaaaattcagggatgactgctgggcccagggtgggagctgggacaggctggtactgagccgcctctgcctctggcaccgccccctccccaccgttcttgtggctaggagcctcaggggctgggagagggggggggcacaggatacacataggcccttaggcccagctcggaccatatgcctgttttgaggggcctttcctctacggtaggctgaacggatggctgggg

SEQ ID NO: 10260 - DNA, 496 bp, Homo sapiens
  SIMILAR (1)..(321): 991254mologous to Rattus norvegicus neuroligin 2,accession number U41662,Smith-Waterman Score=556.
gcggccgccacctacgtgcagaaccagagcgaggactgcctgtacctcaacctctacgtgcccaccgaggacggtccgctcacaaaaaaacgtgacgaggcgacgctcaatccgccagacacagatatccgtgaccctgggaagaagcctgtgatgctgtttctccatggcggctcctacatggaggggaccggaaacatgttcgatggctcagtcctggctgcctatggcaacgtcattgtagccacgctcaactaccgtcttggggtgctcggttttctcagcaccggggaccaggctgcaaaaggcaactatgggctccctggaccagatccaggccctgcgctggctcagtgaaaacatcgcccactttgggggcgaccccgagcgtatcaccatctttggttccggggcaggggcctcctgcgtcaaccttctgatcctctcccaccattcagaagggctgttccagaaggccatcgcccagagtggcacc

SEQ ID NO: 10261 - DNA, 4975 bp, Homo sapiens
  SIMILAR (851)..(1639): 671254mologous to Rattus norvegicus neuroligin 2,accession number U41662,Smith-Waterman Score=847.
  misc_feature (1)...(4975): n = a,t,c or g
atgctgcctgtgtggttcaccgacaacttgggagcggccgccacctacgtgcagaaccagagcgaggactgcctgtacctcaacctctacgtgcccaccgaggacggtccgctcacaaaaaaacgtgacgaggcgacgctcaatccgccagacacagatatccgtgaccctgggaagaagcctgtgatgctgtttctccatggcggctcctacatggaggggaccggaaacatgttcgatggctcagtcctggctgcctatggcaacgtcattgtagccacgctcaactaccgtcttggggtgctcggccggtactcacagcctggcctgagctaccacatcgcctttgggcccgtggtggatggcgacgtggtccccgatgaccctgagatcctcatgcagcagggagaattcctcaactacgacatgctcatcggtgtcaaccagggagagggcctcaagttcgtggaggactctgcagagagcgaggacggtgtgtctgccagcgcctttgacttcactgtctccaactttgtggacaacctgtatggctacccggaaggcaaggatactgggccgaccgggacaatggcgaaatgcgccgcaaaacccctgctggcgctctttactgaccaccaatgggtggcaccagctgtggccactgccaagctgcacgccgactaccagtctcccgtctacttttacaccttctaccaccactgccaggcggagggccggcctgagtgggcagatgcggcgcacggggatgaactgccctatgtctttggcgtgcccatgaatgacgtcatgctcagtgccgtggtcatgacctactggaccaacttcgccaagactggggaccccaaccagccggtgccgcaggataaccaagttcatccacaccaagcccaatcgcttcgaggaggtggtgtggagcaaattcaacagcaaggagaagcagtatctgcacataggcctgaagccacgcgtgcgtgacaactaccgcgccaacaaggtggccttctggctggagctcgtgccccacctgcacaacctgcacacggagcttttcaccaccaccacgcgcctgcctccctacgccacgcgctggccgcctcgtcccccccgtggcgccccgggcacaacgccgcccccgccgcctgccaccctgcctcccgagcccgagcccgagcccccnccaagggcctatgaccgcttccccggggactcacgggactactccacggagctgagcgtcaccgtggccgtgggtgcctccctcctcttcctcaacatcctggcctttgctgccctctactacaagcgggaccggcggcaggagctgcggtgcaggcggcttagcccacctggcggctcaggctctggcgtgcctggccgaatagtgtatgatgcccgggacatgagacggcggcttcgggaactgacccgggaggtggaggccctgtccggctgctaccccctagcctctggatccagcactgccgaggagacaagcaagaattgggtgtaccgttccctaactgggagatgttgcaatcaataccaagaaagcccccacgatgccgaggacatcttactcctgctgctgggcctcatcgttcttgtcaacattggcatcaacgtggcaactatgatgtggcatggactccagaacgccttagacaagatgattgattgggctactcagaaaaatgaaattcaggccagtgaaagtcccccaagtggtcccccagacaaggctcaggatgtccacatccactgcatcctggaccctgtgcaggtgaagatgtcccgacccacgcagtactcctctttcgcctgccaccatttctccaaccatcacagtagcagtcttcttcgctgtgttcgtcgccgccgccgccgccaccgccgttgtcgccgtcgctgctgcaaccaccagcagcggccgcagaactacagacaaatcccccatagccactcagtcttccgtaacccacatcgcagccaaaagatgtcacaactacaccgagtgcctttctttgatcaggaggacccggattcctacctggaggaggaggacaacctgcccttcccgtatcccaaccggaatccagggggcaatgccaactaccaggtgtacgacagcctggagctgaagcggcagctctggaagcatctgaagagcttcttgcggattcttttccgtcattttttccccaaaggcttcctgctcaggcgcgttaaccaccttgactcctggataccagacacgaacgatgagaaggtttctgcgtgctgctgcgtgccccctaaatgtggacatgccggcgttcccagggagtctgcacggggactgtacaaggcggggatgatgggcgggggagaagcccctcaggccagagacatcttcccagttcccaaagatgagcaagttggacacggccatgacctctccactggccatgtggtctatgatgcccgcagggaaaagcagaatttcttccatatgtccagcccccagaaccctgagtattcaagaaaagacttggctaccctcttcaggccccaagagggtcaggacctggtgagttctggcatatctgagcaaacaaagcaatgcagtggggatagtgccaagcttcctgcaggatccatactgggctacctggagttgaggaatatggaatggaagaactcagatgatgccaaagataagttcccccagaccaagacttccccttactgcagcttccatccttgcagttctgagaagaacacagactcccaggctccattctaccccaaattccttgcctactcccgggatactgcatgtgccaagacttgctttcattctgcaaccactgcccagagctcagtgtgcacccttcctccaccgttcactctttccctgcctctcgttcctcccagatcctttgtccctcctcaacccaccaaccatcagaggccttccaccttaatacaaacccctactgttcttccaacctccaagtctcctcagtccatcctcacttcccaattccccatcccttccctgttcgccaccatttcccaacccctgatccaaccccaatgccctgaatgtcatgagagtctaggccttacccaagattctggccttcaaaggaccccaggcccttcaaaagactccagagttcccaggaatctggaccttgcccaaaacccagacctctacaagaacccaggccttacccaagatccaggcctccacgagaacccaggtcttgctccaaatcaaggcctacatgagttcccaggccttccccaagattcttatctctgccagaatccaagcccttctcaagactttggtcttcacaagaattcaggcattactcaagattcccacccccaaaagaacacaggtctgactcaagaagctggtatccttaggagcccatgtctcacccaatcccctggcctccacaagaaaacaccatttacccaaacttctgatcttcagaggagctcaggctttacacaagactctggaatctataggaatcttgaaccaaaccaagagactgtgatctacaaaaatcaagatctctcccaagcaactgaccaccaaaagaacctaggctcttctaaagattctggaggtcacaagaatacaggcaatgtccaagatccaggagtctgtagtaccgcaggccttactgaagattctggatcacagaagggtccgtatgttccccaagactctgaagtcaataagagctcaggagttatccaggaatcttttctccacaagagcccaggccttgtccaaacctctggcctcccaaagtgctcaggccttacccaaaactcaggagactacaagaatccaggacttatccaagattgtggtggccacaaagttaaaggccttactcaagattccaacctcccaagccttacccaagccactaaagttgaaagaagatttagccttccccaagatgttggagtttacaggagctcagaacatagccaagactctaatctccacaagtgcccaggaattaatcaagatcctggcccccataaagacccagcccttgtccaagactctggcctccccaagatttcaggccttacccaggaatctggcccctacaagagctcatgcctcatcccagatcccagcctctacaagaacccaagccctgccctaggttctgattttgtccagcttttgtccctgcttcagaccccaaagtccacactgtccctgatgaagtcatctgtgcctgagaaggctgctcagaaggagganncacagcggcacgtcctctgggctcgtgtccaactcaatgagaactcctgcccttccaaggcccaagtggtctccaatgacctgcagaccttctcagaggtacctgtattaattgagctgcagtcatcctcctggcgggcaggcagccagcacggggcgtaccgccctgtggatacagttccttcaagctaccagaactatcaactaagccacccagacaccatcatcccgaaaaccccagcccttctcccatggcagnctcccggcttcgccctcttcccctcgcctggccccgtggccttggggtctgctgcccccttcttgccactgccaggggtgccttctggcctcgaattcctggtgcagattgatcagattttgattcaccagaaggctgagcgagtggaaatgaccctgtctgcttcccactcccagatggaagtacaggctccaccaggcaccaccattggccacgtgctacagacctggcatcccttcctccccaagttctccatccaggatgccgatcgccagacagtcttgcgagtggtggggccctgctggacctgtggctgtggcacagacaccaactttgaggtatcaggaatactagaggctcttgggaccttcgtaaaccaagatgatgcttccatgaggcaggatagttaa

SEQ ID NO: 10262 - DNA, 2767 bp, Homo sapiens
  SIMILAR (1445)..(2764): 971254mologous to Homo sapiens dJ1156J9.1 (KIAA1277 protein),accession number AL133382,Smith-Waterman Score=2212.
atggatgttggtttttctcgtactactgttcagacactgtcaagaagccactgcaaaaacatcaaacaaaaaatttctcaatgggaaggaagggctaatggtatatctaatccagaaaagtggtgtccaaaggactttggagtgagatataactgtcaccaagagatccgtcttaagaaaaatcctatagctgagagaaagagcaaaaacttggatgtaaccagccgtgaaaatgtgggtctagatataaatgaaaataccaaaagccatgatcaaagtgagaatgaaaataagaaacatgaatatgacgatacacacttctttaaaaatgaatcagaatccaactgggtatgttctcgggtcaaagaaattgaaagctgtaaagaagatgtcttagatccagagacttcattacctccaggaaacttctatacctcacaaatactgtggaagaaaatagaagcacttcccccagataaactcttaaatttggctttagaacattgtgactcttcagaaaaagaactgaacttcagagttctggatagttcatacggaataaccaagagcttagaaaatatttactctgaacctgaggggcaagaatgtggaccttccataaatcctttgccaaaacctcgtaggacattcagatatttatccgaatctggtgttacgccgtataaagaaagaaactgtgacaaaaaatactgtgaaaataactcttgtgcacaatcttctttggcctcttctcaggaacctgaaccaaagaaatatggtggaaaaatcagaggaagatctaaaaggaaatcctttgaatttgaggatattcagcactttcgaaatcggaactcacagacgattcgtgaagaacttggaagaaattctgggtcagcactttattacacacagtctgaggacaatatctatgaagatatcatatatcccaccaaagaaaatccatatgaagatattccagtgcagcctttacctatgtggagatccccttcagcatggaagctaccacccgctaaaagtgcttttaaagcacccaagctccctccaaaacctcagttccttcaccggaagactatggaagtaaagaactcacaggcttatttgcggtcaaagcttacaaaagatacaactttgccggtcactttaacggaatggaagcttttccgagctggtgaagttgcaaacacgaaaaggaaaaatcttccaaggcttgtattgaaaatagatgacatatttgaatctaaaagagggaagaagaaggtaaagttacattcttacactggaaaggaattacctccgacaaaaggtgaaaccagtgggaacgaaagtgatgccgagtatctgccaaagaatcgccataaacgcttagcacaactgcaaccgtcttccaagaggaatcctcactaccagaccttggagcgggatcttattgaattacaggagcaagcagctgtttgaacatttttgtggtggtgtctctacaaggaagaaaccatcaggaataagctatattccccaggtcatacaacaattccctggcaaggatgatcatggctataagcagtccaaagacatggaagagagacttaaagttattccaaaattttgttttcctgattcaaaggactggatgccaacctcagaactcaagagtgaaacattctcctttgtcttgactggtgaagatggaagccggtggtttggttactgtaagaagctcttgccagtaggcaaaggaaagcgactccctgaggtatactgcatggttagtcgcctaggctgcttcaatcttttttcaaagattctggatgaagtagagaagagaagagaaatgtctccagcccttgtttacccattcatgcgaagtgtcatggaagctcctttcccagctcctggacgcaccatcacagttaagagttacctccctggggctggagatgagtccattgaactctgccgaccactagattcccgattggaacatgttgattttaaatgtctctttaagtgcctgagtgtgtgtcatctcatccgggtctgtgcctctctccttttggagcgtagggtaatctttgttgccaacagcctaagcaccctgtcaaaatgtggccatgctgtggtagctacactgtatccgttcacctggcagcatacctatatcccagtcctgccagcatctatgattgacatcgtgtgctcacctacaccattccttattggaatcctgtcttgctccttaccacagctccaggacctacccattgaagaggtgctgatagttgatctctgtgcagacaagttcttacaggaggtatctgatgaggatgaaattctaccaccaaaacttcaagctgccctgatgcagattttggaagaacgaaatgaaatcttgactcaggagcagaatttttcacaagcagatgtgacactcaactctctggtgtccgaagcatttgtcaggttttttgtggagttggtaggacattattctttgaacatgactgtcactgagcgtggggagcgtgttttccaaagggaaccattccgtaagtcccacacctcccgaagtgtacgccacttcctggatctcttcatggaaactcagatgtttgcaggattcatccaggaccgagagcttcggaaaagtggagttaaaggtttgtttgagatccgggccatccagtatttggaaacaattcctgagtcggagcccagtgggatgaatagaattttgcggagtcttggttag

SEQ ID NO: 10263 - DNA, 697 bp, Homo sapiens
  SIMILAR (5)..(550): 881254mologous to Homo sapiens carboxylesterase,accession number Y09616,Smith-Waterman Score=901.
tcgctggcttatcccaaaggtcatgaggatttatgatacccagaagaaaatggacagagaggcctcccaggctgctctgcagaaaatgttaacgctgctgatgttgcctcctacatttggtgacctgctgagggaggagtacattggggacaatggggatccccagaccctccaagcgcagttccaggagatgatggcggactccatgtttgtgatccctgcactccaagtagcacattttcagtgttcccgggcccctgtgtacttctacgagttccagcatcagcccagctggctcaagaacatcaggccaccgcacatgaaggcagaccatgttaaattcactgaggaagaggagcagctaagcaggaagatgatgaagtactgggccaactttgcgagaaatgggaaccccaatggcgagggtctgccacactggccgctgttcgaccaggaggagcaatacctgcagctgaacctacagcctgcggtgggccgggctctgaaggcccacaggctccagttatggaacgaaggcgctgccccaaaagatccaggagctcgaggagcctgaagagagacacacagagctgtagctccctgtgccggggaggagggggtgggttcgctgacaggcgagggtcagcctgctgtgcccacacacacccactaaggagaaagaagttgattccttcaa

SEQ ID NO: 10264 - DNA, 2202 bp, Homo sapiens
  SIMILAR (68)..(1726): 841254mologous to Homo sapiens carboxylesterase,accession number Y09616,Smith-Waterman Score=2314.
  misc_feature (1)...(2202): n = a,t,c or g
cccggggcagcctctgggtgaacagcagcgtgtccgccggcagcgaaccgagaccagcgagccgaccatgcggctgcacagacttcgtgcgcggctgagcgcggtggcctgtgggcttctgctgcttcttgtccggggccagggccaggactcagccagtcccatccggaccacacacacggggcaggtgctggggagtcttgtccatgtgaagggcgccaatgccggggtccaaaccttcctgggaattccatttgccaagccacctctaggtccgctgcgatttgcaccccctgagccccctgaatcttggagtggtgtgagggatggaaccacccatccggccatgtgtctacaggacctcaccgcagtggagtcagagtttcttagccagttcaacatgaccttcccttccgactccatgtctgaggactgcctgtacctcagcatctacacgccggcccatagccatgaaggctctaacctgccggtgatggtatggatccacggtggtgcgcttgtttttggcatggcttccttgtatgatggttccatgctggctgccttggagaacgtggtggtggtcatcatccagtaccgcctgggtgtcctgggcttcttcagcactggagacaagcacgcaaccggcaactggggctacctggaccaagtggctgcactacgctgggtccagcagaatatcgcccactttggaggcaaccctgaccgtgtcaccatttttggcgagtctgcgggtggcacgagtgtgtcttcgcttgttgtgtcccccatatcccaaggactcttccacggagccatcatggagagtggcgtggccctcctgcccggcctcattgccagctcagctgatgtcatctccacggtggtggccaacctgtctgcctgtgaccaagttgactctgaggccctggtgggctgcctgcggggcaagagtaaagaggagattcttgcaattaacaagcctttcaagatgatccccggagtggtggatggggtcttcctgcccaggcacccccaggagctgctggcctctgccgactttcagcctgtccctagcattgttggtgtcaacaacaatgaattcggctggctcatccccaaggtcatgaggatctatgatacccagaaggaaatggacagagaggcctcccaggctgctctgcagaaaatgttaacgctgctgatgttgcctcctacatttggtgacctgctgagggaggagtacattggggacaatggggatccccaagacccttccaaagcgaaagttcccagaagatgatggcggactcccatgtttgtgatccctgcactccaagtagcacattttcaagtgttccccgggcccctgtgtaccttcctacgagttcccagcattcagcccagctggctcaagaacatcaggccaccgcacatgaaggcagaccatggtgatgagcttccttttgttttcagaagtttctttcgggggcaactacattaaattcactgaggaagaggagcagctaagcaggaagatgatgaagtactgggccaactttgcgagaaaatgggaaccccaatggcgagggtctgcccacactggccgcctgttcgaccaggaggagcaatacctgcagctgaacctacagcttgcggtgggcccgggctctgaaggcccacaggctnccagttctggaagaaggcgctgccccaaaagatccagggagctcgaggagcctgaagagagacacacagagctgtagctccctgtgccggggaggagggggtgggttcgctgacaggcgaagggtcagactgctgtgcccacacaacacccactaaggaggaaagaagttgattccttcattcacttcgccattcattcatacttccgtccagaagttgattccttcattcacttcgccattcattcatacttccgtccatccattcagaaaccggratttattaagaatttactcaggcatgatggcccatacttgtaatcccagctattgggaaggatgagatgggaggatggcttgaggccagaggtttgagaccgaccagccagggcaacacagtgagaccccttctcaaaaaaaaaaaaaaaaaaagagagagtgtgtgattagaagctaaataggaaagttttgagcttcaagtcagtgaggagtaaaaaagatttttaaaaagcaa

SEQ ID NO: 10265 - DNA, 435 bp, Homo sapiens
  SIMILAR (2)..(328): 911254mologous to Homo sapiens 1,2-alpha-mannosidase IC,accession number AF261655,Smith-Waterman Score=522.
catcttggcggagtttggatccctgcacttggaattcttacacctcactgaactctctggcaaccaggtcttcgctgaaaaggtcaggaacatccgcaaggtcctcaggaagatcgaaaagccctttggcctctaccccaacttcctcagcccagtgagtgggaactgggtgcaacaccatgtctcagttggaggactcggggacagtttttatgaatatttgatcaaatcctggttgatgtcgggcaagacagatatggaggctaaaaatatgtactacgaagccttggagacaccaaacttgggcctgaggccttctggtttaactccggcagagaggccgtggccacccagctgagcgagagctactacatcctccggccagaggtggtggagagctacatgtacctgtggcgacagacccacaacacgaaa

SEQ ID NO: 10266 - DNA, 584 bp, Homo sapiens
  SIMILAR (198)..(581): 901254mologous to Plasmid F Protein D,accession number M12987,Smith-Waterman Score=586.
tacccattccaggttcggtggctgctggcgagatgcccgcttcctacccgtacaggcaccgggcccctgaggtcaggcgggtgtgcgaggccctgccccaccatgtctcagttggaggactcggggacagtttttatgaatatttgatcaaatcctggttgatgtcgggcaagacagatatggaggctaaaaatatgtactacgaagccttggaggtatttattcgcgataagctcatggagcggcgtaaccgtcgcacaggaaggacagagaaagcgcggatctgggaagtgacggacagaacggtcaggacctggattggggaggcggttgccgccgctgctgctgacggtgtgacgttctctgttccggtcacaccacatacgttccgccattcctatgcgatgcacatgctgtatgccggtataccgctgaaagttctgcaaagcctgatgggacataagtccatcagttcaacggaagtctacacgaaggtttttgcgctggatgtggctgcccggcaccgggtgcagtttgcgatgccggagtctgatgcggttgcgatgctgaaacaattatcctga

SEQ ID NO: 10267 - DNA, 1302 bp, Homo sapiens
  SIMILAR (289)..(924): 761254mologous to Homo sapiens 1,2-alpha-mannosidase IC,accession number AF261655,Smith-Waterman Score=783.
atgcatctgaaccagctgcctcccatcctcagcaggctgggtgcagtcggcttcttcggaagcatgaaggctcacctggtgtccgtctctcggcaggtcaggaacatccgcaaggtcctcaggaagatcgaaaagccctttggcctctaccccaacttcctcagcccagtgagtgggaactgggtgcaactacccattccaggttcggtggctgctggcgagatgcccgcttcctacccgtacaggcaccgggcccctgaggtcaggcgggtgtgcgaggccctgccccaccatgtctcagttggaggactcggggacagtttttatgaatatttgatcaaatcctggttgatgtcgggcaagacagatatggaggctaaaaatatgtactacgaagccttggaggcgatagagacctacttgctgaatgtctctcccggggggctgacctacattgccgagtggcgaggggggattctggaccacaagatggggcacctggcctgtttctccgggggcatgatcgcccttggcgccgaggatgccaaggaagaaaagagggcccactaccgagagctcgcagtccagatcaccaagacgtgttacgagtcatacgcccgcttcagacaccaaacttgggcctgaggccttctggtttaactccggcagagaggccgtggccacccagctgagcgaagagttacttacatcctccggccagaggtggtggagagctacatgtacctgtgggcgacagacccacaaccccatcttacaggggagtggggctgggaggtggtgctggccttggagaaatactgtcggacagaagccggtttttctggggattccaagacgtgttacagtaggcacccccaaccacggacaacaagcaggcagagcttctttctagcggagacactaaacagatgcttggtgagtgcctgcaacggaccagacactgggctagaggccagggacaccgctgagagtgagacagtcataagccctgcagtcaaggggtcaagaggggagaaagcgatggtaagggaaactgacaaaccagccaaatgcattgggaagaaaagcaaaaatggaaaatctgatttaaaggcagcatccaagatggatgctcagttccgttccctctgctttgaggaggtgaccccactgtggtttgagaaagtgctagagatgaatgggccagcttcccccagcgtttcccctgggggcctgtccttggaagtatggtcattggtcatgtggcacaaagatgctcggccctctgtgactaatgcttaa

SEQ ID NO: 10268 - DNA, 502 bp, Homo sapiens
  SIMILAR (355)..(128): 341254mologous to Homo sapiens RNA polymerase II fragment which precedes the C-terminal domain,accession number W18375,Smith- Waterman Score=90.
cagccctttagagcgcctggcacagggcttcctagcagattgttgacatttctggctccactgcccaatatcaggcccaagatcgggtgggcaggttccacgtcctctctgtccttgggttgcagcgcccagcaggaggcagcaatggagaactgggtgcaggagggacaggcccacccaggctcatgcctggacttggccttggctgccctccagctcccctacccgacacccgtcaacccggtctagattccattccagagaatgagcattcagctgttctcccaacccaccctccagcccgcatcgctgcctgcccccagggaagggaacccacagggaatggggatctcccctcacatgtgtattcagcagccctatggccttggctctgggcctgatgggacaggggtagagggaaggtgagcatagcacattttcctagagcgagaattgggggaaagctgttatttttatattaaaatacattcagatgtaaaaa

SEQ ID NO: 10269 - DNA, 482 bp, Homo sapiens
  SIMILAR (227)..(475): 981254mologous to Homo sapiens delta-6 fatty acid desaturase,accession number AF134404,Smith-Waterman Score=461.
ggcctggcttgtaagtggcccggtgggtgtcggagctgctctggactcagcctcacagtggacactgctccattcagattctttaaacactggcaagggggcgatggccacaatcctattgtacagataaggaagtcaaggccacttggggacagctgctctccagcctccactcagggtgcctaagtggtgagctggacctagggcagtgcccgagcctccccacagggtcctggaaagccactggttcgtgtggatcacacagatgaaccacatccccaaggagatcggccacgagaagcaccgggactgggtcagctctcagctggcagccacctgcaacgtggagccctcacttttcaccaactgggtcagcgggcacctcaacttccagatcgagcaccacctcttccccaggatgccgagacacaactacagccgggtggccccgctggtcaagtcgctgtgtgccaagacggcct

SEQ ID NO: 10270 - DNA, 495 bp, Homo sapiens
  SIMILAR (269)..(433): 701254mologous to Homo sapiens delta-6 fatty acid desaturase,accession number AF134404,Smith-Waterman Score=183.
agacccctagtccagtgtggcggaattcgtgagggtgtcttcccaggaggagttgctgggccgactctgccaggcatctgtgtccctggcagggtcttccccaacacaccctgcatgacaccttcgtcactaaaatcagcctcgtgagctggcagggcaaggaccctgttcctttactcagctgagaaaaccagagagggtggtggcctgtcctgggctctgaggcaaatcaggcagaagggttggatgcctgaggtcctcctcccacccaccaggcctccagacctccgggcacctggagacctctcggtatcgcctctgccctcctctgcaggatttgctctgggccgccagcttctatgcccgcttcttcttatcctacctccccttctacggcgtccctggggtgctgctcttctttgttgctgtcaggtatggcagggagtggcgaggtcacacacaggcgacaggtgacccccactgcagccccccacc

SEQ ID NO: 10271 - DNA, 1810 bp, Homo sapiens
  SIMILAR (779)..(1555): 721254mologous to Homo sapiens delta-6 fatty acid desaturase,accession number AF134404,Smith-Waterman Score=952.
agcggccgcggcggcagggcggggccggagcagcgggcggcggcggaggcggcgcccgggagcgctcttcgcttccctcggggtcttgctcggacctcggccaccgcctgggaatccccaggactcgtgcgtgcagcatgggcggcgtcggggagccgggaccgcggaagggacccgcgcagccgggggcaccgctgcccaccttctgctgggagcagatccgcgcgcacgaccagcccggcgacaagtggctggtcatcgagcgccgcgtctacgacatcagccgctgggcacagcggcacccagggggcagccgcctcatcggccaccacggcgctgaggacgccacggatgccttccgtgccttccatcaggatctccaattttgtgcgcaagttcctacagcccctgttgattggagagctggctccggaagaacccagccaggatggacccctgaatgcgcagctggtcgaggacttccgagccctgcaccaggcagccgaggacatgaagctgtttgatgccagtcccaccttctttgctttcctactgggccacatcctggccatggaggtgctggcctggctccttatctacctcctggggtcctgggtgggtgcccagtgccctgggccgcctttcatcctgggccatcttttcaaggcttcagtcctggtgtctgcagcatgacctgggccatgcctccatcttcaagaagtcctggtggaaccacgtggcccagaagttcgtgatggggcagctaaagggcttctccgcccactggtggaacttccgccacttccagcaccacgccaagcccaacatcttccacaaagacccagacgtgacggtggcgcccgtcttcctcctgggggagtcatccgtcgagaatctagagttgcctttgacccttggccccagccagccccgtgaccttgcccgggagaaggaggtggcctggagagctgctgtctccagccgccgcctgtctccacagtatggcaagaagaaacgcagatacctaccctacaaccagcagcacctgtacttcttcctgatcggcccgccgctgctcaccctggtgaactttgaagtggaaaatctggcgtacatgctggtgtgcatgcagtgggcggatttgctctgggccgccagcttctatgcccgcttcttcttatcctacctccccttctacggcgtccctggggtgctgctcttctttgttgctgtcagggtcctggaaagccactggttcgtgtggatcacacagatgaaccacatccccaaggagatcggccacgagaagcaccgggactgggtcagctctcagctggcagccacctgcaacgtggagccctcacttttcaccaactggttcagcgggcacctcaacttccagatcgagcaccagatgccgagacacaactacagccgggtggccccgctggtcaagtcgctgtgtgccaagcacggcctcagctacgaagtgaagcccttcctcaccgcgctggtggacatcgtcagccttcacgcacacagtgagaatttctggagcacctactgcagactcacaaacagcagtgcctgcgtgccacgcgggcgccctgagccagcgcaggctccgaatggcattccctccgtccacaccctggtagagatcgctgtgcgctggctccgaggcgctcgccagggagatgctaacaccgaggatccacgacagctgagcctgcagcgccacccaggggcgcccggagcatctgcgccagtgtggggcgggccgtgctccctactgtccctggtctcctag

SEQ ID NO: 10272 - DNA, 1663 bp, Homo sapiens
  SIMILAR (1)..(1350): 741254mologous to Homo sapiens delta-6 fatty acid desaturase,accession number AF134404,Smith-Waterman Score=1580.
atgggcggcgtcggggagccgggaccgcgggagggacccgcgcagccgggggcaccgctgcccaccttctgctgggagcagatccgcgcgcacgaccagcccggcgacaagtggctggtcatcgagcgccgcgtctacgacatcagccgctgggcacagcggcacccagggggcagccgcctcatcggccaccacggcgctgaggacgccacggatgccttccgtgccttccatcaagatctcaattttgtgcgcaagttcctacagcccctgttgattggagagctggctccggaagaacccagccaggatggacccctgaatgcgcagctggtcgaggacttccgagccctgcaccaggcagccgaggacatgaagctgtttgatgccagtcccaccttctttgctttcctactgggccacatcctggccatggaggtgctggcctggctccttatctacctccctgggtccctggctgggtgcccagtgccctggccgccttcatcctggccatctctcaggctcagtcctggtgtctgcagcatgacctgggccatgcctccatcttcaagaagtcctggtggaaccacgtggcccagaagttcgtgatggggcagctaaagggcttctccgcccactggtggaacttccgccactttccagcaccacgccaagcccaacatcttccacaaagacccagacgtgacggtggcgcccgtcttcctcctgggggagtcatccgtcgagtatggcaagaagaaacgcagatacctaccctacaaccagcagcacctgtacttcttcctgatcggcccgccgctgctcaccctggtgaactttgaagtggaaaatctggcgtacatgctggtgtgcatgcagtgggcggatttgctctgggccgccagcttctatgcccgctttctttctttatcctacctccccttctacggcgtccctggggtgctgctcttctttgttgctgtcagggtcctgggaaagtccactggttcgtgtggatcacacagatgaaccacatccccaaggagatcggccacgagaagcaccgggactgggtcagctctcagctggcagccacctgcaacgtggagccctcacgttttcaccaactggttcagcgggcacctcaacttccagatcgagcaccacctcttccccaggatgccgagacacaacctacagcccggttgccccgcttgttcaagtcgctgtgtgccaaagcacggcctcagctacgaaagtgaagcccttccttcaccgcgctggtggacatcgtcaggtccctgaagaaagtctggtgacatcgtgctggacgcctacctccatcagtgaaggcaacacccaggcgggcagagaagggctcagggcaccagcaaccaagccgagcccccggcgggatcgaataccccccacccctccactgaccagcctgggggtgccctgcctgccctcctggtactgttgtcttcccctcggccccctcacatgtgtattcagcagccctatggccttggctctgggcctgatgggacaggggtagagggaaggtgagcatagacacattttcctagagcgagaattgggggaaagctgttatttttatattaaaatacattcagatgtaaaaaaaaaaaaaaaaaaa

SEQ ID NO: 10273 - DNA, 399 bp, Homo sapiens
  SIMILAR (46)..(399): 811254mologous to Homo sapiens SRcyp protein,accession number X99717,Smith-Waterman Score=461.
ggactacagcgtgtgggaccacattgaggtgtctgatgatgaagacgagacgcaccccaacatcgacacggccagtctcttccgctggcggcatcaggcccgggtggaacgcatggagcagttccagataggaggagaaggaggagagactcacggagctcagagagagaagaaagtcaaagcagaaacaaagacaaatacagaaaccaagagagtaagagctcacacagaaaagaaaattctgagagtgagaaaagaatgtactctaaaagtcgtgatcataatagctcaaataacagcagggaaaaaaaggctgatagagatcaaagtcccttctcaaaaataaaacaaagcagtcaggacaatgaattaaagtcctccatgttgaaaaataaggag

SEQ ID NO: 10274 - DNA, 2460 bp, Homo sapiens
tttctgaaggtgtgcccccaaaacaatgcggagaccttcggttgtcttggtacagggtgaaaagggggaccgggggaatcaaactcagaaacccattacattataagagttggtctctttttcacagaagttgtccaagggatttttatggttccaaggtgggtgacttccaaggtaaggaaaatggacgaggaaggggaatctaatctatggaggattttttgaagacgaaggagtttcgcttgttaaagaccaccaaagaatttctcttgtcaatggccaacagagggaaggatacaaatggttcacagttcttcataacaacggaaaccaactcctcatttagatgggcatcatgttgtttttggacaagtaatcctctggtcaagaagttgtaagagagattgaaaaccagaaaacagatgcagctagcaaaccgtttgcggaggtacggatactcagttgttggagagctgattcccaaatctaaagttaagaaagaagaaaagaaaaggcataaatcatcatcatcttcctcctcctcatctagtgactcagatagctcaaggtattcctcagtcctcttctgattcctctgattccgaaagtgctactgaagagaaatcaaagaaaagaaaaaagaaacatcggaaaaattcccgaaaacacaagaaagaaaagaaaaagcgaaagaaaagcaagaagagtgcatctagtgagagtgaagctgaaaatccttggaagcacaacccccagttttactgttccgtccagaagagattccccttcctatacctgaaaatagatttctaatgaggaaaaagtcctcctaaagctgatgagaaggaaaggaaaaacagagagagagaaagggaaagagagtgtaatccacctaactcccagcctgcttcataccagagacgacttttagttactagatctggcaggaaatttaaagggaagaggaccaaggcgttatcgaactccttccagatccagatcaagggatcttttcagacgtagtggagactccctccacattggaggcaagagatgcagagagcctcaaagaatgagggtatcaagtggtgaaagaatggatcaagggggataagagtgagttgaatgaaataaaagaaaatcagagaagtccagttagagtaaaagagagaaaaataacagatcacaggaatgtatctgagagtccaaacagaaaaaatgaaaaggagaagaaagttaaagaccataaatctaacagcaaagagagagacatcagaagaaattcagaaaaagaagacaagtataaaaacaaagtgaagaaaagggccaaatctaaaagtaggagtaagagcaaagagaaatcaaagagtaaagaaagagattccaaaacataatatgaaatgaagaaaagaggatgaggttcaaggagttaaagggaagggatcatgaaaatgttaaagaaaaagaaaagcagtctgattctaaaggaaaagatcaggaaaggagtagaagtaaagagaagtctaaacagttagaatcaaagagtaatgagcatgatcacagtaaaagtaaggaaaaggatagacgcgcacaatccaggagtagagaatgtgatataactaaaggtaaacacagttataatagcagaacaagagaaccgaagcagacgtagggacagcagcagtagagtgcgatcaagaccccatgacagagatcgcagcatgagcaaggcagtaccatagatacagagaccaggtatacagcagaagagtacggtcacgaagccgagagagaagaacaccaccaggaagatcaagaagtagagataggaggagaaggaggagagactcacggagctcagagagagaagacagtcaaagcagaaacaaagacaaatacagaaaccaagagagtaagagctcacacagaaaagagaattctgagagtgagaaaagaatgtactctaaaagtcgtgatcataatagctcaaataacagcagggaaaaaaaggctgatagagatcaaagtcccttctcaaaaataaaacaaagcagtcaggacgatgaattaaagtcctccatgttgaaaaataaggaggatgagaagatcagatcctcagtggaaaaagaaaaccaaaaatcaaaaggtcaagaaaatgtccatgtacatgaaaaaaataaaaaatttgatcatgaatcaagccctggaacagatgaagacaaaagcggatgagtgagttatataaacttacttccattctgtttcggattttaagtttgagagacttgctaatgaatctcctttatgttgttttccttttcattgtttttggattgttttatgtttgtccttttttttcttaatgtggatttcattgagttgattttttgataatctgcaatctggataatttgtactgctaaagttttaataaactcgacaagagaaaaaaaaaaaaaa

SEQ ID NO: 10275 - DNA, 3580 bp, Homo sapiens
  SIMILAR (1)..(261): 241254mologous to Human immunodeficiency virus type 1 gag protein,accession number U73088,Smith-Waterman Score=84.
tcgagggtgcgatggcgcggacgcgggaccgcgtacgcctgctgcttctcctgatctgctttaacgttggaagtggacttcacttacaggtcttaagcacaagaaatgaaaataagctgcttcctaaacatcctcatttagtgcggcaaaagcgcgcctggatcaccgcccccgtggctcttcgggagggagaggatctgtccaagaagaatccaattgccaagatacattctgatcttgcagaagaaagaggactcaaaattacttacaaatacactggaaaagggattacagagccaccttttggtatatttgtctttaacaaagatactggagaactgaatgttaccagcattcttgatcgagaagaaacaccattttttctgctaacaggttacgctttggatgcaagaggaaacaatgtagagaaacccttagagctacgcattaaggttcttgatatcaatgacaacgaaccagtgttcacacaggatgtctttgttgggtctgttgaagagttgagtgcagcacatactcttgtgatgaaaatcaatgcaacagatgcagatgagcccaataccctgaattcgaaaatttcctatagaatcgtatctctggagcctgcttatcctccagtgttctacctaaataaagatacaggagagatttatacaaccagtgttaccttggacagagaggaacacagcagctacactttgacagtagaagcaagagatggcaatggagaagttacagacaaacctgtaaaacaagctcaagttcagattcgtattttggatgtcaatgacaatatacctgtagtagaaaataaagtgcttgaagggatggttgaagaaaatcaagtcaatgtagaagttacgcgcataaaagtgttcgatgcagatgaaataggttctgataattggctggcaaattttacatttgcatcaggaaatgaaggaggttatttccacatagaaacagatgctcaaactaacgaaggaattgtgacccttattaaggaagtagattatgaagaaatgaagaatcttgacttcagtgttattgtcgctaataaagcagcttttcacaagtcgattaggagtaaatacaagcctacacccattcccatcaaggtcaaagtgaaaaatgtgaaagaaggcattcattttaaaagcagcgtcatctcaatttatgttagcgagagcatggatagatcaagcaaaggccaaataattggaaattttcaagcttttgatgaggacactggactaccagcccatgcaagatatgtaaaattagaagatagagataattggatctctgtggattctgtcacatctgaaattaaacttgcaaaacttcctgattttgaatctagatatgttcaaaatggcacatacactgtaaagattgtggccatatcagaagattatcctagaaaaaccatcactggcacagtccttatcaatgttgaagacatcaacgacaactgtcccacactgatagagcctgtgcagacaatctgtcacgatgcagagtatgtgaatgttactgcagaggacctggatggacacccaaacagtggccctttcagtttctccgtcattgacaaaccacctggcatggcagaaaaatggaaaatagcacgccaagaaagtaccagtgtgctgctgcaacaaagtgagaaaaagcttgggagaagtgaaattcagttcctgatttcagacaatcagggttttagttgtcctgaaaagcaggtccttacactcacagtttgtgaggttctgcatggcagcggctgcagggaagcacagcatgactcctatgtgggcctgggacccgcagcaattgcgctcatgattttggcctttctgctcctgctattggtaccacttttactgctgatgtgccattgcggaaagggcgccaaagcgtttacccccatacctggcaccatagagatgctgcatccttggaataatgaaggagcaccacctgaagacaaggtggtgccatcatttctgccagtggatcaagggggcagtctagtaggaagaaatggagtaggaggtatggccaaggaagccacgatgaaaggaagtagctctgcttccattgtcaaagggcaacatgagatgtccgagatggatggaaggtgggaagaacacagaagcctgctttctggtagagctacccagtttacaggggccacaggcgctatcatgaccactgaaaccacgaagaccgcaagggccacaggggcttccagagacatggccggagctcaggcagctgctgttgcactgaacgaagaattcttaagaaattatttcactgataaagcggcctcttacactgaggaagatgaaaatcacacagccaaagattgccttctggtttattctcaggaagaaactgaatcgctgaatgcttctattggttgttgcagttttattgaaggagagctagatgaccgcttcttagatgatttgggacttaaattcaagacgctagctgaagtttgcctgggtcaaaaaatagatataaataaggaaattgagcagagacaaaaacctgccacagaaacaagtatgaacacagcttcacattcactctgtgagcaaactatggttaattcagagaatacctactcctctggcagtagcttcccagttccaaaatctttgcaagaagccaatgcagagaaagtaactcaggaaatagtcactgaaagatctgtgtcttctaggcaggcgcaaaaggtagctacacctcttcctgacccaatggcttctagaaatgtgatagcaacagaaacttcctatgtcacagggtccactatgccaccaaccactgtgatcctgggtcctagccagccacagagccttattgtgacagagagggtgtatgctccagcttctaccttggtagatcagccttatgctaatgaaggtacagttgtggtcactgaaagagtaatacagcctcatgggggtggatcgaatcctctggaaggcactcagcatcttcaagatgtaccttacgtcatggtgagggaaagagagagcttccttgcccccagctcaggtgtgcagcctactctggccatgcctaatatagcagtaggacagaatgtgacagtgacagaaagagttctagcacctgcttccactctgcaatccagttaccagattcccactgaaaattctatgacggctaggaacaccacggtgtctggagctggagtccctggccctctgccagattttggtttagaggaatctggtcattctaattctaccataaccacatcttccaccagagtcaccaagcatagcactgtacagcattcttactcctaaacagcagtcagccacaaactgacccagagtttaattagcagtgactaatttcatgtttccaatgtacctgatttttcatgagccttacagacacacagagacacatacacattgatcttaaaatttttctcagtcactgatatgcaaaggaccacactgtctctgcttccaggagtattttagaaatgttccacaatttactgaagacatagaga

SEQ ID NO: 10276 - DNA, 2432 bp, Homo sapiens
  SIMILAR (747)..(418): 901254mologous to Escherichia coli K12 L- ribulokinase,accession number AE000116,Smith-Waterman Score=553.
agggctgcctgcaagagttatctgtgctgtttgcacgaggtgagcccagaggaccatgccacaacctgcttcactatatgttggccttgattggtgttcctgaagtcttttgggcatttctcttccactgctcccttggtttagaggaggaaaaactggctcctttgattaaaggagaagaaaaaattgtttggctgaggagctccttttacttccaacactgtttggtggataaatctaccctcctaccctccagctctgtcagtcttggcatcttccatgaagaaaaaaactccggggaatttcctatctttgccaaagctgtgcgtctagcccttgtgcctcttagatatgtaaaattagaagatagagataattggatctctgtggattctgtcacatctgaaattaaacttgcaaaacttcctgattttgaatctagatatgttcaaaatggcacatacactgtaaagattgtggccatatcagaagattatcctagaaaaaccatcactggcacagtccttatcaatgttgaagacatcaacgacaactgtcccacactgatagagcctgtgcagacaatctgtcacgatgcagagtatgtgaatgttactgcagaggacctggatggacacccaaacagtggccctttcagtttctccgtcattgacaaaccacctggcatggcagaaaaatggaaaatagcacgccaagaaagtaccagtgtgctgctgcaacaaagtgagaaaaagcttgggagaagtgaaattcagttcctgatttcagacaatcagggttttagttgtcctgaaaagcaggtccttacactcacagtttgtgagtgtctgcatggcagccggctgcagggaagcacagcatgactcctatgtgggcctgggacccgcagcaattgcgctcatgattttggcctttctgctcctgctattggtaccacttttactgctgatgtgccattgcggaaagggcgccaaaggctttacccccatacctggcaccatagagatgctgcatccttggaataatgaaggagcaccacctgaagacaaggtggtgccatcatttctgccaagtggatcaagggggcagtctagtaggaagaaatggagtaggaggtatggccaaggaagccacgatgaaaaggaaagttagctctgcttccattgtcaaagggcaacatgagatgtccgagatggatggaaggtgggaagaacacagaagcctgctttctggtagagctacccagtttacaggggccacaggcgctattcatgaccactgaaaccacgattaccgcaagggccacaggggcttccagagacgtggccggagctcaggcagctgctgttgcactgaacgaagaattcttaaaaaattatttcactgataaagcggcctcttacactgaggaagatgaaaatcacacagccaaagattgccttctggtttattctcaggaagaaactgaatcgctgaatgcttctattggttgttgcagctttattgaaggagagctagatgaccgcttcttagatgatttgggacttaaattcaagacactagctgaagtttgcctgggtcaaaaaatagatataaataaggaaattgagcagagacaaaaacctgccacagaaacaagtatgaacacagcttcacattcactctgtgagcaaactatggttaattcagagaatacctactcctctggcagtagcttcccagttccaaaatctttgcaagaagccaatgcagagaaagtaactcaggaaatagtcactgaaagatctgtgtcttctaggcaggcgcaaaaggtagctacacctcttcctgacccaatggcttctagaaatgtgatagcaacagaaacttcctatgtcacagggtccactatgccaccaaccactgtgatcctgggtcctagccagccacagagccttattgtgacagagagggtgtatgctccagcttctaccttggtagatcagccttatgctaatgaaggtacagttgtggtcactgaaagagtaatacagcctcatgggggtggatcgaatcctttggaaggcactcagcatcttcaagatgtaccttacgtcatggagagggaaagagagagctttcttgcccccagctcaagtgtgcagcctactctggccatgcctaatatagcagtaggacagaatgtgacagtgacagaaagagttctagcacctgcttccactctgcaatccagttaccagattcccactgaaaattctatgacggctaggaacaccacggtgtctggagctggagtccctggccctctgccagattttggtttagaggaatctggtcattctaattctaccataaccacatcttccaccagagttaccaagcatagcactgtacagcattcttactcctaa

SEQ ID NO: 10277 - DNA, 357 bp, Homo sapiens
  SIMILAR (115)..(354): 931254mologous to Homo sapiens ferritin heavy subunit,accession number M12937,Smith-Waterman Score=405.
atgacgaccgcgtcttacctcgcaggatatcaagaaaccagactgtgcggggaggatgcgattgggagaggttttgaatgcgatggattacatttggaaaaaattgtgcattttgcattacatttggaaaaaaatgtgaatcagtcactactggaactgcacaaactggccactgacaaaaatgacccccatttgtgtgacttcattgagacacattacctgaatgaacaagtgaaggccatcaaagaattgggtgaccacgtgaccaacatgcacgagatgggagcgcccgattctggcgtggcagaatacctctttgacaagcacaccctgggagacagtgataatgaaagctaa

SEQ ID NO: 10278 - DNA, 2024 bp, Homo sapiens
  SIMILAR (170)..(415): 951254mologous to Escherichia coli Minor tail protein precursor H,accession number D90774,Smith-Waterman Score=383.
ggcgaggccctcatgtaccacacgcacttctcagaacttctggatgagttttcccagaacgtcttgggtcagctcctgaatgatcctttcctctcagagaagagtgtgtcaatggaggtggaaccttccccgacgtccccggcgcctctcatccaggctgagcacagctactccctgtgcgaggagcctcgggcccagtcgcccttcacccacattaccaccagtgacagcttcaatgacgatgaggtggaaagtgagaaatggtacctgtctacagacttcccttcaacatccatcaagacagagccaattacagacgaaccacccccaggactcgttccgtctgtcactctgaccatcacagccatctccaccccgttggaaaaggaggaacctcctctggaaattgaacaatgggggttgattcctcgtgccagaccattattccctaaaattaagctggagcctcatgaagtggatcagtttctaaacttctctccctaaagaagccaagcacctgcatattttcccttcctgggctgcctgcacctgtggcagtagtgggaatagcgcgattaggattattttagcatattctttagctttaagagtgcccacagagactaaaaagcccagggacctctttggcaagactggcagagaaaaagggaaagaggaaacatctagagaaaagctgtatgtggcagaaagagaaagaaaggccccagtggaccacctgcatttgccgcccacccctccgagcagtcacggcagtgactcagagggcagcctgagtcccaacccacgcctgcaccccttcagcctgcctcagacccacagcccctccagagctgcaccccgggccccctccgccctctccagctcccctctcctcacggctcctcataaactgcagggatcaggccctctggtcctgacagaggaggagaagaggaccctgatcgctgagggctatcccatccccaccaaattgcccctgtcaaaatcagaggagaaggccctgaagaaaattcggaggaagatcaagaataagatttctgctcaggaaagtaggagaaagaagaaagaatacatggacagcctggagaaaaaagtggagtcttgttcaactgagaacttggagcttcggaagaaggtagaggttctagagaacactaatagagccagccatggggagctggtgattggggtgctgggcaagggaagacgttgggaccctttactcacatcaccccatgcaggtgaccagtgtttgggcagtgtgcagggctgggctggggaatgcacacctaggcagctggatggaagtagaacaactttgataagtgaagaggatcctgggtcaccagaaatggggggtggagaggccttgggggccattgtttcatatgcatggcgtggcagggaagcccttcatgcaagtagggtgggggctgtcatccaagctcccattgctgcaggcagtgacatctgtctcagtgacatcagagaaagtgccacatcatctcaaaccaacatatcagttacgaggactctccttcagcaactccagaagcttcagactttggtgatgggcaaggtttctcgaacctgcaagttagctggcacgcagactggcacctgcctcatggttgtggtgctgtgctttgccgttgcattcggcagcttctttcaaggctacgggccctatccttctgccaccaagatggctctgcccagccagcattccctgcaggagccctacacagcctccgtggtgagatccagaaacctgctgatctacgaggaacattctcccccagaggagtcatccagcccgggctcggctggggagctggggggctgggatagaggttcctccctgctcagggtgtcagggctggagtccaggccggatgtggatcttccccatttcattatctcgaatgagaccagcctggagaagtcagtgcttttggagctgcagcagcacctggtcagcgccaaactggaggggaatgaaa

SEQ ID NO: 10279 - DNA, 492 bp, Homo sapiens
  SIMILAR (169)..(348): 1001254mologous to Homo sapiens phosphodiesterase I beta,accession number AC005587,Smith-Waterman Score=318.
atgttaactataaaacagcctcaggcaggtttttcaggaggtatttcagaagaaggtactgttatcatagaagatgacagctctatgcatattattgcccctgaagacctttcagtagggcaagaggtggaggtagaagacagtgatgttgatgatcttgaccccatacccaggttttataccatgtattttgaagaacctgattcctctggacatgcaggtggaccagtcagtgccagagtaattaaagccttacaggtagtagatcatgcttttgggatgttgatggaaggcctgaagcagcggaatttgcacaactgtgtcaatatcatccttctggctgaccatgaaattaccacagccaccccagccttcagcaaccaccattttgatcagtcagcagccatcaacattgaagcaaggccctctacgatcaaaaaagatgacaactcactgaacgctcagaggatcattggcattttaagcaattaa

SEQ ID NO: 10280 - DNA, 3119 bp, Homo sapiens
  SIMILAR (1)..(2616): 921254mologous to Homo sapiens phosphodiesterase I/nucleotide pyrophosphatase beta,accession number AF005632,Smith-Waterman Score=4360.
atggaatctacgttgactttagcaacggaacaacctgttaagaagaacactcttaagaaatataaaatagcttgcattgttcttcttgctttgctggtgatcatgtcacttggattaggcctggggcttggactcaggaaactggaaaagcaaggcagctgcaggaagaagtgctttgatgcatcatttagaggactggagaactgccggtgtgatgtggcatgtaaagaccgaggtgattgctgctgggattttgaagacacctgtgtggaatcaactcgaatatggatgtgcaataaatttcgttgtggagagaccagattagaggccagcctttgctcttgttcagatgactgtttgcagaagaaagattgctgtgctgactataagagtgtttgccaaggagaaacctcatggctggaagaaaactgtgacacagcccagcagtctcagtgcccagaagggtttgacctgccaccagttatcttgttttctatggatggatttagagctgaatatttatacacatgggatactttaatgccaaatatcaataaactgaaaacatgtggaattcattcaaaatacatgagagctatgtatcctaccaaaaccttcccaaatcattacaccattgtcacgggcttgtatccagagtcacatggcatcattgacaataatatgtatgatgtaaatctcaacaagaatttttcactttcttcaaaggaacaaaataatccagcctggtggcatgggcaaccaatgtggctgacagcaatgtatcaaggtttaaaagccgctacctacttttggcccggatcagaagtggctataaatggctcctttccttccatatacatgccttacaacggaagtgtcccatttgaagagaggatttctacactgttaaaatggctggacctgcccaaagctgaaagacccaggttttataccatgtattttgaagaacctgattcctctggacatgcaggtggaccagtcagtgccagagtaattaaagccttacaggtagtagatcatgcttttgggatgttgatggaaggcctgaagcagcggaatttgcacaactgtgtcaatatcatccttctggctgaccatggaatggaccagacttattgtaacaagatggaatacatgactgattattttcccagaataaacttcttctacatgtacgaagggcctgccccccgcatccgagctcataatatacctcatgacttttttagttttaattctgaggaaattgttagaaacctcagttgccgaaaacctgatcagcatttcaagccctatttgactcctgatttgccaaagcgactgcactatgccaagaacgtcagaatcgacaaagttcatctctttgtggatcaacagtggctggctgttaggagtaaatcaaatacaaattgtggaggaggcaaccatggttataacaatgagtttaggagcatggaggctatctttctggcacatggacccagttttaaagagaagactgaagttgaaccatttgaaaatattgaagtctataacctaatgtgtgatcttctacgcattcaaccagcaccaaacaatggaacccatggtagtttaaaccatcttctgaaggtgcctttttatgagccatcccatgcagaggaggtgtcaaagttttctgtttgtggctttgctaatccattgcccacagagtctcttgactgtttctgccctcacctacaaaatagtactcagctggaacaagtgaatcagatgctaaatctcacccaagaagaaataacagcaacagtgaaagtaaatttgccatttgggaggcctagggtactgcagaagaacgtggaccactgtctcctttaccacagggaatatgtcagtggatttggaaaagctatgaggatgcccatgtggagttcatacacagtcccccagttgggagacacatcgcctctgcctcccactgtcccagactgtctgcgggctgatgtcagggttcctccttctgagagccaaaaatgttccttctatttagcagacaagaatatcacccacggcttcctctatcctcctgccagcaatagaacatcagatagccaatatgatgctttaattactagcaatttggtacctatgtatgaagaattcagaaaaatgtgggactacttccacagtgttcttcttataaaacatgccacagaaagaaatggagtaaatgtggttagtggaccaatatttgattataattatgatggccattttgatgctccagatgaaattaccaaacatttagcccaacactgatgttcccatcccaacacactactttgtggtgctgaccagtttgtataaacaagaagccacacacccggaaactgccctgggtggctggatgtcctaccctttatcatccctcaccgacactaccaaccgtggaagaagctgtcctgaaggtaaaccagaaagctctttgggttgaagaaagatttacagctcacattgccccgggtccgtgatgtagaacttctccactgggctttgacttctatcaggataaagttgcagcctgtctctgaaatttttgcaactaaaagacatatttaccaacatttgaaacccactatttaagcttaattaatggtctaccttaatatataatttactgtataaggtaattttgggcaaaatataagtgatttttttctggagaattgtaaaataaagttttctatttttccttaagtcccctaaaagccataattttttattattccctttttctctattttcaattcctatgaatatgtattattttaaagttatatttgtcacacagagatgatgctatattacaccttcccttttttgttggtttcttaaactctaatctcatgacagattataccttccttattacttgttttatcttactcagaatctttgaatatatttttctgcccagaattatctaaacaaaagggagaacaaaagaagtatgtctcacttgggaactgaatcaactttaaatcagttttgtcacaaaactttttgtatttgactggcaatgctgattaaaattaaaaatgcactgaaaaaaaaaaaaa

SEQ ID NO: 10281 - DNA, 900 bp, Homo sapiens
  SIMILAR (900)..(334): 811254mologous to Leishmania major probable levansucrase precursor,accession number AL160371,Smith-Waterman Score=772.
tcagatccggaaaggggtgtctgcctcagctgtgcccttcactccctcctccccgctgctgtcctgctcccaggagggaagccgccacacggtaatgtttccatgcccagtgccacagggtggctttgactgttcctcatccattgaagattcttctgatgcatggggagtattactcaaagagctgcttctctggtcatcagctgtcactttggaaggggctacttctaccactgacagtcgacagctctcattccttcctccacccagttcctccatcctgtcagccatctgtgggatgatgtaatgcccattcttgtgatctccgtcgtttgtcaggttttgttgccccgtaagtttaaccggaatagccagtgtagaaaaaacgcatttttccctccagatgtaaaaggttgcagaaccggaccattctggcgtcttatcttcagggatcggatcgttggcgtcgaacttatcgctgtcttttaaagacacggcccgcgttttttccagcttttgataaaacatgtagattgatgtgtcatcagcgtctttcgggcttcccgcaagagcaaacacaacgtgatagccgttgtattcagctactgttccgtcagcgttttgcagcggccagctgtcccacacatcaagtccttttgcagactcaatatttttaatcgttgattgatcgaattgaggcacttggtatttttcgttttgctgctgtttagggatctgcagcatatcatggcgtgtaatatgagagacgccgtacgtttctttgtatgctttttggttattttctttcgcgaaggcttgagtcgctcctcctgccagaagtgcagtcgtaaaagtcagaactgtggcttgttttacaatttttttgatgttcatgttcat

SEQ ID NO: 10282 - DNA, 807 bp, Homo sapiens
  SIMILAR (1)..(594): 1001254mologous to Leishmania major probable levansucrase precursor,accession number AL160371,Smith-Waterman Score=1045.
atgaacatgaacatcaaaaaaattgtaaaacaagccacagttctgacttttacgactgcacttctggcaggaggagcgactcaagccttcgcgaaagaaaataaccaaaaagcatacaaagaaacgtacggcgtctctcatattacacgccatgatatgctgcagatccctaaacagcagcaaaacgaaaaataccaagtgcctcaattcgatcaatcaacgattaaaaatattgagtctgcaaaaggacttgatgtgtgggacagctggccgctgcaaaacgctgacggaacagtagctgaatacaacggctatcacgttgtgtttgctcttgcgggaagcccgaaagacgctgatgacacatcaatctacatgttttatcaaaaggtcggcgacaactcaatcgacagctggaaaaacgcgggccgtgtctttaaagacagcgataagttcgacgccaacgatccgatcctgaaagatcagacgcaagaatggtccggttctgcaacctttacatctgacggaaaaatccgtttattctacactgactattccggtaaacattacggcaaacaaagcctgacaacagcgcagaccccccacatacgtattcgccattcctatgcgatgcacatgctgtatgccggtataccgctgaaagttctgcaaagcctgatgggacataagtccatcagttcaacggaagtctacacgaaggtttttgcgctggatgtggctgcccggcaccgggtgcagtttgcgatgccggagtctgatgcggttgcgatgctgaaacaattatcctga

SEQ ID NO: 10283 - DNA, 948 bp, Homo sapiens
  SIMILAR (948)..(532): 881254mologous to Leishmania major probable levansucrase precursor,accession number AL160371,Smith-Waterman Score=613.
ctatcctgtcgtcatggaagtgatatcgcggaaggaaaatacgatatgagtcgtctggcggcctttctttttctcaatgtatgagaggcgcattggagttctgctgttgatctcattaacacagacgatactgacacagggattcgtataaacgcatggcatacggattggtgatttcttctgttcactaagccgaaactgcgtaaaccggttctccaagtcatttggctgctggtcttcctgttcccttaaaaatccctgtgccatggtcccattcagaccatatttcccaaagatgatagttgccaagatgccccaaggtgagtgcccagtgttacccgcaacctccctgcctgtgagaatcactacaaatggagttaagtcaggaaattgtaccacatcgggactggggacggtctgatttatctgtctgatgattggccatgtgttacagcgtgaataggaaggcaagaaagcttttccatattggaaagaatagttcttacaatttctgatgttctgcaatagcccagctcggtcaccaagagtgatttggtaatatctttgaataaaacaggtagattgatgtgtcacagggtctttcgggcttcccgcaagagcaaacacaacgtgatagccgttgtattcagctactgttccgtcagcgttttgcagcggccagctgtcccacacatcaagtccttttgcagactcaatatttttaatcgttgattgatcgaattgaggcacttggtatttttcgttttgctgctgtttagggatctgcagcatatcatggcgtgtaatatgagagacgccgtacgtttctttgtatgctttttggttattttctttcgcgaaggcttgagtcgctcctcctgccagaagtgcagtcgtaaaagtcagaactgtggcttgttttacaatttttttgatgttcatgttcat

SEQ ID NO: 10284 - DNA, 1242 bp, Homo sapiens
  SIMILAR (1)..(483): 991254mologous to Leishmania major probable levansucrase precursor,accession number AL160371,Smith-Waterman Score=843.
atgaacatgaacatcaaaaaaattgtaaaacaagccacagttctgacttttacgactgcacttctggcaggaggagcgactcaagccttcgcgaaagaaaataaccaaaaagcatacaaagaaacgtacggcgtctctcatattacacgccatgatatgctgcagatccctaaacagcagcaaaacgaaaaataccaagtgcctcaattcgatcaatcaacgattaaaaatattgagtctgcaaaaggacttgatgtgtgggacagctggccgctgcaaaacgctgacggaacagtagctgaatacaacggctatcacgttgtgtttgctcttgcgggaagcccgaaagacgctgatgacacatcaatctacatgttttatcaaaaggtcggcgacaactcaatcgacagctggaaaaacgcgggccgtgtctttaaagacagcgataagttcgacgccaacgatccgatcctgaaagacagacgcaagatgaaccggtttacgcagtttcggcttagtgaaacaaaagaaatcaccaatccgtatgccatgcgtttatacgaatccctgtgtcagtatcgtaagccggatggctcaggcatcgtctctctgaaaatcgactggatcatagagcgttaccagctgcctcaaagttaccagcgtatgcctgacttccgccgccgcttcctgcagaaggggattgatagcaacagtggcctgtgtggggcagccactgagaagatgccagctgcgatgagggaagtacagccagggctgtacactccatggagccagcaggagctaggaacaggcaaaagccccaccccttccaagttagaggggcagagcctcaccctccttggtaaagatgcagccacccagctgtggctgtggaccctggcatccatgcactctctgggaagcctctctgctcttggaggcttggaagtgaccttcccactgtctggcctctccccacacctgacccccctgtgtcagtatcgtaagccggatggctcaggcatcgtctctctgaagatcgactggatcataaagcgttaccagctgcctcaaagttaccagcgtatgcctgacttccgccgccgcttcctgcaggtctgtgttaatgagatcaacagcagaactccaatgcgcctctcatacattgagaaaaagaaaggccgccagacgactcatatcgtattttccttccgcgatatcacttccatgacgacaggatag

SEQ ID NO: 10285 - DNA, 987 bp, Homo sapiens
  SIMILAR (987)..(502): 821254mologous to Leishmania major probable levansucrase precursor,accession number AL160371,Smith-Waterman Score=683.
  misc_feature (1)...(987): n = a,t,c or g
ttatgcttccggctcgtatgtgttgtggaattgtgagcggataacaatttcacacaggaaacagctatgaccatgattacgaattcgagctcggtacccgatcttaagcttaattaaaacttttattttcctgaactctgcctgactgacagttacctgcaggaagcggggaaggaccctatcatctggaggggcagctttcttattgccacagagggggagagaaagcccttgctgcacttttgtcatctcccacgagcaaaacacgtagcccttcagagccagatcctgagcaagatgaacagaaactgaggttttgtaaacgccacctttatgggcagcaaccccgatcaccggtggaaatacgtcttcagcacgtcgcaatcgcgtaccaaacacatcacgcatatgattaatttgttcaattgtataaccaacacgttgctcaacccgtcctcgaatttccatatccgggtgcggtagtcgccctgctttctcggcatctctgatagcctgagaagaaaccccaactaaatccgctgcttcacctattctccagcgccgggttattttcctcgcttccgggctgtcatcattaaacttntgataaaacatgtagattgatgtgtcatcagcgtctttcgggcttcccgcaagagcaaacacaacgtgatagccgttgtattcagctactgttccgtcagcgttttgcagcggccagctgtcccacacatcaagtccttttgcagactcaatatttttaatcgttgattgatcgaattgaggcacttggtatttttcgttttgctgctgtttagggatctgcagcatatcatggcgtgtaatatgagagacgccgtacgtttctttgtatgctttttggttattttctttcgcgaaggcttgagtcgctcctcctgccagaagtgcagtcgtaaaagtcagaactgtggcttgttttacaatttttttgatgttcatgttcat

SEQ ID NO: 10286 - DNA, 1053 bp, Homo sapiens
  SIMILAR (558)..(4): 991254mologous to Cloning vector pZC320 SopB,accession number U26464,Smith-Waterman Score=920.
ttaatctgtaaaggctttttgaagtgcatcacctgaccgggcagatagttcaccggggtgagaaaaaagagcaacaactgatttaggcaatttggcggtgttgatacagcgggtaataatcttacgtgaaatattttccgcatcagccagcgcagaaatatttccagcaaattcattctgcaatcggcttgcataacgctgaccacgttcataagcacttgttgggcgataatcgttacccaatctggataatgcagccatctgctcatcatccagctcgccaaccagaacacgataatcactttcggtaagtgcagcagctttacgacggcgactcccatcggcaatttctatgacaccagatactcttcgaccgaacgccggtgtctgttgaccagtcagtagaaaagaagggatgagatcatccagtgcgtcctcagtaagcagctcctggtcacgttcattacctgaccatacccgagaggtcttctcaacactatcaccccggagcacttcaagagtaaacttcacatcccgaccacatacaggcaaggggatccattcttgcgtctgttctttcaggatcggatcgttggcgtcgaacttatcgctgtctttaaagacacggcccgcgtttttccagctgtcgattgagttgtcgccgaccttttgataaaacatgtagattgatgtgtcatcagcgtctttcgggcttcccgcaagagcaaacacaacgtgatagccgttgtattcagctactgttccgtcagcgttttgcagcggccagctgtcccacacatcaagtccttttgcagactcaatatttttaatcgttgattgatcgaattgaggcacttggtatttttcgttttgctgctgtttagggatctgcagcatatcatggcgtgtaatatgagagacgccgtacgtttctttgtatgctttttggttattttctttcgcgaaggcttgagtcgctcctcctgccagaagtgcagtcgtaaaagtcagaactgtggcttgttttacaatttttttgatgttcatgttcat

SEQ ID NO: 10287 - DNA, 1188 bp, Homo sapiens; identical to SEQ ID NO: 4283
  SIMILAR (7)..(984): 991254mologous to Cloning vector pSacBII SacB,accession number U09128,Smith-Waterman Score=1715.

SEQ ID NO: 10288 - DNA, 975 bp, Homo sapiens; identical to SEQ ID NO: 4285
  SIMILAR (1)..(483): 991254mologous to Leishmania major probable levansucrase precursor,accession number AL160371,Smith-Waterman Score=843.
  misc_feature (1)...(975): n = a,t,c or g

SEQ ID NO: 10289 - DNA, 1083 bp, Homo sapiens
  SIMILAR (451)..(1080): 981254mologous to Cloning vector pBACe3.6 levansucrase,accession number U80929,Smith-Waterman Score=1071.
atgaacatgaacatcaaaaaaattgtaaaacaagccacagttctgacttttacgactgcacttctggcaggaggagcgactcaagccttcgcgaaagaaaataaccaaaaagcatacaaagaaacgtacggcgtctctcatattacacgccatgatatgctgcagatccctaaacagcagcaaaacgaaaaataccaagtgcctcaattcgatcaatcaacgattaaaaatattgagtctgcaaaaggacttgatgtgtgggacagctggccgctgcaaaacgctgacggaacagtagctgaatacaacggctatcacgttgtgtttgctcttgcgggaagcccgaaagacgctgatgacacatcaatctacatgttttatcaaaaggtcggcgacaactcaatcgacagctgggaaaaacgcgggcccgtgtctttaaagacagcgataagccacacgggaacagaaaacggataccaaggcgaagaatctttatttaacaaagcgaactacggcggcggcacgaacttcttccgtaaagaaagccagaagcttcagcagagcgctaaaaaacgcgatgctgagttagcgaacggcgccctcggtatcatagagttaaataatgattacacattgaaaaaagtaatgaagccgctgatcacttcaaacacggtaactgatgaaatcgagcgcgcgaatgttttcaaaatgaacggcaaatggtacttgttcactgattcacgcggttcaaaaatgacgatcgatggtattaactcaaacgatatttacatgcttggttatgtatcaaactctttaaccggcccttacaagccgctgaacaaaacagggcttgtgctgcaaatgggtcttgatccaaacgatgtgacattcacttactctcacttcgcagtgccgcaagccaaaggcaacaatgtggttatcacaagctacatgacaaacagaggcttcttcgaggataaaaaggcaacatttgcgccaagcttcttaatgaacatcaaaggcaataaaacatccgttgtcaaaaacagcatcctggagcaaggacagctgacagtcaactaa

SEQ ID NO: 10290 - DNA, 1167 bp, Homo sapiens
  SIMILAR (64)..(1002): 981254mologous to Cloning vector pSacBII SacB,accession number U09128,Smith-Waterman Score=1628.
tcaattcgggaggatcgaaacggcagatcgcaaaaaacagtacatacagaaggagacatgaacatgaacatcaaaaaaattgtaaaacaagccacagttctgacttttacgactgcacttctggcaggaggagcgactcaagccttcgcgaaagaaaataaccaaaaagcatacaaagaaacgtacggcgtctctcatattacacgccatgatatgctgcagatccctaaacagcagcaaaacgaaaaataccaagtgcctcaattcgatcaatcaacgattaaaaatattgagtctgcaaaaggacttgatgtgtgggacagctggccgctgcaaaacgctgacggaacagtagctgaatacaacggctatcacgttgtgtttgctcttgcgggaagcccgaaagacgctgatgacacatcaatctacatgttttatcaaaaggtcggggacaactcaatcgacagctggaaaaacgcgggccgtgtctttaaagacagcgataagttcgacgccaacgatccgatcctgaaagatcagacgcaagaatggtccggttctgcaacctttacatctgacggaaaaatccgtttattttaccctgactattccggtaaacattctgacaaccagagcgtgacaacagcgcaggtaaatgtgtcaaaatctgatgacacactcaaaatcaacggagtggaagatcacaaaacgatttttgacggagacggaaaaacatatcagaacgttcagcagtttatcgatgaaggcaattatacatccggcgacaaccatacgctgagagaccctcactacgttgaagacaaaggccataaataccttgtattcgaagccaacacgggaacagaaaacggataccaaggcgaagaatctttatttaacaaagcgtactacggcggcggcacgaacttcttccgtaaagaaagccagaagcttcagcagagcgctaaaaaacgcgatgctgagttagcgaacggcgccctcgtgccgcaagccaaaggcaacaatgtggttatcacaagctacatgacaaacagaggcttcttcgaggataaaaaggcaacatttgcgccaagcttcttaatgaacatcaaaggcaataaaacatccgttgtcaaaaacagcatcctggagcaaggacagctgaca

SEQ ID NO: 10291 - DNA, 1029 bp, Homo sapiens; identical to SEQ ID NO: 4293
  SIMILAR (1)..(501): 991254mologous to Leishmania major probable levansucrase precursor,accession number AL160371,Smith-Waterman Score=877.

SEQ ID NO: 10292 - DNA, 945 bp, Homo sapiens
  SIMILAR (945)..(349): 991254mologous to Leishmania major probable levansucrase precursor,accession number AL160371,Smith-Waterman Score=1046.
tcaggataattgtttcagcatcgcaaccgcatcagactccggcatcgcaaactgcacccggtgccgggcagccacatccagcgcaaaaaccttcgtgtagacttccgttgaactgatggacttatgtcccatcaggctttgcagaactctcagcggtataccggcatacagcatgtgcatcgcataggaatggcggaacgtatgtggtgtgaccggaacagagaacgtcacaccgtcagcagcagcggcggcaaccgcctccccaatccaggtcctgaccgttctgtccgtctcttcccagatccgcgctttctctgtccttcctgtgcgacggttacgccgctccatgagctgcgctgttgtcaggctttgtttgccgtaatgtttaccggaatagtcagtgtagaataaccggatttttccgtcagatgtaaaggttgcagaaccggaccattcttgcgtctgatctttcaggatcggatcgttggcgtcgaacttatcgctgtctttaaagacacggcccgcgtttttccagctgtcgattgagttgtcgccgaccttttgataaaacatgtagattgatgtgtcatcagcgtctttcgggcttcccgcaagagcaaacacaacgtgatagccgttgtattcagctactgttccgtcagcgttttgcagcggccagctgtcccacacatcaagtccttttgcagactcaatatttttaatcgttgattgatcgaattgaggcacttggtatttttcgttttgctgctgtttagggatctgcagcatatcatggcgtgtaatatgagagacgccgtacgtttctttgtatgctttttggttattttctttcgcgaaggcttgagtcgctcctcctgccagaagtgcagtcgtaaaagtcagaactgtggcttgttttacaatttttttgatgttcatgttcat

SEQ ID NO: 10293 - DNA, 4517 bp, Homo sapiens
  SIMILAR (208)..(1839): 1001254mologous to Homo sapiens 08-JAN-1998 Human yes1 encoding cDNA,accession number X90200_cd1,Smith-Waterman Score= 2887.
gcggagccaaggcacacgggtctgacccttgggccggcccggagcaagtgacacggaccggtcgcctatcctgaccacagcaaagcggcccggagcccgcggaggggacctgacgggggcgtaggcgccggaaggctgggggccccggagccgggccggcgtggcccgagttccggtgagcggacggcggcgcgcgcagatttgataatgggctgcattaaaagtaaagaaaacaaaagtccagccattaaatacagacctgaaaatactccagagcctgtcagtacaagtgtgagccattatggagcagaacccactacagtgtcaccatgtccgtcatcttcagcaaagggaacagcagttaatttcagcagtctttccatgacaccatttggaggatcctcaggggtaacgccttttggaggtgcatcttcctcattttcagtggtgccaagttcatatcctgctggtttaacaggtggtgttactatatttgtggccttatatgattatgaagctagaactacagaagacctttcatttaagaagggtgaaagatttcaaataattaacaatacggaaggagattggtgggaagcaagatcaatcgctacaggaaagaatggttatatcccgagcaattatgtagcgcctgcagattccattcaggcagaagaatggtattttggcaaaatggggagaaaagatgctgaaagattacttttgaatcctggaaatcaacgaggtattttcttagtaagagagagtgaaacaactaaaggtgcttattccctttctattcgtgattgggatgagataaggggtgacaatgtgaaacactacaaaattaggaaacttgacaatggtggatactatatcacaaccagagcacaatttgatactctgcagaaattggtgaaacactacacagaacatgctgatggtttatgccacaagttgacaactgtgtgtccaactgtgaaacctcagactcaaggtctagcaaaagatgcttgggaaatccctcgagaatctttgcgactagaggttaaactaggacaaggatgtttcggcgaagtgtggatgggaacatggaatggaaccacgaaagtagcaatcaaaacactaaaaccaggtacaatgatgccagaagctttccttcaagaagctcagataatgaaaaaattaagacatgataaacttgttccactatatgctgttgtttctgaagaaccaatttacattgtcactgaatttatgtcaaaaggaagcttattagatttccttaaggaaggagatggaaagtatttgaagcttccacagctggttgatatggctgctcagattgctgatggtatggcatatattgaaagaatgaactatattcaccgagatcttcgggctgctaatattcttgtaggagaaaatcttgtgtgcaaaatagcagactttggtttagcaaggttaattgaagacaatgaatacacagcaagacaaggtgcaaaatttccaatcaaatggacagctcctgaagctgcactgtatggtcggtttacaataaagtctgatgtctggtcatttggaattctgcaaacagaactagtaacaaagggccgagtgccatatccaggtatggtgaaccgtgaagtactagaacaagtggagcgaggatacaggatgccgtgccctcagggctgtccagaatccctccatgaattgatgaatctgtgttggaagaaggaccctgatgaaagaccaacatttgaatatattcagtccttcttggaagactacttcactgctacagagccacagtaccagccaggagaaaatttataattcaagtagcctattttatatgcacaaatctgccaaaatataaagaacttgtgtagattttctacaggaatcaaaagaagaaaatcttctttactctgcatgtttttaatggtaaactggaatcccagatatggttgcacaaaaccacttttttttccccaagtattaaactctaatgtaccaatgatgaatttatcagcgtatttcagggtccaaacaaaatagagctaagatactgatgacagtgtgggtgacagcatggtaatgaaggacagtgaggctcctgcttatttataaatcatttcctttctttttttccccaaagtcagaattgctcaaagaaaattatttattgttacagataaaacttgagagataaaaagctataccataataaaatctaaaattaaggaatatcatgggaccaaataattccattccagttttttaaagtttcttgcatttattattctcaaaagttttttctaagttaaacagtcagtatgcaatcttaatatatgctttcttttgcatggacatgggccaggtttttcaaaaggaatataaacaggatctcaaacttgattaaatgttagaccacagaagtggaatttgaaagtataatgcagtacattaatattcatgttcatggaactgaaagaataagaactttttcacttcagtccttttctgaagagtttgacttagaataatgaaggtaactagaaagtgagttaatcttgtatgaggttgcattgattttttaaggcaatatataattgaaactactgtccaatcaaaggggaaatgttttgatctttagatagcatgcaaagtaagacccagcattttaaaagcccttttttaaaaactagacttcgtactgtgagtattgcttatatgtccttatggggatgggtgccacaaatagaaaatatgaccagatcagggacttgaatgcacttttgctcatggtgaatatagatgaacagagaggaaaatgtatttaaaagaaatacgagaaaagaaaatgtgaaagttttacaagttagagggatggaaggtaatgtttaatgttgatgtcatggagtgacagaatggctttgctggcactcagagctcctcacttagctatattctgagactttgaagagttataaagtataactataaaactaatttttcttacacactaaatgggtatttgttcaaaataatgaagttatggcttcacattcattgcagtgggatatggtttttatgtaaaacatttttagaactccagttttcaaatcatgtttgaatctacattcacttttttttgttttcttttttgagacggagtctcgctctgccgcccaggctggagtgcagtggcgcgatctcggctcactgcaagctctgcctcccaggttcacaccattctcctgcctcagcctcccgagtagctgggactacaggtgcccaccaccacgcctggctagttttttgtatttttagtagagacgcagtttcaccgtgttagccaggatggtctcgatctcctgaccttgtgatctgcccgcctcggcctcccaaagtgctgggattacaggtgtgagccaccgcgcccagcctacattcacttctaaagtctatgtaatggtggtcattttttcccttttagaatacattaaatggttgatttggggaggaaaacttattctgaatattaacggtggtgaaaaggggacagtttttaccctaaagtgcaaaagtgaaacatacaaaataagactaatttttaagagtaactcagtaatttcaaaatacagatttgaatagcagcattagtggtttgagtgtctagcaaaggaaaaattgatgaataaaatgaaggtctggtgtatatgttttaaaatactctcatatagtcacactttaaattaagccttatattaggcccctctattttcaggatataattcttaactatcattatttacctgattttaatcatcagattcgaaattctgtgccatggcgtatatgttcaaattcaaaccatttttaaaatgtgaagatggacttcatgcaagttggcagtggttctggtactaaaaattgtggttgttttttctgtttacgtaacctgcttagtattgacactctctaccaagagggtcttcctaagaagagtgctgtcattatttcctcttatcaacaacttgtgacatgagattttttaagggctttatgtgaactatgatattgtaatttttctaagcatattcaaaagggtgacaaaattacgtttatgtactaaatctaatcaggaaagtaaggcaggaaaagttgatggtattcattaggttttaactgaatggagcagttccttatataataacaattgtatagtagggataaaacactaacaatgtgtattcattttaaattgttctgtatttttaaattgccaagaaaaacaactttgtaaatttggagatattttccaacagcttttcgtcttcagtgtcttaatgtggaagttaacccttaccaaaaaaggaagttggcaaaaacagccttctagcacacttttttaaatgaataatggtagcctaaacttaatatttttataaagtattgtaatattgttttgtggataattgaaataaaaagttctcattgaatgcacc

SEQ ID NO: 10294 - DNA, 1153 bp, Homo sapiens
  SIMILAR (541)..(1152): 1001254mologous to Cloning vector pZC320 SopA,accession number U26464,Smith-Waterman Score=1077.
atgaacatgaacatcaaaaaaattgtaaaacaagccacagttctgacttttacgactgcacttctggcaggaggagcgactcaagccttcgcgaaagaaaataaccaaaaagcatacaaagaaacgtacggcgtctctcatattacacgccatgatatgctgcagatccctaaacagcagcaaaacgaaaaataccaagtgcctcaattcgatcaatcaacgattaaaaatattgagtctgcaaaaggacttgatgtgtgggacagctggccgctgcaaaacgctgacggaacagtagctgaatacaacggctatcacgttgtgtttgctcttgcgggaagcccgaaagacgctgatgacacatcaatctacatgttttatcaaaaggtcggcgacaactcaatcgacagctggaaaaacgcgggccgtgtctttaaagacagcgataagttcgacgccaacgatccgatcctgaaagatcagacgcaagaatggtccggttctgcaacctttacatctgacggaaaaatccgtttgtggtgcataaacgctggtcatgaaatgacgaaggctatcgccattgcacagtttaatgatgacagcccggaagcgaggaaaataacccggcgctggagaataggtgaagcagcggatttagttggggtttcttctcaggctatcagagatgccgagaaagcagggcgactaccgcacccggatatggaaattcgaggacgggttgagcaacgtgttggttatacaattgaacaaattaatcatatgcgtgatgtgtttggtacgcgattgcgacgtgctgaagacgtatttccaccggtgatcggggttgctgcccataaaggtggcgtttacaaaacctcagtttctgttcatcttgctcaggatctggctctgaaggggctacgtgttttgctcgtggaaggtaacgacccccagggaacagcctcaatgtatcacggatgggtaccagatcttcatattcatgcagaagacactctcctgcctttctatcttggggaaaaggacgatgtcacttatgcaataaagcccacttgctggccggggcttgacattattccttcctgtctggctctgcaccgtattgaaactgagttaatgggcaaatttgatgaag

SEQ ID NO: 10295 - DNA, 1284 bp, Homo sapiens; identical to SEQ ID NO: 1586
  SIMILAR (7)..(1101): 631254mologous to Bacillus sp. Beta- fructofuranosidase,accession number AB010272,Smith-Waterman Score= 1139.

SEQ ID NO: 10296 - DNA, 1131 bp, Homo sapiens
  SIMILAR (334)..(1116): 931254mologous to Cloning vector pBACe3.6 levansucrase,accession number U80929,Smith-Waterman Score=1268.
atgtacatgaacatcaaaaaaattgtaaaacaagccacagttctgacttttacgactgcacttctggcaggaggagcgactcaagccttcgcgaaagaaaataaccaaaaagcatacaaagaaacgtacggcgtctctcatattacacgccatgatatgctgcagatccctaaacagcagcaaaacgaaaaataccaagtgcgtcaattcgatcaatcaacgattacaaatattgagtctgcaaaaggacttgatgtgtgggacagctggccgctgcaaaacgctgacggaacagtagctgaatacaacggctatcacgttgtgtttgctcttgcgggaagcccgaaagacgctgatgacacatcaatctacatgttttatcaaaaggaacaccaaacttacggcaaacaaagcctgacaacagcgcaggtaaatgtgtcaaaatctgatgacacactcaaaatcaacggagtggaagatcacaaaacgatttttgacggagacggaaaaacatatcagaacgttcagcagtttatcgatgaaggcaattatacatccggcgacaaccatacgctgagagaccctcactacgttgaagacaaaggccataaataccttgtattcgaagccaacacgggaacagaaaacggataccaaggcgaagaatctttatttaacaaagcgtactacggcggcggcacgaacttcttccgtaaagaaagccagaagcttcagcagagcgctaaaaaacgcgatgctgagttagcgaacggcgccctcggtatcatagagttaaataatgattacacattgaaaaaagtaatgaagccgctgatcacttcaaacacggtaactgatgaaatcgagcgcgcgaatgttttcaaaatgaacggcaaatggtacttgttcactgattcacgcggttcaaaaatgacgatcgatggtattaactcaaacgatatttacatgcttggttatgtatcaaactctttaaccggcccttacaagccgctgaacaaaacagggcttgtgctgcaaatgggtcttgatccaaacgatgtgacattcacttactctcacttcgcagtgccgcaagccaaaagcaacaatgtggtgaactacggtgcatga

SEQ ID NO: 10297 - DNA, 1203 bp, Homo sapiens
  SIMILAR (1203)..(619): 951254mologous to Leishmania major probable levansucrase precursor,accession number AL160371,Smith-Waterman Score=979.
ctatcctgtcgtcatggaagtgatatcgcggaaggaaaatacgatatgagtcgtctggcggcctttctttttctcaatgtatgagaggcgcattggagttctgctgttgatctcattaacacagaccccagcttttttttgctcagaagggttagatgcctgcggcttaagtaattcctctttatctgtaaaggctttttgaagtgcatcacctgaccgggcagatagttcaccggggtgagaaaaaagagcaacaactgatttaggcaatttggcggtgttgatacagcgggtaataatcttacgtgaaatattttccgcatcagccagcgcagaaatatttccagcaaattcattctgcaatcggcttgcataacgctgaccacgttcataagcacttgttgggcgataatcgttacccaatctggataatgcagccatctgctcatcatccagctcgccaaccagaacacgataatcactttcggtaagtgcagcagctttacgacggcgactcccatcggcaatttctatgacaccagatactcttcgaccgaacgccggtgtctgttgaccagtcagtagaaaagaagggatgagatcatccagtgcgtcctcagtaagcagctcctggtcacgttcattaccggaatagtcagtgtagaataaacggatttttccgtcagatgtaaaggttgcagaaccggaccattcttgcgtctgatctttcaggatcggatcgttggcgtcgaacttatcgctgtctttaaagacacggcccgcgtttttccagctgtcgattgagttgtcgccgaccttttgataaaacatgtagattgatgtgtcatcagcgtctttcgggcttcccgcaagagcaaacacaacgtgatagccgttgtattcagctactgttccgtcagcgttgtgcagcggccagctgtcccacacatcaagtccttttgcagactcaatatttttaatcgttgattgatcgaagtgaggcacttggtatttttcgttttgctgctgtttagggatctgcagcatatcatggcgtgtaatatgagagacgccgtacgtttctttgtatgctttttggttattttctttcgcgaaggcttgagtcgctcctcctgccagaagtgcagtcgtaaaagtcagaactgtggcttgttttacaatttttttgatgttcatgttcat

SEQ ID NO: 10298 - DNA, 1226 bp, Homo sapiens
  SIMILAR (1)..(558): 991254mologous to Leishmania major probable levansucrase precursor,accession number AL160371,Smith-Waterman Score=977.
atgaacatgaacatcaaaaaaattgtaaaacaagccacagttctgacttttacgactgcacttctggcaggaggagcgactcaagccttcgcgaaagaaaataaccaaaaagcatacaaagaaacgtacggcgtctctcatattacacgccatgatatgctgcagatccctaaacagcagcaaaacgaaaaataccaagtgcctcaattcgatcaatcaacgattaaaaatattgagtctgcaaaaggacttgatgtgtgggacagctggccgctgcaaaacgctgacggaacagtagctgaatacaacggctatcacgttgtgtttgctcttgcgggaagcccgaaagacgctgatgacacatcaatctacatgttttatcaaaaggtcggcgacaactcaatcgacagctggaaaaacgcgggccgtgtctttaaagacagcgataagttcgacgccaacgatccgatcctgaaagatcagacgcaagaatggtccggttctgcaacctttacatctgacggaaaaatccgtttattctacactgactatccgggattttgccgatttcggaaccaccatcaaacaggattttcgcctgctggggcaaacccagcgtggacgctttgctgcatctctctcagggccaggcggtgatgggcaatcagctgttggcgttctcactggtgaaaagaaaaaccaccctggcgcgcaatacgcaaaccgcatctccccgcgcgttggcccgattcattaatgcagctggcacgacaggtttcccgactggaaagcgggcagtgagcgcaacgcaattaatggattttgccgatttcggaaccaccatcaaacaggattttcgcctgctggggcaaaccagcgtggaccgcttgctgcaactctctcagggccaggcggtgaagggcaatcagctgttgcccgtctcactggtgaaaagaaaaaccaccctggcgcccaatacgcaaaccgcctctcccccgcgcgttggccgattcattaatgcagctggcacgacaggtttcccgactggaaagcgggcagtgagcgcaacgcaattaatgggcactgcccgggatccccagattgaaacttctcacttcttcaccctccagtcctcgagctgcagagaagcggtcctccagtggcggttacagcagaccataaaggagcaggcactgctgaacgcacacgtgacacagacacagtaa

SEQ ID NO: 10299 - DNA, 1548 bp, Homo sapiens
  SIMILAR (804)..(4): 681254mologous to Paenibacillus polymyxa levansucrase,accession number AJ133737,Smith-Waterman Score=945.
ttagttgactgtcagctgtccttgctccaggatgctgtttttgacaacggatgttttattgcctttgatgttcattaagaagcttggcgcaaatgttgcctttttatcctcgaagaagcctctgtttgtcatgtagcttgtgataaccacattgttgcctttggcttgcggcactgcgaagtgagagtaagtgaatgtcacatcgtttggatcaagacccatttgcagcacaagccctgttttgttcagcggcttgtaagggccggttaaagagtttgatacataaccaagcatgtaaatatcgtttgagttaataccatcgatcgtcatttttgaaccgcgtgaatcagtgaacaagtaccatttgccgttcattttgaaaacattcgcgcgctcgatttcatcagttaccgtgtttgaagtgatcagcggcttcattacttttttcaatgtgtaatcattatttaactctatgataccgagggcgccgttcgctaactcagcatcgcgttttttagcgctctgctgaagcttctggctttctttacggaagaagttcgtgccgccgccgtagtacgctttgttaaataaagattcttcgccttggtatccgttttctgttcccgtgttggcttcgaatacaaggtatttatggcctttgtcttcaacgtagcgagggtctctcagcgtatggttgtcgccggatgtataattgccctgcgctgttgtcaggctttgtttgccgtaatgtttaccggaatagtcagtgtagaataaacggatttttccgtcagatgtaaaggttgcagaaccggaccattcttgcgtctgatctttcaggatcggatcgttggcgtcgaacttatcgctgtctttaaagacacggcccgcgtttttccagctgtcgattgagttgtcgccgaccttttgataaaacatgtagattgatgtgtcatcagcgtctttcgggcttcccgcaagagcaaacacaacgtgatagccgttgtattcagctactgttccgtcagcgttttgcagcggccagctgtcccacacatcaagtccttttgcagactcaatatttttaatcgttgattgatcgaattgaggcacttggtatttttcgttttgctgctgtttagggatctgcagcatatcatggcgtgtaatatgagagacgccgtacgtttctttgtatgctttttggttattttctttcgcgaaggcttgagtcgctcctcctgccagaagtgcagtcgtaaaagtcagaactgtggcttgttttacaatttttttgatgttcatgttcatgtctccttctgtatgtactggtttttggcatctgccgtttcgatacctccgaattgactgtgcctcttcctgttgcttcttaagttgctccaacattgctttaaattcagcctctttttgttctgcctcctccagtgttgcctgattctgttcttcataagccatggccaccacagccaagatcaagttcaccagatagaaagaacccacaaagatgaccaagacgaagaagatcat

SEQ ID NO: 10300 - DNA, 1368 bp, Homo sapiens
  SIMILAR (427)..(999): 991254mologous to Tn10 delivery vector pHV1248 transposase,accession number AF307747,Smith-Waterman Score=1003.
atgaacatgaacatcaaaaaaattgtaaaacaagccacagttctgacttttacgactgcacttctggcaggaggagcgactcaagccttcgcgaaagaaaataaccaaaaagcatacaaagaaacgtacggcgtctctcatattacacgccatgatatgctgcagatccctaaacagcagcaaaacgaaaaataccaagtgcctcaattcgatcaatcaacgattaaaaatattgagtctgcaaaaggacttgatgtgtgggacagctggccgctgcaaaacgctgacggaacagtagctgaatacaacggctatcacgttgtgtttgctcttgcgggaagcccgaaagacgctgatgacacatcaatctacatgttttatcaaaagcccgactatcgtgcatgcctcgcagttgactctagaggatcccccaccacaccgctcattgtcagtgatgctggctttaaagtgccatggtataaatccgttgagaagctaggttggtactggttaagtcgagtaagaggaaaagtacaatatgcagacctaggagcggaaaactggaaacctatcagcaacttacatgatatgtcatctagtcactcaaagactttaggctataagaggctgactaaaagcaatccaatctcatgccaaattctattgtataaatctcgctctaaaggccgaaaaaatcagcgctcgacacggactcattgtcaccacccgtcacctaaaatctactcagcgtcggcaaaggagccatgggttctagcaactaacttacctgttgaaattcgaacacccaaacaacttgttaatatctattcgaagcgaatgcagattgaagaaaccttccgagacttgaaaagtcctgcctacggactaggcctacgccatagccgaacgagcagctcagagcgttttgatatcatgctgctaatcgccctgatgcttcaactaacatgttggcttgcgggcgttcatgctcagaaacaagttgactctagaggatcccgcattgaaatccgtggctgcctgacccagatgggcgacattccgctggatatcaaagactggtcgcaggtcgagcaaaatccgtttttttgcccggaccccgacaaaatcgacgcgttagacgagttgatgcgtgcgctgaaaaaagagggcgactccatcggcgctaaagtcaccgttgttgccagtggcgttcctgccggacttggcgagccggtctttgaccgcctggatgctgacatcgcccatgcggggtaccgagctcgaattcgtaatcatggtcatagctgtttcctgtgtgaaattgttatccgctcacaattccacacaacatacgagccggaagcataa

SEQ ID NO: 10301 - DNA, 2386 bp, Homo sapiens
  SIMILAR (1487)..(2383): 961254mologous to Cloning vector pBACe3.6 levansucrase,accession number U80929,Smith-Waterman Score=1515.
atgaacatgaacatcaaaaaaattgtaaaacaagccacagttctgacttttacgactgcacttctggcaggaggagcgactcaagccttcgcgaaagaaaataaccaaaaagcatacaaagaaacgtacggcgtctctcatattacacgccatgatatgctgcagatccctaaacagcagcaaaacgaaaaataccaagtgcctcaattcgatcaatcaacgattaaaaatattgagtctgcaaaaggacttgatgtgtgtgacagctggccgctgcaaaacgctgacggaacagtagctgaatacaacggctatcaccccctgaaaaacaccattctatattctgtttctatgactgtgatttctcaactatatcatgctatcagagatgccgagaaagcagggcgactaccgcacccggatatggaaattcgaggacgggttgagcaacgtgttggttatacaattgaacaaattaatcatatgcgtgatgtgtttggtacgcgattgcgacgtgctgaagacgtatttccaccggtgatcggggttgctgcccataaaggtggcgtttacaaaacctcagtttctgttcatcttgctcaggatctggctctgaaggggctacgtgttttgctcgtggaagtgacagaacctccaaatttagctcagcacaaaggcctcacagatgagactgcctatcccagcctcttgtttacctacgtatggccatgggaccatccatgttttagccaactggatggattttgccgatttcggaaccaccatcaaacaggattttcgcctgctggggcaaaccagcgtggaccgcttgctgcaactctctcagggccaggcggtgaagggcaatcagctgttgcccgtctcactggtgaaaagaaaaaccaccctggcgcccaatacgcaaaccgcctctccccgcgcgttggccgattcattaatgcagctggcacgacaggtttcccgactggaaagcgggcagtgagcgcaacgcaattaatatcgcaaaaaacagtacatacagaaggagacatgaacatgaacatcaaaaaaattgtaaaacaagccacagttctgacttttacgactgcacttctggcaggaggagcgactcaagccttcgcgaaagaaaataaccaaaaagcatacaaagaaacgtacggcgtctctcatattacacgccatgatatgctgcagatccctaaacagcagcaaaacgaaaaataccaagtgcctcaattcgatcaatcaacgattaaaaatattgagtctgcaaaaggacttgatgtgtgggacagctggccgctgcaaaacgctgacggaacagtagctgaatacaacggctatcacgttgtgtttgctcttgcgggaagcccgaaagacgctgatgacacatcaatctacatgttttatcaaaagatcagacgcaagaatggtccaggttctgcaacctttacatctgacggaaaaatccggtttattctacactgactattccggtaagcattacggcaaacaaagcctgacaacagcgcaggtaaatgtgtcaaattctgatgacacactcaaaatcaacggagtggattatcacaaaacgatttttgacggagacggaaaaacatatcagaacgttcagcagtttatcgatgaaggcaattatacatccggcgacaaccatacgctgagagaccctcactacgttgaagacaaaggccataaataccttgtattcgaagccaacacgggaacagaaaacggataccaaggcgaagaatctttatttaacaaagcgtactacggcggcggcacgaacttcttccgtaaagaaagccagaagcttcagcagagcgctaaaaaacgcgatgctgagttagcgaacggcgccctcggtatcatagagttaaataatgattacacattgaaaaaagtaatgaagccgctgatcacttcaaacacggtaactgatgaaatcgagcgcgcgaatgttttcaaaatgaacggcaaatggtacttgttcactgattcacgcggttcaaaaatgacgatcgatggtattaactcaaacgatatttacatgcttggttatgtatcaaactctttaaccggcccttacaagccgctgaacaaaacagggcttgtgctgcaaatgggtcttgatccaaacgatgtgacattcacttactctcacttcgcagtgccgcaagccaaaggcaacaatgtggttatcacaagctacatgacaaccagaggcttcttcgaggataaaaaggcaacaaaagcgccaagcttcttaatgaacatcaaaggcaataaagcatccgttgtcaaaaacagcatcctggagcaaggacagctggcagtcaactaa

SEQ ID NO: 10302 - DNA, 2758 bp, Homo sapiens
  SIMILAR (1957)..(1376): 921254mologous to Shigella dysenteriae RepE,accession number AF239690,Smith-Waterman Score=951.
ctacagcatctctgtaacaggaggtccgctgggtcctctggaaacccattcagacttctggtgggagcaggccgccgtggttcttccacgtagaggtgttctctctccctctggatcagggctggcagtatgggtgccttcaggcagcactgtaagggtggtcccctcagcagaatctggtgcctcctgctcttgaccattggggatgctgccagcctccaaggtcaggctgggtgcagaaggggtgagagaaaggttcttctctgacacaggcaggatctccacagcaactggcaacagatccgcctgctcgttggccgccagattctgctcaaactcgatgcgcagcatctcatactccttgcgtacctgggccagcgtgtcctccagctgaatgacctctgtgcgtagcttcttctgcagccccagctcgtcgctggcctcatcctcagttatagcagcagagtctccctcctcttcagggcccatgatgggaaaaggcccagggggccggtgctgaaagagagccgcccggttctgctgctcccctttctttacccagtgcccgtagagccggaaggcacagttgtcgatgaggtgccgcactgaccgcagcgcataagggtccctcaacagtgcattcttggtcagtggccgtacacgatgggtgcttagggccactcgtccagcagccagcactgtccacactgccacttcagttcttctccttttcgaattagggcttgaatgctctgactgtgcgactctaaaagaaccccccgtctgatctttcaggatcggatcgttggcgtcgaacttatcgctgtctttaaagacacggcccgcgtttttcccagctgtcgattgagttgtcgccgaccttttgataaaacatgtagattgatgtgtcatcagcgtctttcgggcttcccgcaagagcaaacacaacgtgatagccgttgtattcagctactgttccgtcagcgttttgcagcggccagctgtcccacacatcaagtccttttgcagactcaatatttttaatcgttgattgatcgaattgaggcacttggtatttttcgttttgctgctgtttagggatctgcagcatatcatggcgtgtaatatgagagacgccgtacgtttctttgtatgctttttggttattttctttcgcgaaggcttgagtcgctcctcctgccagaagtgcagtcgtaaaagtcagaactgtggcttgttttacaatttttttgatgttcatgttcatgtctccttctgtatgtactgttttttgcgatctgccgtttcgatcctcccgaattgactcagatatcctttgcaggaagggattcgcgaagaaaatccgatatagtctctgccggccttcttttctcaatgtataagaggcgcatggagttctgctgttgatctcattaacacagacctgcaggaagcggcggcggaagtcaggcatacgttggtaactttgaggcagctggtaacgctctatgatccagtcgattttcagagagacaatgcttgagccatccggcttacgatactgacacagggattcgtataaacgcatggcatacggattggtgatgtcttttgtttcactaagccgaaactgcgtaaaccggttctgtaacccgataaagaagggaatgagatatgggttgatatgtacactgtaaagccctctggatggactgtgcgcacgtttgataaaccaaggaaaagattcatagcctttttcatcgccggcatcctcttcagggcgataaaaaaccacttccttccccgcgaaactcttcaatgcctcccgcatatccttactggcttccgcagaggtcaatccgaatatttcagcatatttagcaacatggatctcgcagataccgtcatgttcctgtagggtgccatcagattttctgatctcatccatcgaataataattttcttccccaaagtacctattatttgtcaggctttgtggtgagcagtttatatctgccacacacttcgaagagacccggccaaagctccttttcgttcctttagtcttgccttccctccttgttttgttccctctcttccttcgttgttctatcgttcgttctttcgtcgatcggtcgtgcatgcggtcagtcgttgtttctctcgttctttgtctctctcgatcagtgtggtcatctctcaggatgaccgctggttcgcagatgacccatggaagagagtccgtgtccccactcctgcctggtgtcgaggcttgtttgccgtaatgtttaccggaatagtcagtgtagaataaacggattttcggtccagatgtaaaggttgcagaaccggcaccattcttgcgtctgatcttttgataaaacatgtagattgatgtgtcatcagcgtctttcgggcttcccgcaagagcaaacacaacgtgatagccgttgtattcagctactgttccgtcagcgttttgcagcggccagctgtcccacacatcaagtccttttgcagactcaatatttttaatcgttgattgatcgaattgaggcacttggtatttttcgttttgctgctgtttagggatctgcagcatatcatggcgtgtaatatgagagacgccgtacgtttctttgtatgctttttggttattttctttcgcgaaggcttgagtcgctcctcctgccagaagtgcagtcgtaaaagtcagaactgtggcttgttttacaatttttttgatgttcatgttcat

SEQ ID NO: 10303 - DNA, 1362 bp, Homo sapiens
  SIMILAR (1)..(600): 931254mologous to Leishmania major probable levansucrase precursor,accession number AL160371,Smith-Waterman Score=953.
atgaacatgaacatcaaaaaaattgtaaaacaagccacagttctgacttttacgactgcacttctggcaggaggagcgactcaagccttcgcgaaagaaaataaccaaaaagcatacaaagaaacgtacggcgtctctcatattacacgccatgatatgctgcagatccctaaacagcagcaaaacgaaaaataccaagtgcctcaattcgatcaatcaacgattaaaaatattgagtctgcaaaaggacttgatgtgtgggacagctggccgctgcaaaacgctgacggaacagtagctgaatacaacggctatcacgttgtgtttgctcttgcgggaagcccgaaagacgctgatgacacatcaatctacatgttttatcaaaaggtcggcgacaactcaatcgacagctggaaaaacgcgggccgtgtctttaaagacagcgataagttcgacgccaacgatccgatcctgaaagatcagacgcaagaatggtccggttctgcaacctttacatctgacggaaaaaatccggttatttctacacttgactatttccggttaaacattacggccaaacaaagcctgacaacagcgcagggaaaatgtgttaaaaatctgatgacacactgggcggttatcaatcacaagaaacgtaaaaatagcccgcgaatcgtccagtcaaacgacctcactgaggcggcatatagtctctcccgggatcaaaaacgtatgctgtatctgttcgttgaccagatcagaaaatctgatggcaccctacaggaacatgacggtatctgcgagatccatgttgctaaatatgctgaaatattcggattgacctctgcggaagccagtaaggatatacggcaggcattgaagagtttcgcggggaaggaagtggttttttatcgccctgaagaggatgccggcgatgaaaaaggctatgaatcttttccttggtttatcaaacgtgcgcacagtccatccagagggctttacagtgtacatatcaacccatatctcattcccttctttatcgggttacagaaccggtttacgcagtttcggcttagtgaaacaaaagaaatcaccaatccgtatgccatgcgtttatacgaatccctgtgtcagtatcggaaagccggatggctcaggcatcgtctctctgaaaatgactggatcataaagcgttcccagctgcctcaaagtgccttctaccaaccctttatggggctgcggagggagagtttttatttccgctgggaaagacggaccttgggtcccctaaaaagttttagtgttaaaaggggaacggaagccggaaaattcagacttgcagcccttttggtgcgactctaa

SEQ ID NO: 10304 - DNA, 2466 bp, Homo sapiens
  SIMILAR (1061)..(336): 651254mologous to Cloning vector pBACe3.6 levansucrase,accession number U80929,Smith-Waterman Score=719.
  misc_feature (1)...(2466): n = a,t,c or g
ttagttgactgtcagctgtccttgctccaggatgctgtttttgacaacggatgttttattgcctttgatgttcattaagaagcttggcgcaaatgttgcctttttatcctcgaagaagcctctgtttgtcatgtagcttgtgataaccacattgttgcctttggcttgcggcactgcgaagtgagagtaagtgaatgtcacatcgtttggatcaagacccatttgcagcacaagccctgttgttgttcagcggcttgtaagggccggttaaagagtttgatacataaccaagcatgtaaatatccgttgagtttaaatcccatcgatcggtcatttttgaaccgccgtgaatcagtgaacaagtaccatttgccgttcattttgaaaacattcgcgcgctcgatttcatcagttaccgtgtttgaagtgatcagcggcttcattacttttttcaatgtgtaatcattatttaactctatgataccgagggcgccgttcgctaactcagcatcgcgttttttagcgctctgctgaagcttctggctttctttacggaagaagttcgtgccgccgccgtagtacgctttgttaaataaagattcttcgccttggtatccgttttctgttcccgtgttggcttcgaatacaaggtatttatggcctttgtcttcaacgtagtgagggtctctcagcgtatggttgtcgccggatgtataaattgccttcatcgataaactgctgaacgttctgatatgtttttccgtctccgtcaaaaatcgttttgtgatcttccactccgttgattttgagtgtgtcatcagattttgacacatttacctgcgctgttgtcaggctttgtttgccgtaatgtttaccggatatagtcagtgtagaataaactggatttttccgtcagatgtaaaggttgcagaaaccggacctttctttgcgtctgatctttcaggatcgggatcgttggcgtcgaactattcgctgtcttaaaaaacacggccccgcgtttttccagctgtcgattgagttgtcgccgaccttttgataaaacatgtagattgatgtgtcatcagcgtctttcgggcttcccgcaagagcaaacacaacgtgatagccgttgtattcagctactgttccgtcagcgttttgcagcggccagctgtcccacacatcaagtccttttgcagactcaatatttttaatcgttgattgatcgatatgaggcacttggtatttttccgttttgctgctgtttagggatctgcagcatatcatggcgtgtaatatgagagacgccgtacgtttctttgtatgctttttggttattttctttcgcgaaggcttgagtcgctcctcctgccagaagtgcagtcgtaaaagtcagaactgtggcttgttttacaatttttttgatgttcatgttcatgtctccttctgtatgtactgttttttgcgatctgccgtttcgatccttcccgaatgatagggtttttcctngtgaaaattttccgcatcagccagcgcagaaatatttccagcaaattcattctgcaatcggcttgcataacgctgaccacgttcataagcacttgttgggcgataatcgttacccaatctggataatgcagccatctgctcatcatccagctcgccaaccagaacacgataatcactttcggtaagtgcagcagctttacgacggcgactcccatcggcaatttctatgacaccagatactcttcgaccgaacgccggtgtctgttgaccagtcagtagaaaagaagggatgagatcatccagtgcgtcctcagtaagcagctcctggtcacgttcattacctgaccatacccgagaggtcttctcaacactatcaccccggagcacttcaagagtaaacttcacatcccgaccacatacaggcaaagtaatggcattaccgcgagccattactcctacgcgcgcaattaacgaatccaccatcggggcagctggtgtcgataacgaagtatcttcaaccggttgagtattgagcgtatgttttggaataacaggcgcacgcttcattatcttntgataaaacatgtagattgatgtgtcatcagcgtctttcgggcttcccgcaagagcaaacacaacgtgatagccgttgtattcagctactgttccgtcagcgttttgcagcggccagctgtcccacacatcaagtccttttgcagactcaatatttttaatcgttgatcgatcgaattgaggcacttggtatttttcgttttgctgctgtttagggatctgcagcatatcatggcgtgtaatatgagagacgccgtacgtttctttgtatgctttttggttattttctttcgcgaaggcttgagtcgctcctcctgccagaagtgcagtcgtaaaagtcagaactgtggcttgttttacaatttttttgatgttcatgttcat

SEQ ID NO: 10305 - DNA, 479 bp, Homo sapiens
  SIMILAR (205)..(366): 551254mologous to Homo sapiens Wilms' tumour 1-associating protein,accession number BC000383,Smith-Waterman Score=127.
tcaccaataggggactgaataagctgcgtatttcttcctttgagcgcagctggtgcaataaacaggagctcgcagagtcccgtggccgcggaggggcgccagactccggggaagagccagagcgaggtccgacgaatcgggctctgctggcgaccagcccccttcctttcctccctggtggggctggcggtgggtgaccacggccgcatctccagcaaatctgtggcccagcgtggcccgatcaacaatggtagaccgagccatcaacctgttttcctaaaaatgaaaggtgatctggccctgactgaagacaaacgggaacaagcccaaaatgaacagagtgcctggaagtttacgcctggtaggtaaactctccagtcatattctcagtcaaggcttccctgacagtcccactactagaaagtcactgggggggacagccaaggactcgtttctacaccaacactcagactttttga

SEQ ID NO: 10306 - DNA, 347 bp, Homo sapiens
  SIMILAR (19)..(303): 891254mologous to Homo sapiens ribosomal protein L31,accession number X69181,Smith-Waterman Score=438.
atgcaccatcaacaatcccaagagcttcctggagtgggcttcaagcagcatgcccctcaggcactcacagagatccagaaatttgccatgaaagagatgggaactccagatgtgcgcattgataccaggctcatcaaagctgtctgggccaaaggaataaggaatgtgccataccgaatccgtgtgcggctgtccagaaaacgtaatgaggatgaagattcaccaaataagctatatactttggttacctatgtacctgttaccactttcaaaaatctacagacagtcaatgtggatgagaactaatcgctgatcgtcagatcaaataaagttataaaattgccttc

SEQ ID NO: 10307 - DNA, 356 bp, Homo sapiens
  SIMILAR (171)..(260): 701254mologous to Homo sapiens voltage-gated L-type calcium channel alpha-1 subunit,accession number AF067227,Smith-Waterman Score=96.
cattatctaatgaacaaaggattttctcaaaatcctttcatatcttgttattctcaagtataaattgaagcttttaacttgtctttataatgtaacctcaatctcaaccctctaacccttctccatagcacttaatactgttattcctgaaacataaatattgctttgccagagaagaagaagaaaaatgaagaggagtaggaggagaagaggaagaagaggaggaagaagaagaggaaggagaggaggaagaagaagaaatctttaagtccatagtttattaaattggtaggaatcaggacataatttgtatctatgtaacatattcctaggattcatttctatagttattcagc

SEQ ID NO: 10308 - DNA, 1758 bp, Homo sapiens
  SIMILAR (892)..(1119): 421254mologous to Arabidopsis thaliana putative protein,accession number AL162506,Smith-Waterman Score=135.
atggctgtgatattagtttttcacttcatcataagtgtggatgccaagactgaaacttgttacccaccagcgctgctgcacagccagctgctggctcagaggcctggcctatggctgctcaagagaagtacaacggtgccctatttcctcatatcctattgccccataaaagcccctcattcctcacagcagcatccccaagtctcttatatgatccgtgatctttacattttgcccacagtcggcagggctggcaggcaccagctgtctgagccaccctgccgtgggaacgccaaccagccctcctcccccaacaaatcctaccccacaaattgtcaaaaaggcatcatgacagatagagctcccgcatgccacagaaggtgtcagatctcagttcaaaggttacaggaagacaagacccatttactcattttccagtatggcgggatgctgcatgcacaggatgctgtggccaagcatctcatgctgtcatcctttcctgaagactcccaggcatccctctggggaaggaggcagatttttaatgcatgtcagcatctcaacctctctcaagtccacggccacaaagaaagttttgctcagcctttttcaaagcattttgattcagagacttgtaactggaccacgtggcaggacattggagtctcaggattactggccacagttttggaatactgggccaagggaagataccgaaacatggagcagaccctccaggtaaaccagggtttgcaagcatatcaggacttagctgagacatatgggaccagacagagcaccagtcctcaggcccatggtcctatgggacttcaacagatcctgaactctacctcagatctggcagtcatagtctttgagaaaagaggaggaggagaagaagaagaagagaaggaagaagaagaagggaggaggagaagaagaagagaaggaagaagaggaggaggaggagaagagaagaagagaaggaagaagaagaagaggaggaggaggagaagaagagcacaggaagaggaggaggagaaaaaggaggaggaagaggaggaggaagaggagtggtgtctaggcgaggaggaatctcagcctggacatgctgaagaagtcccctcaccccacaagatgggggctctcactctgagagtggagggagtcaaggagcaagaagccaagctgctgagatcatcagaccttatgaagggagacttcagcagcacatcacagcatccaccacagtgcagcaaaagaactaactcggagagtaacgccgatgcaaaaagcaagaagaaggaaagaccgataatgaccttccgccaaaggaaaacattccgcattcgcatactccccctgccccagggccgcattgctgggagcaacaagctgagtgctaagctgtgcacagatgggaggggggctggtgatgtaggagtcctgacaaatgtcatgcttaaacgtcttcactttacgattgaccattttctgttcaagatcatccagatgtctccttccgccagttggaacctgtggagcttgctggatcaggattctctaaaatgccaaatatgtctggaaggatatgcccaaggaggaaagccagatgtccagctcttgcctccaagactcactgctgattggaagggacatcgatgggggcagatgatgggtttggatgagaaactcactcccagctcggtcatggtcacatcagtggcccttttctggttcgaggtcagcgctcaataa

SEQ ID NO: 10309 - DNA, 447 bp, Homo sapiens; identical to SEQ ID NO: 4624
  SIMILAR (355)..(444): 901254mologous to Homo sapiens Peptide sequence derived from a human secreted protein,accession number Y40039,Smith-Waterman Score=134.

SEQ ID NO: 10310 - DNA, 3800 bp, Homo sapiens
  SIMILAR (1233)..(2330): 961254mologous to Homo sapiens putative p150,accession number U93572,Smith-Waterman Score=1799.
atgaatagacaattatcaaaagaagatatacaaatggccaacaaacatgaaaaaatgctcaacatcactaatgatcagggaaatgcaaatcaaaaccacaatgcaatacaaccttactcctgcaagaacggccataatcgaaaaatagatgttagcatgaacatggtgaacagggaacacttctacactgctgtccacaaagcctcagacctctctttcaaacctacatctgaaaaggatttggacacaaagttacaggctaactttccaaaccttgtcaaggcacctgacaaggcaaggatttgtttctgtgggaagccctatcagccctatgtccaggggagccctaattcccctgttgaaattgtggagaatgagccaagccaactcctacatttcctttgtgttggaagctcaaaagaagaaatagatctggggaaccccaaaggtagtcagcacacagggctggggcacagcatgggtaaatgcaactatttctacctgccaatcctcctagtccatggctggaagtcacacttgcatccgtgtgtggcatctatgaaggttgctgggacccagaggacacaggatcaggatgaagcccaggaaaaagagaagagagataagagaaaggcagaggctctagtggctgctcttcagacctataaaacacagaatccccaaggtgcacctgccaattgctacaagtgtggcaaactagggcactttaagaaggattgccacagcagcaagaggaagccacttgaccctgtccagcctgtggtggggacaactggaaggcagattgtccatggaggcataggaccagatggatttacagtcaaattctaccagaggtacaaaagggagctggtactactccttctgaagctattgcaaagaattgaaaagaagggactcctccctaactcattttatgaagccagcatcatcctaacactgaaacttggcagaaacacaacagtaaaaacaacaaaacttcaggccaatatccctgacgaagattggtgcaaaaatcctcaacaaagtactggcaaatcaaatgcagcagcacatcaaaaaacttatccaccacagtcaagtcagcttcatccctgggatgcaagactggttcaacatacacaagtcggaacatggatgaagctggaagccatcatcctcagcaaactaacacaggaagaagaaaaccaaacaccacacgttctcactcagacacaaccaaaaaagagaattttagaccaatatccttgatgaacattgatgcaaaaatcctcaataaaatactggcaaaacgaatccagcagcacatcaaaaagcttatccaccatgatcaagtgggcttcatccctgggatgcaaggctggttcaatatatgcaaatcaataaatgtaatccagcatataaacagagccaaagacaaaaaccacatgattatctcaatagatgcagaaaaggcctttgacaaaattcaacaacccttcctgctaaaaactctcaataaattaggtattgatgggtcgtatttcaaaataataagagctatctatgacaaacccacagccaatatcatactgaatgggcaaaaactggaagcattccctttgaaaactggcacaagacagagatgccctctctcaccactcctattcaacatagtgttggaagttctggccagggcaatcaggcaggagaaggaaataaagggtattcaattaggaaaagaggaagtcaaattgtccctgtttgcagacgacatgattgtatatctagaaaaccccactgtctcagcccaaaatctccttaagctgataagcaacttcagcaaagtctcaggatacaaaatcaatgtacaaaaatcacaagaattcttatacaccaacaacatacaaacagagagtcaaatcatgagtgaactcccattcacaattgcttcaaagagaataaaatacctaggaatccaacttacaagggatgtgaagaacctcttcaaggagaactacaaaccactgctcaatgaaataaaagaggatacaaacaaatggaagaacattccatgctcatgggtaggaagaatcaatatcgtgaaaatggccatactgcccaaggtaatttacagattcaatgccatccccatcaagctaccaatgcctttcttcacagaattggaaaaagctactttaaagttcatatggaaccaaaaaagagcccgcattgccaagtcaatcctaagccaaaagaacaaagctggaggcatcacactacctgacttcaaactatactacaaggctacagtaaccaaaacagcatggcttcagcacgcagtgccggctaatgatggcaccacaagatccccatcaatagacagcattcagaaggaccccagcgagtttgcctggcgtgatcctgagttgcctgaggtcattcacatccttcagcaccagttcccatctgttcaggcaaatgcagcagcctacctgcagcacctgtggtttggtgacaacaacgtgaagatgaaggtgtgtaggttatggggaatcaagcttctggtttaccttttgggccacagagttttggaagttcagaagaatgcttgtgatgcccttcgaaatctctttttcggcaagtctacaggtgaaaataaaataacaatgaaggatgttgccacattggatctgagtttcattctcagcaaactaacacaggaacagaaaaccaaatacctcattgttctcactcataagtgggagttgaacaatgagaacacagggacacggggaggggaacgtcacacacttgggcctgtcagggggtgggggcctaggggagggatggcattcggagaaatacctattgtagatgacaggttgatggatgtatcccagaacttaaagtataattttaaaaaaaaagagggagaagagggagaaggggaagaagaaggagaagaagaggaagaagaagagaagaaggagggggaggaggaggaggaagcttctggaggacccatcacaccaagcccaaggaccagcacaaaaaagacacaatgggccactttagaagctgtgctttccaagagggctttgtcgtccatgttcctctgctgtcttctgaaaagtaaagataagtgggaagaaaggtgggagctcctccagggagagctgccaaattcagctccagatacttttccagcccctttcacatttgcatggggccctgcaggatctgacctgctcgtggctacgaagcagcctcctccactctgcccctctgcctctccagacccagacctggctcctgctttgttcttattcagtaattgcaagctttctttggggcataggaaagagaagagggacgctgtggcttgccggggaagaaaacctttaaaagtcatccttgtgaattttggacagctgacttcttataaagagcttccctcctacgcgttgggcctaaagcccagtccctgggacagcactcatgcacctctggccctcccctatcactcccctgtctttcaagaaggcaaaagcaccagccttgcaatgggaatcttccagccagggcactttccttcagtaaaaaccctttgtgcccctgcaggcacttcctgtgaatcattgtccggccccggagctaccggctttgcaaactgcaggtttctgcaggaagccacagatgaggtgtgccaatctgcccaatctgctcagagacctggctccggaaaacccaatagtatgtgctgggaaaaaagtcaggccatctgggccccggtctga

SEQ ID NO: 10311 - DNA, 1537 bp, Homo sapiens
atgacgcaaaagaaaaaccaaacagagcagaaagagcaaaaaaacgaacaaaaaaaacaacacaacgaacgaaaagaacacaagaagaaacaaacagaatacaaaacacacgagacaaacagacccaggaaaacagaaagagcggagcacgacgaacaaaaaagagagaacgagggaaaaaggagacgacacaagaaacggacagtgagaggaaaaaaacgaacgaagagacagagacacggaaaggaagggagaagccagaacaagcaagacaagccagaaaagagaaacaaaagagacaacggggggaaagacaaaacagaagagaaaaaaagaaaaaacaacagacaagaaaacgaagaggaagaagcgaacgagcaagacagaagagaacaaaaagaggaaacaagaaaaagaggaccgagaaagagacgagagcacaaagaggaggaaggaaggagagagagaaagaagaggaaacgcaagacgaaggaaaaagggcggagagcacagcaaaaagagaggagagaggaggaacaacagcaaaggagaaggagaagaagaggaaagaggaagaaaaacgaaagcgaagacgaggaggacaaggcaagcaacaaacacagacagcaagaacgagaaaggcagaaaaggaaaggggcagacgcgggcgcgcagaccagcagaaacagggaggaggagaagaaaaagaaagagacagaggaaagcaggcgaaacaacgccaggagagacagggagatggtgtgcttccgtgcgctccgtggacggctcacccacgacagccttcacagtgctggagtgcgagggctcccggcggctcggctcatcggccccggcgctacctgctcactggccaggccaacggcagcttggccatgtgggacctaaccaccgccattggacggcctcggccaggcccctgcaggtggcctgacggagcaagagctgatggaacagctggaacactgtgagctggccccgccggctggcttcaagctccctcaatggggctgtctccccaagcccctcaccccgcatctccctcaccaagcctccactcaagcctccagcaacacctcctttgtctggccaaccgtggggagccccaaagcccccccggcaggcttgaggccccggcggccgtgggtggggggaagctttgtggaacgcttgccaggaactggtgcggagtgggccagacctccgacggccacccacaccaagccccgtggccctccaagcggtctcgggactcccctcacaccttccaagaatgaagctcaatgaaacttccttttgaacaacgcagctgccatgatgccttgggatgccctggtcctgggggaatcaggtgcctccctgattcctgtgggaaccccgggttcagggccagggcctccttggaataaatggttattgttactaggtccccaccttccctcttttttggaagccaaagtcagcctccccaataaagtcctcactgccaaaaaaaaaaaaaaaaaaaaaaaaaaagggc

SEQ ID NO: 10312 - DNA, 1368 bp, Homo sapiens
  SIMILAR (147)..(371): 701254mologous to Mus musculus coronin-3,accession number AF143957,Smith-Waterman Score=309.
atggagacgtggggagactggaggccgaggcttggggacccgactgtcatcagggtcttccgccagaccctgggcgctgcgccctcagaggccgatgaaaagaagcagaagggagagccctcgcgaggctcctgggtcccagcgaggagaggtttgcggcccacgaggggatgaggcccatgcgggccgtcttcacgcgccagggccatatcttcaccacgggcttcacccgcatgagccagcgagagctgggcctgtgggacccgaacaacttcgaggagccagtggcactgcaggagatggacacaagcaacggggtcctattgcccttttacgatcccgactccagcatcgtctacctgtgtggcaaggtgctcacggccgggcagggagaacagggcactggatggagatgtggagggccttgtccgggcgcgcccctgaaccgactgattttgcagggcgacagcagcattcggtactttgagattaccgacgagccgcctttcgtgcactacctgaacacgttcagcagcaaagagccgcagcgaggcatcgggtttcatgcccaaaaggggactggatgtcagcaagtgtgagatcgcccggttctacaagctacacgaaagaaagtgtgaacctatcatcatgactgtgcacccgcaaggtgagggcctgggatcgagacctcggtcgcaggagcgatgctgtaccccggatacgccagggcccggagccggccctagaagcggacgaatggctatccggccagggacgccgaaacccgtgctcattttcgctgaggggacggctattgttgccccccaacgcaccgcgacgctccgggtcacgaagcgcaacatcctggacgtgcgcccgccctccggcccccgccgcaagccaagtcggccagcgacgcccccttgtcgcagcagcacacccttggagacgctgctggaagagatcaagcccctccgcgagcgggtgcaggcccaggagcagcgcatcacggctctggagaacatgctgtgcgagctggtggacggcccgcactacccccgtgcgccaggcagggcgagcgggctacctactgatcctttcggtggagctgtgcgccgtgcctgcccggtgccacctcctctcgtgcccctggcccgtgctgtgcgaaccttgcccctccgctacgcttcgtcgatagccgcactagtggaacggatgaaggcgcacatgtgggccaaaggacgagcaacccgagatgcaacagcaaagcggtgctccccgatggcgcagaccactacacagcacctgcacgtcccctgcgatcgcgaagatgagagccgctggaactacatctgctgtagtagttaa

SEQ ID NO: 10313 - DNA, 399 bp, Homo sapiens
  SIMILAR (676)..(1962): 901254mologous to Homo sapiens putative p150,accession number U93563,Smith-Waterman Score=2117.
atgattaatccaaatccagagcgttctgacgatttggttttctggggcctcttccgtgccggtggtatgtggagcgccatcattgcgccggtgatgatcctgctggtgggtattctgctgccactggggttgtttccgggtgatgcgctgagctacgagcgcgttctggcgttcgcgcagagcttcattggtcgcgtattcctgttcctgatgatcgttctgccgctgtggtgtggattacaccgtatgcaccacgcgatgcacgatctgaaaatccacgtacctgcgggcaaatgggttattttacggtctggctgctatcctgacagttgtcacgctgattggtgtcgttacaatctaacacaacgccaatgtaaatccgacgaaatcgtcggcgcg

SEQ ID NO: 10314 - DNA, 582 bp, Homo sapiens
  SIMILAR (179)..(262): 821254mologous to Homo sapiens Human secreted protein, SEQ ID NO: 6834,accession number G02753,Smith-Waterman Score=115.
  misc_feature (1)...(582): n = a,t,c or g
gacgntgntgctgacggggtgacgttctctgttccggtcacaccacatacgttccgctattactatgcgatgcacatgctgtatgccggtataccgctgaaagttctgcaaagcctgatgggacataagtccatcagctcaacggaaggctacacgaaggtttttgcgctggatgtggctgcccggcaccgggtgcagattgcgatgccggagtctgatgcggctgcgatgctgaaacaattatcctgataataaatgccttggcctttatatggaaatggggaactgataggatatgctgtttttgtctgttacacaaagaagccggcctgtaatccactgataacgctaaccaaacaggtcggcaaaaatgtcccaatattcggggagaaaccgcgttaactaaccccaggggctgtgggtgcggtacttgtgcacgaattgtatttccatgaatcttgcccccggtatgcaggaactaatttaattgtctctttgctacatataagttctccagtgttttagtcaattagttacaattttgcccaatttatggctacaattttgggacctatgcctgcg

SEQ ID NO: 10315 - DNA, 665 bp, Homo sapiens
  SIMILAR (463)..(585): 901254mologous to Homo sapiens Protein sequence encoded by clone p199-7 (PL mutet.rsT4),accession number P93373,Smith-Waterman Score=192.
atagggcgaattcgagctcggtacccggggatcctctagagtcgacctgcaggcatgcaagcttgagtattctatagtgagtcgtattagagcttggcgtaatcatggtcatagctgtttcctgtgtgaaattgttatccgctcacaattccacacaacatacgagccggaagcataaagtgtaaagcctggggtgcctaatgagtgagctaactcacattaattgcgttggcgctcactgcccgctttccagtcgggaaacctgtcggtgccagctgcattaatgaatcgggccaacgcgcggggagaggcggtttgcgtattggggcgctcttcccgcttcctcgctcactgactcgctgcgctcggtcgttcggctgcggcgagcggtatcagctcactcaaaggcgggtaatacggttatccacagaatcaggggataacgcaggaaagaacatgtgagcaaaaggccagcaaaaggccaggaaccgtaaaaaggccgcgttgctggcgtttttccataggctccgcccccctgacgagcatcacaaaaatcgacgctcaagtcaagaggtggcgaaacccgacaggactataaagataccaggcgtttccccctggaagctccctcgtgcgctctcctgttcccgaaccctgccgcctta

SEQ ID NO: 10316 - DNA, 793 bp, Homo sapiens
  SIMILAR (19)..(579): 581254mologous to synthetic construct lac repressor,accession number A14595,Smith-Waterman Score=414.
  misc_feature (1)...(793): n = a,t,c or g
tggtcgcattgggtcacccagcaaatcgcgctgttagcgggcccattaagttctgtctcggcgcgtctgcgtctggctggctggcataaatatctcactcgcaatcaaattcagccgatagcgggaacggggaaggcgactggagtgccatgtccggttttcaacaaaccatgcaaatgctgaatgagggcatcgttcccactgcgatgctggttgcccaacgatccagaatggcgctgggcgcaatgcgcgcccattaccgaagtccgggctgcgcgttggtgccggatatcctccgggtagtgggataccgacgataccgaagacagctcatgttatatccccgcgctttaaccacccatcaaacaggattttcgcctgctggggcaaacccagcgtggaccgcttgcttgcaactctctcagggccaggcggtgaagggcaatcagctgttgcccgtctcacttggtgaaaagaaaaaccaccctggcgcccaatacgcaaaccgcctctccccgcgcgttggccgattcattaatgcagctggcacgacaggtttcccgactggaaagcgggcagtgagcgcaacgcaattaatgtgagttagctcactcattaggcaccccaggctttacactttatgcttccggctcgtatgttgtgtggaattgtgagcggataacaatttcacacaggaaacagctatgaccatgattacgccaagctntaatacgactcactatagggaaagctggtacgcctgcaggtaccggtccggaattcccgggtcgac

SEQ ID NO: 10317 - DNA, 869 bp, Homo sapiens
  SIMILAR (155)..(250): 931254mologous to Plasmid F Protein D,accession number M12987,Smith-Waterman Score=158.
ttcagttcagggaccgtacccggagatcgtccggaccgggaatttattggcgataccctcatggagcggcgtaaccgtcgcacaggaaggacagagaaagcgcggatctgggagacggcgaacacactggcgataaccatgcttatgtcgacttgcgatgccagccgctgctgctgacggtgtgacgttctctgttccggtcacaccacatacgttccgccattcctatgcgatgcacatgctgtatgcccggtataccgctgaaaggtctgcaaagcctgatgggacataagtgcatcaggtcaacgggaaggctaccccaaaggtttttgggcctggaatggggcttgcccgggcacccggggggcaggttggcaatggccgaagtctgatgcggttgggaatgcctaaaacaataaccttgggataaatggccttggcctttatatggaaatgtggaactgagtggataatgctgttttttggctgctaaaaaaagaagctgggctgttgtcctgcaaggagatataagttgcgggtcgggcaggtctcccattattggggaagatccggattatttaatctaaggaccctggggtacgcttataggaagtagtgttctgtcatgatgcctgcaagcggtaacgaaaacgatttgaatatgccttcaggaacaatagaaatcttcgtgcggtgttacgttgaagtggagcggattatgtcagcaatggacagaacaacctaatgaacacagaaccatgatgtggtctgtccttttacagccagtagtgctcgccgcagtccagcgacagggcgaagccctcgagtgagcgagggagcacccaggaacagcacttatatattctggg

SEQ ID NO: 10318 - DNA, 891 bp, Homo sapiens
  SIMILAR (104)..(676): 471254mologous to Cloning vector pTM30 repressor LacI- q,accession number AF023620,Smith-Waterman Score=307.
tatttcttgatgtctctgaccagacacccatccaacagtattattttctcccatgaagacggtacgcgactgggcgtggagcatctggtcgcattgggtcacccagcaaatcggcgctgttagcgggcccattaagttctgtctcgggcgcgtctgcgtctggctggcttggcataattttctcactggcaattcaaattcagccgatagcgggaacggggaaggcgactggagtgccatgtccggttttcaacaaacccctgcaaatgctgaatgagggcatcgttccccactggcgattgctggttgcccaacgatccagaatggcgctgggccgcaatgcgccgccattacccgagtccgggctgcgcgttggtgcggatatcctccgggtagtgggataccgacgatacccgaagacagcttcatgttatatccccgcgctttaaccacccatcaaacaggattttcgcctgcttggggcaaacccagcgtggaccgcttgcttgcaactctctcagggccaggcggtgaagggcaatacagctgttgcccgtctcacttggtgaaaaaaaaaaccaccctggcgcccaatacgcaaaccgcctctccccgcgcgttggccgattcattaatgcagctggcacgacaggtttcccgactggaaagcgggcagtgagcgcaacgcaattaatgtgagttagctcactcattaggcaccccaggctttacactttatgcttccggctcagtatgttgtgtggaattgtgagcggataacaatttcacacaggaaacagctatgaccatgattacgccaagctcttaatacgactcactatagggaaagcgtggtacgcctgcaggtaccggtccaggattcccggctct

SEQ ID NO: 10319 - DNA, 849 bp, Homo sapiens
  SIMILAR (32)..(265): 471254mologous to Plasmid F Protein D,accession number M12987,Smith-Waterman Score=113.
ttccgtacaggtatttattcgcgataagctcatggagcggcgtaaccgtcgcacaggaaggacagagaaagcgcggatttggggaagtgacggacagaacggtcaggacctgcgattgtggaggcgggttgccagccgctgctgctgacggtgtgacgtttttttgttcggctccccccaacatacggttccgcccattcctatgcgaatgcacatgctgtatgcccggtaatacccgctgaaaggtctgctaagcccgatcggcacataagtgcatcaggtcaacgggaaggctaccccaaaggtttttgggcctggaatggggcttgcccgggcacccggggggcaggttggcaatggccgaagtctgatgcggttgggaatgcctaaaacaataaccttgggataaatggccttggccttatattggaaatgggaaaccggaggggatatgctgcttttgtctgttaaacagaagaagctgggctgttatccccttgagaagcgaccgaaacagtcggggaaaatttgccattattgcgaagaatcccgtttattattcttaggagcctgtgtagcgtttataggaaagaatggttctgtcatgatgcctgcaagccggtaacgaaaacgatttgaatatgccttcaggaacaatagaaatcttcgtgcggtgttacgttgaagtggagcggattatgtcagcaatggacagaacaacctaatgaacacagaaccatgatgtggtctgtccttttacagccagtagtgctcgccgcagtccagcgacagggcgaagccctcgagtgagcgagggagcacccaggaacagcacttatatattctggg

SEQ ID NO: 10320 - DNA, 508 bp, Homo sapiens
  SIMILAR (282)..(506): 981254mologous to Homo sapiens -14,accession number X90857,Smith-Waterman Score=362.
ggacaggatgcccaggcccaccttggggtgtttgtggggcacacatcgcacctctgttcaggtcccttgaggttgcccccagaggggaggctacccgtttcccaagtcagccgtatgaggggcgtgtcacacccaggaggtggggcagcagcgaatgcttgcaggcagatgtaccctaacccttgtaggagttaggggtgtcattggaggctggctgctggctctgccctcgctgttccccctgggtgtcctggaattccacttggtcaccctgacccatgtcccccacagccagcagcgatgacatgaccctcaccagccccagcatggacaactccagcgcagagctacttcccagcggggactcgccactgaaccagaggatgacggagaacctgctggccagcctgtcggagcatgaacgcgcagccatcctcagtgtacccgcagcccagaaccctgaggacctccgcatgtttgccaggctccttcactacttccgcggccg

SEQ ID NO: 10321 - DNA, 1716 bp, Homo sapiens
  SIMILAR (1173)..(727): 951254mologous to Escherichia coli K12 putative ATP-binding component of a transport system,accession number AE000313,Smith- Waterman Score=785.
ttagttgccgctccgtagccccctcatgacagactgccggcccttcccccgtcttggaggttccccagccccactttccgcgttatgagccaatagtcctttgatcgcagcagcgtccacctggtctctgttgtccgtgggcggcgggcgcttggggaaggcggacgggaagaaggcgcccccgctgtcttggggccactgcttggccccaaggatccttgcaccgaccccagggtctagggcggcttcacggtgatgtaacaggctggcaagcccgttgagtaacagagcattaaacgtttcgggatcggtcacgttgcaggcgtgtccgccatagggcatcaccattttctggctatcgggcagggcggcatgaagttcactggaacatgctgttggcaccagcagatcatcactggcgcagatgatttgcaccggacagcggatgcgatccgcatggtgactagagcactctgtatatggtccactgttagttgcttccttggcctttaacaaccagcttttgttcaggcttgtggcaaagtcagaagttaattcccagcagtgcttcttcaacaaaggcctgaagagatttatgtacaacgagaacacgcggcgctccaagctgctcatgctgtttgacaagttccgcagcgtgttggtggtgaccacccacgaggaccctgtcattgccgtcttcaaggctttgctcccttgggccccaggcggagggcggaaggctgcacgccccggtaaccactgataccccgcctccagcgaggcgataatccccgacgagtggtaatgatctgtgccatcttcttgttcggaaacatcattgctaaaccacgcgtattgcagccagctatccagccaggccccttgcttctgattaccgtgctgaaaccagcttgatgtcagcccaacggcataaccgtggttctggttatcggcgcgagttccggtcatattcgagcggctgtcgccctggttatcgctgtagccaccaacaatcccaagcatccactcgccatccgtgccccagcgcccgctaaacagatcgccgctaagttgcaccgtagaagtgtcttcatgttgagccagttgccccgctgctgtgtaatgataatctccgccgataacacgtaaattcagcgtctgaccatccaacccctcccctttgaaggggttaaaggaaaacattccggggggcgggattttccccggggggggcaaatctttaacggttgttgggggaattgaaaaaagcttaccggtacgggtcgcgggcaagggtgtatatccggcgcttggcgcaaaaagtgaaagttgacgcccaaaaccggtcgtgaaaccattatcgtccacgaaattccgtatcaggtaacaaaagcgcgcctgatcgagaagattgcggaactggtaaaagaaaaacgcgtgaaaggcatcagcgcgctgcgtgacgagtctgacaaagacggtatgcgcatcgtgattgaagtgaaacgcgatgcggtcggtgaagttgtgctcaacaacctctactcccagacccagttgcaggtttctttcggtatcaacatggtggcattgcaccatggtcagccgaagatcatgaacctgaaagacatcatcgcggcgtttgttcgtcaccgccgtgaagtggtgacccgtcgtactattttcgaactgcgtaaagctcgcgatcgtgctcat

SEQ ID NO: 10322 - DNA, 1545 bp, Homo sapiens
  SIMILAR (538)..(660): 921254mologous to Homo sapiens -14,accession number X90857,Smith-Waterman Score=197.
atgcagcacctgtctcacggttcccgaaggcacattctcatctctgaaaacttccgtggatgtcaagaccaggcagtttcccagacattactcacccgtccgccactcgtcagcaaagaagcaagcttcttcctgttaccgttcgacttgcatgtgttaggcctgccgccagcgttcaatctgagccatgatcaaactcttcaatttaaaagtttgacgctggtgacctccgtgcgagtccccctggaagtagctcgccctggattgtccatgctggggctgctgaggttcatgtcatcgctgctggctgtgggggacatgggtcagggtgaccaagtggaattccaggacaccaaggggaacagcgagggcagagccagcagccagcctccaatgacacccctaactcctacaagggttaggcggtgccctgggggtcctacttggggagccaaagctgagggcgttgggcgtgctgaggctgcgaccgccgacccgggcagtgaaggggacgtcgtcctctcgcggacggggctcctcctcgctgggctccttcactacttccgcggccgccaccacctggaggagattatgtacaacgagaacacgcggcgctcccagctgctcatgctgtttgacaagttccgcagcgtgctggttggtgaccacccacgaggaccctgtcattgccgtcttccaggctctgctcccctgagcccaggcggagggcggaaggctgctggggtgcgcaggtgggcgctcgcgtctccccaccccagggctccccccgtgctgaggctgagccctcttggccctgaggcctggcattgggtggatgcgggctggccgtggcccactgaagcctgcagagccccggctgtccttgcccctggtggttccgctgtggggctgctgcctgctgtgttcctacgcttccctccagtccttgccgcacgcgtaggcatctccacgctggaggggggcctgccaggactcctgtctctggggtgaaggcccgcatcccttcaaggccccatgtgggctgtgcgtttcctcagacccctcccttctgtccctacacctgctccttggacccccccagtctgtggccaccctgaagaatgtgcagaaacacttgtgtgggcctgtccctgtctctctgacagccttccacagtccacagaagccacaaacaggctcatagccaagctgtgacctggtcctgaccatctggggcacgaaggccttgggctgccctggtagggcttgaaaaccccttgacccttgcacacacttgttggggggaggcttggcccattgtgcaggaaccccaccctcggggggctttgggtttccacactgattgattctccccaggatccacaccgggcctggcgcttcgtactcaggcccccagctcttgtgttcctggagaagagctagctccagacatgggttgtcacctagaagactctggcttagggcccagtttctagaaataaacatttaattcgtttttaacaattaaaaaaacttgtctgggca

SEQ ID NO: 10323 - DNA, 765 bp, Homo sapiens
  SIMILAR (47)..(739): 521254mologous to Homo sapiens -14,accession number X90857,Smith-Waterman Score=406.
tgctcccctgccctagtgcgggtgatcagaccacatctgctgtgaaagaacctgcaggcagctagcccaagatgcggacctggccttgctgcaggttttccagcttgcagctcatctgggtgtactggggcaggcccatcatcatctacgcgctgtgtgagaacaacggtctacatgctgtctcccaatgccagcgtatgtctgtactcccccgctggccgagcagttctcccaccagtttccattctcatgacctgccgtccgttcttgccaatttctccttgccggttttcctttgtcagaattttaggaatcccctggccccccgctgtgccaggagaccccagctcatcccagatggtggtgtggaatgctgcagcgccgggcttctcatccagctgcaacacctatgtcctgcctgatggcctcacccagcgaaggaggagccccgtccgccgagaggacgacgtccccttcacatgcccgggtcggcggtcgcagcctcagcacgccccaacgccctcagctttggctccccaaccagcagcgatgacatgaccctcacccagcccccagcatggacaactccagcgcagagctacttcccagcggggactcgccactgaaccagaggatgacggagaacctgtttggcctagcctgtcggagcatgaacgcgcaaccatcctcacgcgtacccgcagcccagaaccctgaggacctccgcatgtttgcccaggctccttcactacttccgcggccgct

SEQ ID NO: 10324 - DNA, 2334 bp, Homo sapiens
  SIMILAR (1)..(585): 851254mologous to Escherichia coli xprB,accession number M54884,Smith-Waterman Score=793.
atggtggagtggttgcatcaccgcgggttgacgctggcgacggcgcaaagtgacgatttgcaggcattactggcagaacggctggagggcgggtataaagccaccagctcagcgcgtttgctgagtgcagtgcgccgattgttccagtatctttatcgcgaaaagtttcgtgaagacgatcccagtgcgcatctcgcttcaccgaaattgccccagcgtttgccaaaagatttaagcgaagcgcaggtcgaacgtttattacaggcaccattaatcgatcagccactggagctacgcgataaagccatgcttgaagtgttgtatgctaccgggctgcgtgtctctgaactggtcggactgacaatgagtgatatcagcctgcgtcagggcgtggtacgggtcattggtaaaggcaacaaagagcgtctggtgccgttaggtgaagaggcggtttactggctggaaaccatacggaaaaagggtcaagcacccacaacctggttggctgcacctcgagcagcgttgattgggtttaaccagcaggcccaccagttggcttcgattccggtgttcatgcgcatcaaacaacagctgttgtttatttcaaagatgaacgtgcagcttttagcagcctggcaagagctgtgtcaaagtgacctatccctggaccggcagcttaccggactctatgatgccttgcttggtgcttggcacacacaaatccagtgggctacacagggtttcaggcatggctgtaagcggaacaccattaaaccggacgtcgtgatcgtgttgaatacccccgaagcgggagatgttccgggcattgataccattaaatacccgctaaacttgggccaggggcggggcttgatgctgtttgacaagcgctacttccccaaccagaaattggtagcagcgttaaaaagctgtgccgcacataacgatttaccgctgcaattttccaccatgaaaaccggtgcgacggatggcgggcgctacaacgtgatgggcggcgggcgtccggttgtcgcgctgtgtctgccaactcgttatctgcacgccaacagcggtatgatttcaaaagccgattacgaagctctgctcacgctgatacggggttttctgacgaccttaactgcggagaaagtcaacgcgtttagccagttccgtcagattgtcgatctgctggagcaacagccgcgcacgcctggcgagctggcgcaacagactggcgtttcaggcaggaccatcctgcgtgatattgactatctcaacttcacccttaacggcaaagcccgcattttcgccagtggcagtgcgggctatcagctggaaatcttcgagcgccgcagcttttttcagttgctgcaaaagcacgatagggtacaccacttaaaacgatacccattgtacatgtggaaattaccccttatagaaacgcaggggaaaagcaccaatgtgttacagccgggcgcgatgtttgttctaatccggcgtatgtttgttagcggagaagacggcgattatcacaactggaccggttgcggcaacacgctcaatttgagtcatccggcggtggtggattacgccagcgcctgcctgcgttattgggtagtaacctgccacgtcgatggtttccgctttgatctggcggcagtcatgggccgtacgccagagttccgtcaggatgcgccgttgtttaccgctatccagaactgcccggtgctctcgcaggtgaagttaattgctcacccgtgggatatcgctcctggtggtaatcaggcctacaactgttgccgacccgtaggccggataaggcgctcgcgccgcatccggcagtgtttacccgcggcgactcaaaatttctttctcataagcccgcacgctctccagccattcgctacctgctggcgtatcgtgacgttggcaatacatttcccagaccgcctgccacggcaacgatttctgctcttccagcagtgccagacgcgcagtgtaatcgcccgccgcttccagcttgcgcagctcagcggtaggttccagcaacgcacgcagcagggcttttttcatattgcgtgtaccaatgacccacgcggcaatgcggttgatagaggcatcgaagaagtcaaggccgatatgcacccggtcaaacagatcgtgacgcacaatctcactggcaattgcctgggtttcatcatccagcagcactacgtgatcgctgtcccagcgaaccggacggctgacaataccttcatccccgtgaatcccggaaagataaccaaggagtatcccatgacctttgtaggcaaagaatgcactgagttaagataa

SEQ ID NO: 10325 - DNA, 826 bp, Homo sapiens
  SIMILAR (31)..(192): 981254mologous to Escherichia coli O157:H7 site-specific recombinase,accession number AE005519,Smith-Waterman Score=267.
atgacgacctccaggtcagacacaaggtcacaggacgatcccagtgcgcatctcgcttcaccgaaattgccccagcgtttgccaaaagatttaagcgaagcgcaggtcgaacgtttattacaggcaccattaatcgatcagccactggagctacgcgataaagccatgcttgaagtgttgtatgctaccggcgctgcgtgtctctgaactggtcggactgacaatgagtgatatcagcctgcgtcagggcgtggtccgggtcattggtaaaggcaacaaagagcgtttggtgccgttaggcgaagaggcaggttcactggctggaaacctatctggaacatgggcgtccgtgtctactgaatggtgtgccaattaacgtgttgtttcccagccagcgtgcgcagcagattacgcgacaggccttatggcgccgtattaaccattatgatgagctgggcgggtatagacagcgaaaagctgtcaccgcatgtggtgcgtcacgcttttgccacttattttgcggggtcgggcgggtgtattgctgatttctgcgggggctcatgcgctggctcgagtgctgctgaatcctgtctatggtttgcgggaacgggtctctacctacatcatgcttgggtcagtggcgtctggagccgagagtgctctggggcagcatggagggacagacgggatgtgggaggaggggagtgagcttccaaggaatgagggggctgaagggagagcaggaggacatgtgagtgggcagaagcttgagtctgaatctccaggaggctccacagtgtcttcgggatctgctgatcttcaataa

SEQ ID NO: 10326 - DNA, 1341 bp, Homo sapiens
  SIMILAR (808)..(1332): 981254mologous to Escherichia coli K12 regulator of melibiose operon,accession number AE000484,Smith-Waterman Score=873.
atggtaggagtgctggaggaatcaaacaaagcacctaagaaccagggacttatgtttacaatgaaacagacaagtcacacagtccctgtaggccctgtgtcctcctcagctaataaggcatctatctggggagtgtatgaagatgaaatggaatcacatatggagcgctgttggcgcatatcccaaacaagttccaagttgactattaatagtcaaggagaaggaaaggctaaacagaagctggagtgtggaactttatcaatagtcctcagatcctgtgagaaaaaccaggaaaggattaaagctgcagagaaaaggaataggagttggacaaccctctgcgggcttggcgcatggcgccccctgctgtttgaggttgaaatgttccttcttgcctatgctgtgcgccacaccatccaggtgtaccggctctccaagtacaacacggaagaattcatcacagtctaccccaccgacccacccaaggactggccagtggtaacgctcattgctgaggacgatcggcactataacatccccgtcagagagacctttgaggacgtattctctgaccgctcccttcgcaaagtgccctggtacgtgctagccggaaaccatgaccaccttggcaatgtctctgcccagattgcatactctaagatctccaagcgctggaacttccccagccctttctaccgcctgcacttcaagatcccacagaccaatgtgtctgtggccattattatgctggacacagtgacactatgtggcaactcagatgacttcctcagccagcaggctgagagggcccgagaccaacttagcccgtttgaagtgcgccgctggcagcaggaattaaacagtccgaacgagcaaattcgccagctcgccattgatgaaattggcctgatgctcaagcgatttagcctctctggctgggaaccgattctggtcaataaaacctcgcgcacacacaaaaacagcgtctcgcgccatgcgcaattttatgttagccagatgctgggctttattgccgaaaactatgatcaggcgctgaccatcaacgatgtggctgagcacgtcaaacttaacgccaactatgcaatggggatattccagcgggtcatgcaattgacgatgaaacagtacattaccgcgatgcgcatcaaccacgttcgcgcgttactgagcgataccgataaaagtattctcgatattgccctgacgggaggctttcgttcaagtagtcgtttttacagcacgttcggcaaatatgtcggcatgtcgccgcaacaataccgcaaacttagccaacagcgccgccagacgttttcccgctaa

SEQ ID NO: 10327 - DNA, 930 bp, Homo sapiens
  SIMILAR (407)..(907): 641254mologous to Homo sapiens progressive ankylosis-like protein,accession number AF274753,Smith-Waterman Score=433.
agcatggacccatgctggcattctcttaaaacacaaatacagtttcctggtgggatgtgcctcaatctcagatgtcatagctcaggttgtttttgtagccattttgcttcaccagtcacctggaatgccgggagcccctgctcatcccgatcgctctccttgtacatgggcgcacttgtgcgctgcaccaccctgtgcctgggctactacaagaacattcacgacatcatccctgacagaagtggcccggagctgtggggagatgcaacaataagaaagatgctgagcttctggtggcctttggctctaattctggccacacagagaatcagacggcctattgtcaacctctttgtttcccggcaccttggaggcagttctgcagccacagaggcagtggcgatttttgacagccacataccctgtggtccacatgccatacggctggttgacggaaatccgtgctgtgtatcctgctttcgacaagaataaccccagcaacaaactggtgagcacgagcaacacagtcacggcagcccacatcaagaagttcaccttcgtctgcatggctctgtcactcacgctctgtttcgtgatgttttgggacacccaacgtgtctgaggaaaatctttgatagacatcatcgggagtggactttggcctttgcaggaactctgtgttgtttcctttgtggatcttctccttcttcccagttccagtcacagtgagggcgcatctcaccgggtggctgatgacacttgaagaaaaccttcgtccttgcccccagctcttgtgctgcggatcatcgtcctcatcgccagcctcgtgggtcctaccctaacctgggggtgcacggtgcgaccctggggcgtgggcttcctcctgggcgggcttttgtggggagaattccaccatgggtcggccattgg

SEQ ID NO: 10328 - DNA, 1972 bp, Homo sapiens
  SIMILAR (1)..(327): 1001254mologous to Homo sapiens progressive ankylosis-like protein,accession number AF274753,Smith-Waterman Score=560.
ggagatgcaacaataagaaagatgctgagcttctggtggcctttggctctaattctggccacacagagaatcagtcggcctattgtcaacctctttgtttcccgggaccttggtggcagttctgcagccacagaggcagtggcgattttgacagccacataccctgtgggtcacatgccatacggctggttgacggaaatccgtgctgtgtatcctgctttcgacaagaataaccccagcaacaaactggtgagcacgagcaacacagtcacggcagcccacatcaagaagttcaccttcgtctgcatggctctgtcactcacgcttaaagacagtgtacagaaaccagacatcagcctgacggggcgcttagtccagacactcccgacacgcatgcgccatcaacgtggagaaagcaaagatgtggcgcctctggcctcttggctttccgagcccagcaccagctcggaggcttcccaaacaagttccaagttgactattaatagtcaaggagaaggaaaggctaaacagaagctggagtgtggaactttatcaatagtcctcagatcctgtgagaaaaaccaggaaaggattaaagctgcagagaaaaggaataggagttggacaaccctctgcgggcttggcgcatggcgccccctgctgtttgagttacctgtgattgttcaaaccccagatcagactaaccgcttccagttccgataccccgcgaagacccagtctgggctttgtagttttttccatagttttgacctcctcacattggaggcctttgtcaaagtctggtttcctggttgcctgctcattttgattgagtatgcctcatccaaaaatcgaaaatccaaaatgctccaaaatctgaaacttttgagcgctgacatgactctcaaactctgtttcgtgatgttttggacacccaacgtgtctgagaaaatcttgatagacatcatcaggagtggactttgcctttgcagaactctgtgttgttcctttgcggatcttctccttcttcccagttccagtcacagtgagggcgcatctcaccgggttgtctgatgacactgaattatatccttcgtccttgcccccagctctgtgctgcggatcatcgtccctcatcgcccagcctcgtgggtcctaccctaccctgggggtgcacggtgcgaccctgggcgtgggcttccctcctggcgggctttgtgggagaatccaccatggtcgcccatcgctacgtgctatgtctaccggaagcagaaaaagaagatggagaatgagtcggccacggagggggaaagactctgccatgacagacatgcctccgacagaggaggtgacagacatcgtgggaaatgagagaggagaatgaataaggcacgggacgccatgggcactgcagggacagtcagtcaggatgacacttcggcatcatctcttccctctcccatagtattttgttccctttttttttgttttgttttggtaatgaaagaggccttgatttaaaggtttcgtgtcaattctctaggcatactgggtatgctcacactgacgggggggacctagtgaatggtctttactgttgctatgtaaaaacaaacggaaacaactgacttcataccctcctgcctcacggaaaacccaaaaggacacagctggcctcacggtttgacgttgtgtcctcctcccctgggacaatctcctcttggaaccaaaggactgcagctgtgccatcgcgcctcggtcaccctgcacagcaggccacagactctcctgtcccccttcatcgctcttaaggaatcaacaggttaaaactcgggttcctttggatttgcttcccagtcacatggccgtacaaagagatgggagccccggtggcctcttaaatttcccttccgccacggagttcgaaaccatctactccacacatggcagggaggcgggtggcacgctgcag

SEQ ID NO: 10329 - DNA, 558 bp, Homo sapiens
  SIMILAR (335)..(553): 1001254mologous to Escherichia coli RNA polymerase alpha subunit,accession number J01685,Smith-Waterman Score=366.
atgccgttcccacaaaatgcccagaccgcaattgaagttgaagaaactattcgtaaacagggcgctgtacctgccacgatcgccattattggtacagccctgtggagcgtattgcctacaatgttgaagcagcgcgtgatagaacagcgtaccgacctggacaagctggtcatcgaaatggaaaccaacggcacaatcgatcctgaagaggcgattcgtcgtgcggcaaccattctggctgaacaactggaagctttcgttgacttacgtgatgtacgtcagcctgaagtgaaagaagagaaaccagagttcgatccgatcctgctgcgccctggtggacgatctggaattgactgtccgctctgctaactgccttaaagcagaagctatccactatatcggtgatctggtacagcgtaccgaggttgagctccttaaaacgcctaaccttggtaaaaaatctcttactgagattaaagacgtgctggcttcccgtggactgtctctgggcatgcgcctggaaaactggccaccggcaagcatcgctgacgagtaacc

SEQ ID NO: 10330 - DNA, 787 bp, Homo sapiens
  SIMILAR (547)..(2): 1001254mologous to Escherichia coli HISTIDINE-BINDING PERIPLASMIC PROTEIN PRECURSOR (HBP),accession number D90862,Smith- Waterman Score=924.
cataaacatcaaaatcgaagtactttttcgctaatttctcgtaagtaccgtcagcgcgcatttcggcaaaggctttgttcagtgcttcgcgcagttcgttatcttctttacgcaggcccatgccggtccctacgccaaacagtttttcatctttaacagacgggccaccgaatttgtaatctttaccgacaggttgtttgaggaaaccttcgctggcagcgacctcatcctggaacgcggcatcaatacgtccggcagtcaggtcagaataaatgttgtcctgcccctgatacgagacgatttcaatgccttttggtgcccaatgttcattaccgaacgtctcctgggtggtgccctgcaatacgcctacccgtttgcctttcagcgactcgactgtcggctgaatgtcagaatttttcgccaccaccaaacgagaatcggcagcgtacagtttgtcggtgaaggctatttcttgctgacgtttttccgtaatggaaagcgatgacatgatggcgtcaatcttcttcgcttttaaggacgggattaacccgattacgcggaaaatgcccatgttatgccgccggtggtgattgaagatgcttccgatatgctgctggcaatcactcaggcaggccgtatgttgatgttcccggtaagtgatctgccgcagctgtcgaagggcaaaggcaacaagattatcaacattccatcggcagaagccgcgcgtggagaagatggtctggcgcaattgtacgttctgccgccgcaaagcacgctgaccattcat

SEQ ID NO: 10331 - DNA, 1216 bp, Homo sapiens
  SIMILAR (831)..(133): 921254mologous to Escherichia coli topoisomerase IV subunit,accession number M58408,Smith-Waterman Score=1053.
tcaatgctctgcacgttttgctgatgcaggcgatcgacgtgggcgaacaaagaacaggccattgtgatgaatgttcagcgccagcccggtgctaacattatctccaccgccgacagcattcggcagattcaccgggctcgtcgtggacgtcctgtctatgcgcaacccgtctcgccgcgggtatcttacaacacaccaaatctggctggacgcgcggcgtccacgttcgccagtgactttctgtaactcttccgggcgcagtttaattttgcgtttcccaacatgaatggtcagcgtgctttgcggcggcagaacgtacaattgcgccagaccatcttctccacgcgcggcttctgccgatggaatgttgataatcttgttgcctttgcccttcgacagctgcggcagatcacttaccgggaacatcaacatacggcctgcctgagtgattgccagcagcatatcggaagcatcttcaatcaccaccggcggcataacatgggcattttccggtaaggtgatcaaagccttacctgcacggttacgcgccaccagatcgttaaaggtgcagacgaaaccgtaacccgcatcggaagccatcagcagtttctgatcgtcgctttccatcagcatatggtcaacggtcgccccaggcggcaacgttaatttgccggtgagcggctcgccctgaccacgcgccgacggcagcgtaatcgggtcaatggcatagctacgaccggtggaatcaacaaacactaccggttggttgctcttacctttcaccgccgctttgaagctatcacccgctttataattcaggcccggcgcgtccgatatcatggcctttagcgctgcgtacccagcccatctgcgacagcacaatggtgacaggttcagacggcagcatgtcgtgctcgctcatcgctttcgcttcttcgcgttccgaagcttgcgcgtctgcctgcagttctttcttcagcaggttattcattttacgctcggaagccaaaatgccctgcaactggtcgcgctctttttccagttcactctgctcaccgcgaatcttcatctcttccagtttggcaagatgacgcagtttcagttcggagatcgcatcctccaggcacctcaagctcaccccaggaatcacagcctttgcatgtgttgccttcttgtcctgggtgctgtcccctgcttcttcacatggctgggccat

SEQ ID NO: 10332 - DNA, 714 bp, Homo sapiens
  SIMILAR (139)..(186): 1001254mologous to Escherichia coli Ornithine decarboxylase (EC 4.1.1.17),accession number D90708,Smith-Waterman Score=83.
atgaatccgcaagaagccaactacgcctatttacgcggtgagtggaactggttcgtctgccggatgcagaaggccgtatcgctgccgaagtgcgcttccttatcctccgggtgtgctcgctctggaagaagggatcaactgctgccaggttttgcaccggagctgcagggtgtctatatcgaagaactgatggtcttaaccatactgacgatggtcaacatgatgggtccggtatcatcatgctgccgacaaagcttgccgaagtcgggacaatctaattatctcctggctggtgacagccgtaggctcaatggcactggcatggcattcgcaaatgcgataagcattcacatgttcaatttcgtcggcggagtaacaaactccgaaggccgctttaagtttttgcggaaaaaagtggaagatactgcaccagctggctggcctgttcgctgtcgcggcggatcaccgtttaatggtgttaagcgcattaaacaaaaaatggggattcacctgggcggaagcagtttgatctctgactggtataagttaagaaatcggtttgccggtaaatggtgtcgacaccattgccgggtccgcttcgtcattgctcagattgttacctccagcagcatggcaaagggcggtcctggaaacctgggacggattaaatttttcttggcttctttcaaacggaaacgggggaatccttcttaa

SEQ ID NO: 10333 - DNA, 811 bp, Homo sapiens
  SIMILAR (1)..(483): 1001254mologous to Escherichia coli Ornithine decarboxylase (EC 4.1.1.17),accession number D90708,Smith-Waterman Score=841.
atggccaaacttcagcaacttgttgccctgctggtacgcttcgaaaaactgcttgagtccgacgcgccattagcagaagtgctaccttccatctacaaacagcatgaagagcgctacgccggttataccctgcgtcagttgtgtcaggaaatgcatgatttgtatgcccgccacaacgtgaaacaactgcaaaaagagatgttccgtaaggagcacttcccacgcgtcagcatgaatccgcaagaagccaactacgcctatttacgcggtgaagtggaactggttcgtctgccggatgcagaaggccgtatcgctgccgaaggtgcgcttccttatcctccgggtgtgctgtgtgttgttccgggtgaaatctggggtggtgctgttctgcgttacttcagcgctctggaagaagggatcaacctgctgccaggttttgcaccggagctgcagggtgtctatatcgaagaacatgatggtcgaattaagaaaagggccagtgcccctcaatgggccattactgtcagtagtgtgtgccacaatgagagaacacaatatcgaaaaagatgcggatacacccccccacaaacacagagtgccacaaagcacacagatcgtccaacgagaataattattgcacggtgcgagtcatctagaggatcccggagaagcacatcgtatatcagtgtgacgactgcggcggcatccatccagtcatcggttcgtctgagaatgacgtgcaactgcgcacgcgacacccggagacaacggctgactaagcttactccccatccccgggcaataagggcgc

SEQ ID NO: 10334 - DNA, 682 bp, Homo sapiens
  SIMILAR (469)..(681): 981254mologous to Escherichia coli glycerol-3-phosphate dehydrogenase subunit B,accession number M20938,Smith-Waterman Score=379.
atgcagcagttgctgaaagacctgctcaccgcctacaaattcggggtcaaaacactgtattatcagaacacccgtgacggcgctgaagacgcacaagacgatctggtgccgtcaatccaggacgatggctgcgaaagcggcgcatgcctgataagacgcgccagcgtcgcatcaggctccgggtgccggatgcagcgtgaacgccttatccggcctacggctcggatttgtaggcctgataagacgcgccagcgtcgcatcaggcacaggatgcggcgtaaaatgccttatccggcattaaactcccaacaggacacactcatggcatataccaccttttcacagacgaaaaatgatcagctcaaagaaccgatgttctttggtcagccggtcaacgtggctcgctacgatcagcaaaaatatgacatcttcgaaaagctgatcgaaaagcagctctctttcttctggcaaaactggccgctgttacttgatgcgcttattcctgtcgccaatacctgcgaaatgatcctgatgcccgcctgcttcggtctggccgatgacaaactgtggcgttggttgaatgaaaaactaccttgttcactgatgcttttgccaacgctgccgccttccgtgctgggcattcgtctgcaaaaccagttacagcgccagtttgtgcgccagg

SEQ ID NO: 10335 - DNA, 588 bp, Homo sapiens
  SIMILAR (456)..(292): 831254mologous to Escherichia coli K12 nucleoprotein/polynucleotide-associated enzyme,accession number AE000142,Smith-Waterman Score=230.
ctaatgcaaggtcataggaaggctttcagcttctgcttgacttttggaacatgcattcttagagccctgagtcaccacataagaagtcagactactcacgccaataaactgaatatgcgttgataatagcacgactgccggatgcggcgtgaacgctttatccggcttacacttcgcccgtaagccgtaggcctgataagacgcgcaaagcgtcgcatcaggcatggcgcacgactgccggatgcggcgtgaacgccttatccggtctacacttcgcccataaaccgtaggccacatcaaatcatcaggcactttgaagtcggcatacgggtcgtcttcatcctgctcttcggcgctgagcgcgctgtgcaacactatactgctggcatcgcgctgagcaattttatcggcaacgctggcgggacacgctgctgaatctgatggaacgcaaagacgttcagtttggtctggcgacgatgtgtatcggtctgggtcagggtattgcgacggtgtttgagcgggtttaaccacttgccggatgcggcgtgaacgccttatccggtctaccgatccggcaccaatgtaggc

SEQ ID NO: 10336 - DNA, 1776 bp, Homo sapiens
  SIMILAR (697)..(1032): 1001254mologous to Escherichia coli K12 nucleoprotein/polynucleotide-associated enzyme,accession number AE000142,Smith-Waterman Score=562.
atgatgcaagtaatacttggagcaagtaagttggaccccaataataaccacgaggaagtactgaggcgagtatttacccgttggggtaagggaaaatgggaatatcgccccaacaccttggaggttgacaaagggggagaaggagaaaagagaaccctcggttacaagatacaccacaaccatcatgatgacgcgcacgagtcggacacgagctcacatgagaaaagaaccgctgggcagtgcgcttttgttgctacctggatggcggttcgtaatttgaacttctactacggcaaattccatgccctgaaaaacatcaacctggatatcgctaaaaaccaggtaacggcgtttatcgggccgtccggctgcggtaaatcgacgctgctgcgtaccttcaacaaaatgtttgaactgtacccggagcagcgtgcggaaggtgaaattctgcttgatggcgacaacatcctgaacaactctcaggatatcgcactgccaggcgaatatgagccaccaccgaacaggattttatcgggtagtcctggacaagttggcgatgggggaattaaagctgggttgtggatctttaaatgtgcgacagcctttaccttcgtaaaaggtaatgccccagccatctttatgtggcccggttccaccaccacgctgtacaagcccggtgaaactaaagcagatatcgaatataaagctcaggtgaagcagcttattgaaatgaaccgaatcaccattgccaatggcgatattggttttaacttcactgacggcaatctgattaagaagatttttgtcgataagctcacacaggcgcagttgattaatggtcgtctggcgattgcccgcttgttggtcgataacaatagcgaaggtgaatacgccattattcccgccagcgttgccgataaaattgctcagcgcgatgccagcagtatagtgttgcacagcgcgctcagcgccgaagagcaggatgaagacgacccgtatgccgacttcaaagtgcctgatgatttgatgtggcctacggtttatgggcgaagtgtagaccggataaggcgttcacgccgcatccggcagtcgtgcgccatgcctgatgcgacgctttgcgcgtcttatcaggcctacggcttacgggcgaagtgtaggccggataaggcgttcacgccgaatccggcagtcgtgctattatcaacgcatattcagtttattggcgtgtcccaacctccccccccgctgctcctgcaatttgcccctgcccctccgtgccctgcccggatgcttgatcgccagatgctgccacagttcgccgctggcggagatgcgtccagaacgccgtcaccactccttccggtgaatggcaaactacgcgtcgacagccagccaaccgaggaggccagttgccacaccgccacgatgcccaccggtaaaaaccagggggcaacgcgcaataaccacttcttcactggcgttgccattatttcttccttagctttgcgcgactttacgggggataaaatcattcgccaccgatatctacttgcggattcagcggctgcggatggtgaatttccgggattggctgacatccagaagcgggaacagcaactcgccaacccgatccgcttcttccagatgcggatagcccgaaagcacaaaactgtcgatgccaagcgcggcatattcgttgattcgcgcagcgaccgtaggaccatcgaccaccagcgccgtcccggcaccggcgcgcactctcgatgcttttattag

SEQ ID NO: 10337 - DNA, 1806 bp, Homo sapiens
  SIMILAR (1360)..(1803): 981254mologous to Escherichia coli ribonucleoside diphosphate reductase B2 subunit precursor,accession number K02672,Smith- Waterman Score=757.
gtacttctcacctgcagctatgaaagccctggatttactcattaaatggacccgaagcgaccaaaatttagggggatgcaatacgggtttaatccggcccatttctccaattgttttaatctacaaactagtcattggagaacagatgattgatgtcttagggccggagaaacgcagacggcgtaccacacaggaaaagatcgcaattgttcagcagagctttgaaccggggatgacggtctccctcgttgcccggcaacatggtgtagcagccagccagttatttctctggcgtaagcaataccaggaaggaagtcttactgctgtcgccgccggagaacaggttgttcctgcctctgaacttgctgccgccatgaagcagattaaagaactccagcgcctgctcggcaagaaaacgatggaaaatgaactcctcaaagaagccgttgaatatggacgggcaaaaaagtggatagcgcacgcgcccttattgcccggggatggggattgcacgtcattctcagacgaaccgatgactggatggatggccgccgcagtcgtcacactgatgatacggatgtgcttctccgtatacaccatgttatcggagagctgccaacgtatggttatcgtcgggtatgggcgtcgtcgcagacaggcagaacttgatgattcaaggttcaaaaccgttattttccgccagttttgtcagatttcgagcacttgcaagaaccttatgagtactttgggaaattacggtaaccgtggttacctgcaactggtgagtttcatgcagaaatttatcgatcagtcgatttttgcaaacacccagtatgatccgtcacgcttcccgtcaggaaaagtgccgattcagcagttgctgaaagacctgctcaccgcttacaaattcggggtcaaaacactgtattatcagaacacccgtgacggcgctgaagacgcacaagacgatctggtgccgtcaatccaggacgatggctgcgaaagcggcgcatgcctgataagacgcgccagcgtcgcatcaggctccgggtgccggatgcagcgtgaacgccttatcctggctacggctcggatttgtaggcctgataagacgcgccagcgtcgcatcaggcacaggatgcggcgtaaaatgccttatccggcattaaactcccaacaggacacactcatggcatataccaccttttcacagacgaaaaatgatcagctcaaagaaccgatgttctttggtcagccggtcaacgtggctcgctacgatcagcaaaaatatgacatcttcgaaaagctgatcgaaaagcagctcttctttcttctggcgtccggaagaagttgacgtcttcccgcgaccgtatagattaccaggcgctgccggagcacgaaaaacacatctttatcagcaacctgaaatatcagacgctgctggattccattcagggtcgtagcccgaacgtggcgctattgccgcttatttctattccggaactggaaacctgggtcgaaacctgggcgttctcagaaacgattcattcccgttcctatactcatatcattcgtaatatcgttaacgatccgtctgttgtgtttgacgatatcgtcaccaacgagcagatccagaaacgtgcggaagggatctccagctattacgatgagctgatcgaaatgaccagctactggcatctgctgggcgaaggtacccacaccgttaacggtaaaactgtgaccgttagcctgcgcgagctgaatgaaaaactgtatctctgcctgatgagcgttaacgcgctgtga

SEQ ID NO: 10338 - DNA, 1269 bp, Homo sapiens
  SIMILAR (694)..(1242): 1001254mologous to Escherichia coli phnI protein,accession number J05260,Smith-Waterman Score=933.
atgactttgtcatgctgctccaccgattttgagaacgacagcgacttccgtcccagccgtgccagtgcgttcaccgaatacgtgcgcaacaaccgtcttccggagcctgtcatacgcgtaaaacagccagcgctggcgcgatttagccccgacgtatccccactgttcgtccatttccgcgcagacgatgacgtcactgcccggctgtatgcgcgaggttaccgactgcggcctgagttttttaaatggcggaaaatcgtgttgaggccaacgcccataatgcgggcggttgcccggcatccaacgccattcatggccatatcaatgattttctgcgaaggtgaatacgccattattcccgccagcgttgccgataaaattgctcagcgcgatgccagcagtatagtgttgcacagcgcgctcagcgccgaagagcaggatgaagacgacccgtatgccgacttcaaagtgcctgatgatttgatgtggcctacggtttatgggcgaagtgtagaccggataaggcgttcacgccgcatccggcagtcgtgcgccatgcctgatgcgacgctttgcgcgtcttatcaggcctacggcttacgggcgaagtgtaggccggataaggcgttcacgccgcatccggcagtcgtgctattatcaacgcatattcagtttattggcgtgaggatccccattgccgaccgcgaactggcggcgctggcgctgaaacaggccagcggcgataacgttgaagcgattttcctgctgcgcgcctaccgcaccacgttggcgaagctggcggtaagcgagccgctcgacaccaccgggatgcgtctcgaacgccgtatctccgccgtttataaagacattcccggcggccagctgcttggcccaacctacgactacacccatcgcctgctcgattttaccctgctggcaaacggcgaagcgccgacgctgaccaccgccgacagcgaacagcagccgtcgccgcacgttttcagcctgctggcgcgtcaggggctggcgaagtttgaagaggatagcggcgcacagccggatgacatcacccgcacgccgccggtttacccctgctcacgctcctcccgtttgcagcagttgatgcgcggcgacgaaggctatttgctggcgctggcctactccacccaacgcggttacgggcgcaatcacccgttcgcaggcgagatccgcagcggctatatcgacgtgtcgattgtgccggcttgctgctttcagaatgatgaatga

SEQ ID NO: 10339 - DNA, 1910 bp, Homo sapiens
  SIMILAR (799)..(1293): 991254mologous to Escherichia coli ribonucleotide reductase,accession number X06999,Smith-Waterman Score=858.
atggggtttcaccatgttgcccaggctggttttgaactcctgatctcaagtgatctgcccgccttggcctcccaaactgctaggattacagcgcgtgaagctcgggcgccggtagaagaaaataaaaaggcacagcttgagcgtgataaacagcttagcgaacagcaaaaacaagcggcgttggcgaaagaatataaagctcaggtgaagcagcttattgaaatgaaccgaatcaccattgccaatggcgatattggttttaacttcactgacggcaatctgattaagaagatttttgtcgataagctcacacaggcgcagttgattaatggtcgtctggcgattgcccgcttgttggtcgataacaatagcgaaggtgaatacgccattattcccgccagcgttgccgataaaattgctcagcgcgatgccagcagtatagtgttgcacagcgcgctcagcgccgaagagcaggatgaagacgacccgtatgccgacttcaaagtgcctgatgatttgatgtggcctacggtttatgggcgaagtgtagaccggataaggcgttcacgccgcatccggcagtcgtgcgccatgcctgatgcgacgctttgcgcgtcttatcaggcctacggcttacgggcgaaacacccctcgttcagcagccagggggttcctcactgtgtcccagatgtcactctaaagattgcttcagaggctccctccccaatcgttggagggactctgccagttccaatgaccagccagctgccttcagtcacaagcatgcagctgctgctagatctggataccatccctaatgagcccctccattacgactgggaagctctgcgtgagtcaatcaaaacgcacggtctgcgtaactccacgctttctgctctgatgccgtccgagacttcttcccagatctctaacgccactaacggtattgaacccccgcgcggttacgtcagcatcaaagcgtcgaaagacggtattttgcgccaggtggtgccggactacgagcacctgcacgacgcctatgagctgctgtgggaaatgccgggtaacgatggttatctgcaactggtgggtatcatgcagaaatttatcgatcagtcgatctctgccaacaccaactacgatccgtcacgcttcccgtcaggaaaagtgccgatgcagcagttgctgaaagacctgctcaccgcctacaaattcggggtcaaaacactgtattatcagaacacccgtgacggcgctgaagacgcacaagacgatctggtgccgtcaatccagggacgatgggctgcgaaagcggcgcatgcctgataagacgcgccagcgtcgcatcaggctccgggtgccggatgcagcgtgaacgccttatccggcctacggctcggatttgtaggcctgataagacgcgccagcgtcgcatcaggcacaggatgcggcgcgttctgcctggtcgtgccactcgtcgggattttccctctctggaggctgggtatcagtggttaccggggcgtggtctggtgattgaaccgcaggcgcaggtgatgtatcagggcgtgcagcaggatgattgtaccgccgctagccgtgcgcgcgtgtcacaatcgcagggtgatgatattcagacgcggctgggtttacacagcgaatggcgtaccgctgttcatgtcataccaacattagatctgaatgattatcacgatccccattcgacggaaattgaagaggatggcagcactatcagtgacgatgcggtgaagcaacggggtgaaataaaagtgggagtcacgggcaatatcagtcagcgagtgtccctgcgcggcagcgtggcgtggcagaaagggagtgatgattttgcccagacggcagggtttttgtcgatgacggtgaaatggtaa

SEQ ID NO: 10340 - DNA, 1329 bp, Homo sapiens
  SIMILAR (810)..(544): 561254mologous to Escherichia coli K12 putative oxidoreductase, Fe-S subunit,accession number AE000372,Smith- Waterman Score=188.
atgcgtcatgtcaaaccgcacggcatgttgtacaaccaggcggcgaagaagcacaactggcagacgccatcgccagagcggtatacgcttgcgatcagcattgattctcgtcgggctggcgggaagcgagctgattcgtgcaggaagcaatatggtctgacaacgcgcgaggaagtgtttgccgatcgcggtttcaggctgacggctcgctggtgccgcgaagccaattttccgctgccaaacgcgccgcgttacccgagaacaagtaccggacgaggcatatgcgcctttatcaaacaacgcatgatcggatcaccggagataacatgcacgtcctgcggatctcttccagtgcacagctggcggggaagtaacggaggtcggcgctttaccttcaccgattgcatttcacaattgttgtcgggtatcccccggcaacgactgaatgcgcccccacggggcaagcgccaaccaaggggcgttttcacactgatggcacatcaccggcgcactgatgctgtcagtcgctgtaccttcaaccggggtgacaaccagatccgcgccatgaactgcatcaccaccagcaaaacttttttcagatgcgtctgggtaaatacccgacgtcaccggtttaatcaggccccatttatcgagtttaattccgctgccctgcaaccacggctggcatgcgcctggaaaccaaaggccataatcagaacatcggcgggcaatcaaactctgaacccgctaccggacgaggacgacggcgaccatccggcccggctcacccatggcggtacgaatcaggcccctcgacacctttcaaaacataatcccggtgcggcgtgtaaggtgtgggaacgtttagtcacagacaccgtcccgtctacctcccccgagtccagccttggtgggtgctgcacagcgacttgcggccttaggtcttctcgctgtgccttctttcctcctgagagatgctctccgcctaagaccgctaacagctcaattggtctcattgatcccactcaccatctagagccctgttgcctcattaatcgttgtgccaccagctcacgggctgcaactgggaagagacgagacctgttatccatcgccgacactgggatacgcagcaatctgcaaaatggggtagaaccacaggaagaaagtggtaggcgacggcgcaggcacggtagaaaggcgaggccggccccaagctgggggagtattctagactgcaacaccgttcacacgctactagcaacagacgggtgtcatccggaccatgaggttcgctgtgtacgactccggaagttccggcgacaatag

SEQ ID NO: 10341 - DNA, 3732 bp, Homo sapiens
  SIMILAR (1392)..(523): 781254mologous to Escherichia coli Biotin sulfoxide reductase 2 (EC 1.-.-.-) (BDS reductase 2) (BSO reductase 2),accession number D90829,Smith-Waterman Score=1167.
ttaaaggcgatcagtaccagagtgaacatctgaaagccaaatccccgattggcctccgccgacataattgacaaatggtagcgtcacacctgccgtaacaaagcctgccagactggcaagaggacgcggataaggaaccagttgttcgcgctcacgtttatcgagcgtgatggttggaaccagcgaccagaagggaatatccataatggtgtaagtcatgccccagaggatgtaggtcacgcaaacaaagacaatctgagtagtaccttcaaacagatgcgcaccccatcgcgatcgcgtagcatttacaatccatcccataatcggatcgttaatagcatcccagatcctcgccaccagaaacaaagtaccgaccaaacccacagacagcccgacgacatcggtgtagtaatacatgaggtacatatacacaatgccgatcgcaaaatccttcccgaacgctccaaatccataactgagttttgtagtcattgaaatgctcatagggtatcgggtcgttgggcttgccgtatatttcgataaccgcacgtgagtaccgcacagcatttccactgcgatttgggatatccgccgtgacacgttcgctttgccgtttttacacaagccattttccagatctggccatgcaccgtcatgcacgcataccacgccttgttggatcccgtcagtcaccaccgcgcctgtcaaaatctgaccacgtttgttccagacacgcaccagatcgccattcgcaataccaaagcgtgcagcatcttcggtgtgaatagtgattggttcacgatcggcgatcgcatattttttacgcagttccgcatagttaagctgactgtgtaaacggtgtgccggatgtgcggtcagaagctgtaactgcttctcgtcggcggtacctttccattcatcaggagccagccaggttgggtgtgccgggcaatccttatagccaaatttttccaacgtttttgaatagatttcaattttgccgcttggcgtacccagcgcatttttcaccggatcggcgcggaaatcaccataacgaacgtactgttcgttcttgtcgctgtggcgcatttcgatcagtgtattttgctgccagaaggcattaaacattggcatagtgacgcgttgcgcacgggcacctttctgagcggcatcatagaaaaatttcagccacgccatttcatctttaccttcggtatagatctcttttccgccaggtttgagtaattcgcgcaagatcggcaaacacgtcaaaatcgttacgcgcactgccaagggcatcggatgcatcgaagaattgtatccctgcatatgatcgttgacgtaccgatgacttgtggatatgggacgtaccggtacacgaaggtcagagtgatagtttcggtcaatcgtgaaggtaagctctgacttccgtccttccgcggccatctgtgcactggtagagatccgaaaccgcgaaatgttgactggcacatcggtcgcggcgtcgccattatcatgcagaaatcgggtatcccggatatcgatcaggctaactgcatgatcaaactggaatcggacggcacctttatcgttcattctggcggtgcggatattggtactggtctggatactgtagtgacgaaactggcagcagaagtgctgcactgcccaccgcaggacgtgcatgttatctccggtgataccgatcatgcgttgtttgataaaggcgcatatgcctcgtccggtacttgcttctcgggtaacgcggcgcgtttggcagcggaaaattagtcgcatgcgtgctcgtcgcctcttgttgatccccctgggtggtttccccggtgttcctgttcccgtgtactcgcccttggcttgtgtgtccccccccttggtcgtggcgggcgcgctcagtgctttttgcacggccgcgatttcgctcggtccgctcaggtcgggtatctgccggaacccggggccctggacaccaggacgcactttctgcagcccacttattactacgcgatcgcctgctttcagaccttctgtcaccagccacttatcgccaatagcctggcttgcaacgatcggacgggtttccactttgtcatccgcgccaactaccagtacggtggcatcgccacgcggcgtacgggttacgccctgttgcgggactaaaatagcgtttggattaagcccttcttccagacgtgcgcgcacgaacatacccggcagcagagtgtgatccgggttcgggaagatagcgcgtagggtgatagacccagtggtctgatcaacggtaacgtcagagaattccagcgtaccgtcctgcgggaacttaatgccgtcactggtgatcagtgacactttggctttgccgttctcttgtttcagcgtgccattcgccagttcctgtttcaggcgcaggaagtcgttggagatcctgtagagtgaccaggaattccatatggatttccggacatataggccaggttgtttcgaaaggtccagcacatttgaagatttcacattgggctgggtgaattcgccgttgaccgggaaggtgcgggtaatatcgccagcgtaaccttggtattcacaacccgcgtcaatcaacaccaggtcgccgtcgcgcatttcacactcgtgttcggtgtagtgcagaatgcagccgttttcaccgctgccgacaatggtgtaataggacggatagcgcgcaccgtggcggttaaattcgtggtgaatttcgccttccagatggtactcgaacattcccggacggcatttttccatcgcccgtgtatgtgccatggcggtgatttctcccgcgcggcggagtacggcaatctcttctggcgatttgaacaggcgcatttcatgaacaacaggacgccagtcgatcatcgttgccggtgcggtgagattttgccgcgaacctttacgcagtttttccagcgcactgttcacgattacatcagcatatgcatattcgccctgggcatggtaaaccacatccaggccgttaagtagttgataaagttgctgattgatttcgctgaatgccagtgcgcggtcaacgcccagtttctctggcgcggcatcctggcacgcggtccgataagaaaggtcacttcgttgtagcccatcccgcgtttctgccagtttctccatgccgcgatggacataaaacagccggtaatcagcatcgacaatttgctcgccatccacaaacaagcggaagtgacccggttcatcggaggtgatatgcagcgggccgacagggatcacccgcgcatcgctgttgccctcattgataaacggatacgtttcggaatcagtcgtcggttcagggcgcagtcgataatccatcgcatctttgcgcagcggatgcatatcttccggccagtcatcgggcaacaccaggcgacgggaaactcccgactgtcggcatcgacccagcgccttcaccacaatccagcatttttcggccccttccattgaaagggcataataaaccgcgtaatgaccgttaagtgtccgctcgtcgttgccaaacaggaccggaagccagccatcatgttgataataaagatactgtacaacgtcaggcagcagattgattttcaccgtaatggtgacctgttcaggcgtttgtcgctcttcatccagcaccgcgccggggaactgcgttttcagggcggcgagattgtactctgttgtggtgttggttctcat

SEQ ID NO: 10342 - DNA, 1124 bp, Homo sapiens
  SIMILAR (130)..(339): 541254mologous to Escherichia coli K12 putative dehydrogenase,accession number AE000371,Smith-Waterman Score=179.
ctaatttgccatcggaattaagtcgccgcttctcctcgcagtgtcatgaagatccgcttcaggttcgaatgatccatgtttccccgtatcccctttgggtactgcacatcgatctcgcgtcgccattatatgccagaaatcggtatcccggatatcgatcagtctaatctgcatgatcaactggaatcgcacggcacctttatcgttcattctggcgtttcgattatggtactggtctggatactgtatgttgacgaaactggcagcagaagtgctcactgcccaccgcaggacgtgcatgttatctccggtgataccgatcatggttgtttgataaaggcgcatatgcctcgtccggtacttgcttctcgggtacgcggcgcgtttggcagcggtaaatccacgtgcgctggcgtattcatatggggggggggggggcgcgcgcgtatgcatatggggggggtgggggcggcggtaatgaaaaatgaagaatagctgccgggtgacccgaataccaaaacgatgaaagcgcaataggagacgatggcgactcgggcatcggatgcgagctctgcatggtttttgacttggtcgcgatgcagttgggacgggatgaaccagtcgtgagtttgggatggcgcggtcattggcgaagagagcattgttgccagccatgagctttgtcaaagcgggctttcgcggcgagaaacgccagttgttgatgggtacgccagcccgcgcgcgggacgagcatagtatggttggacgagttgcggtggtcgcagatgcagcgggggtggcggtaaacgattgagtaaagagttgtacacagccttgaataactgaaccgctcgtgctttcggcgtcgtgcttgtgttgagtctcttcaacttttcttgcttacgtgtcttcgttcgtgctttcttcgctctgtttctcgtgtttcttttgtcttgtggctgtttttcgcgtctttctcttttgtctggctgtggttttctgtgcctgcgagtcttcttttcctgctccctgcagtataccgtggggatcttgggggtcccacgaacatcatccatgttcacggataatgcacttaaatataagaagtcccgattatagcgcat

SEQ ID NO: 10343 - DNA, 901 bp, Homo sapiens
  SIMILAR (178)..(636): 481254mologous to Escherichia coli EntA protein,accession number D90813,Smith-Waterman Score=267.
atgtctatcgcatatcaagagattccacagaatgagcgcttaagactgagtgattcttcgattactagtgtcgttgagtatctcctcgctgtagtcgcacggtcggtgtacacatctccagatatggcaatattcagagaacaccacagttatatgtctctttctatggctgcgtgtagaaagataagaccgtgtccccaggagcttccccggagcattccccacatgatctcagccatgtggagtcagagtgccccagatcatgtcgttcaacatgaacgtgagcagcagagtggctttggggatggcacagaatctcacagtacttcagattcaaatacggaagtgcgtcaaaactgtagtcccccaataggaggtgtgcggaaccatcgggctctccgaggtcaccagcccgcagagctcgaacccgagaatatactaaagcttctgcttatggtcgccgaaaggaaggcacataaaggctggtattacagcggcgatctctgccgtatggatgaggctggctatataaaaattaccggacgcaaaaaagatattattgtccgcggcggcgaaaatattagcagccgtgaagtggaagatattttattgcagcatcctaaaattcccaatgcctgatatgggggcaatgtccgatgatcgcctaggtgaacgatcatgcgcttatgtccgtgctgaaagcgccgcatcattcattatcgctggaagaggtcctttgctggaggggatgctaagatgtaaactgactgctgaagattttgctatactggtacagtcaagatgcgatgtaggtgattgccccaatggctatggggtttacttagcccctgaagggctgcagtactttccgtaccactattaccacaagacttacgtttga

SEQ ID NO: 10344 - DNA, 1248 bp, Homo sapiens
  SIMILAR (289)..(468): 781254mologous to Cloning vector pCMVLacI lac repressor,accession number U64448,Smith-Waterman Score=215.
atgcgttatgacgaatcctgtgtccagtatcgtgagccggatggctcagacatcgtctctctgaagatcgactgcatcatagagcgttcccagctgcctcaaagttaccagcgtatgcctgacttccgccgccgcttcctgcaggcgcggagtcgcggccgctccacagctgagtccgtgctctcagatccaacatcctcctcctctccctgctggcccgtgggtcggattccagcatgttttgtgtctgaggctcccggattctaccaggtgcctccatcacgaggtctttcagagttcatcgcaggccaggcggtgaagttcaatccgctgttgcccgtctcactggtgaaaagaaataccaccctggcgcccactacgcataccgcctctccccgcgcgttggccgattcattaatgcagctggcacgacaggtttcccgactggatagcgggcaacgctcagtcgtctttgtacgttggagtcgccgatctataatagtggactctcatgctggactgatcaccactcaacgcgctctcggacagtctgatatgtatagaggatctctgcctatttccgagcttcgcatcatagggcccagacatctcaggggtgttctgcgcgtggtccgcttgtgtccattcagtgagccgatgctggtggagtgtaatccgttgttgccatcctcactcataataagagaaccctcgctggagcccaccttgcgattcgcctcccgcatcgctctgcctgactctacggttttgcagatattttccggagtacttcccctatctagcgggcaggcctacattcagttcacgtactctgagacgccacgtagcactcctcgagaagccaactccgcgcacatattgtcagttcaccagtggaagtgtggtcatattgttatggcagccagagtaaaggtcggttacccacaatggacgcccatcagtctatctgcgggtctctcggccgtgctctacaagccagtagagcgtgggggccgatgttcacattcttgcagcacagcgttgtcacctcagggtttcttatccagccttctacgcttcataagtgaaggcgtttttaagtcctttacagacaagcaaatgctgagagattttgtcaccaccaggcctgccctaatagtgctcctgtggcagccgctcaatgtggaaggaacatccagtaccagccactgcataatcatgccaacctgtaatgaccatcgagactag

SEQ ID NO: 10345 - DNA, 710 bp, Homo sapiens
  SIMILAR (546)..(283): 591254mologous to Myxococcus xanthus SocE,accession number AF263243,Smith-Waterman Score=233.
taaggcggcagggttcgggaacaggagagcgcacgagggagcttccagggggaaacgcctggtatctttatagtcctgtcgggtttcgccacctcttgacttgagcgtcgatttttgtgatgctcgtcaggggggcggagcctatggaaaaacgccagcaacgcggcctttttacggttcctggccttttgctggccttttgcttcacatgtcctttcctgcgttaatcccctgattcctgtggataacccgtattacccgcctttgagtgaagctgatacccgctccgccgcagccgaacgaccgagcgcagcgagtcagtgagcgaggaagcggaagagcgcccaatacgcaaaccgcctctccccgcgcgttggccgattcattaatgcagctggcacgacaggtttcccgactggaaagcgggcagtgagcccaacccaattaatgtgagttagctcactcattaggcaccccaggctttacactttatgcttccggctcgtatgttgtgtggaattgtgagcggataacaatttcacacaggaaacagctatgaccatgattaccccaagctatttaggtgacactatagaatactcaagctattcatccaacgcgttgggagctctccggatccggttgcagtgagccgagattgttccactgtactccagcctgggtgacagagcaagcctctgtctttaaaa

SEQ ID NO: 10346 - DNA, 1123 bp, Homo sapiens
  SIMILAR (113)..(775): 801254mologous to unidentified cloning vector 29kD protein essential for the replication of mini F plasmid,accession number AB015619,Smith-Waterman Score=888.
  misc_feature (1)...(1123): n = a,t,c or g
gcggtatgccgccggacgcctctgtctctctatgtgccgataaaaacgagcccgacttcacatgatctgcacggcccgacagcgggtctccatcccaaaaaacctaaacataacccccggaatcgtccagtcaaacgacctccgtgaggcggcatatagtctcttccgggatcaaaaacgtatgctgtatctgttcgttgcccagatcagaaaatctgatggcaccctacaggaacatgacggtatctgcgagatccatgttgctaaatatgctgaaatattcggattggccctctgcggaagccagtaaggatatacggccaggcattgaagagtttcgcggggaaggaaagtggttttttatcgccctgaagaggatgccggcgatgaaaaaggctatgaatcttttccttggtttatcaaacgtgcgcacagtccatccagagggctttacagtgtacatatcaacccatatctcattcccttctttatcgggttacagaaccggtttacgcagtttcggcttagtgaaacaaaagaaatcaccaatccgtatgccatgcgtttatacgaatccctgtgtcagtatcgtaagccggatggctcaggcatcgtctctctgaaaatcgactggatcatagagcgttaccagctgcctcaaagttaccagcgtatgcctgacttccgccgccgcttcctgcaggattttcgcctgctggggcaaaaccagcgtggaccgcttgcttgcaactctctcagggccaggcggtgaagggcaatcagctgttgcccgtctcactggtgaaaagaaaaaccacccttggcgcccaatacgcaaaccgccctctccccgcgcgttggccgattcattaatgcagctggcacgacaggtttcccgactggaaagcgggcagtgagcgcaacgcaattaatgtgagttagctcactcattaggcaccccaggctttacactttatgcttccggctcagtatgttgtgtggaattgtgagcggataacaatttcacacaggaaacagctatgaccatgattacgccaagctntaatacgactcactatagggaaagctggtacgcctgcaggtaccggtccggattcccggc

SEQ ID NO: 10347 - DNA, 626 bp, Homo sapiens
  SIMILAR (227)..(529): 951254mologous to Escherichia coli ebgR product, repressor (AA 1-126),accession number X52031,Smith-Waterman Score=479.
atgcggtggaaaatcgatctggcacgcatcagtaaagaaatcatcgacttttatatcacccagggcgttaatcgtattggttttattgccggtgaagatgagcctggcaaggcggatattcgtgaggtcgcctttgcggaatatggccgactgaaacaagtggtacgcgaagaggatatctggcgcggcggtttttccagttcgtcgggttatgaactggcaaaaccaaatcctggcgcggaaagactatccgaagccactgtttgttgcttccgattccattgcaatcggcgtactgcgggcaattcatgaacgaggcctgaacatcccacaggatatttcgcttatcagcgttaacgatatccccaccgcgcgattttcctttccgccgctctccaccgtgcgcatccattccgagatgatgggaagtcagggcgttaacctggtgtatgaaaaagcccccgatggtcgcgcgctcccgctgttagttttcgttcccagcaaattaaaactgcgcggcacgacccgttaaatccccttactcattgtacggcattcgtttgggccggacagtgctgccgccagtcttcgtgatccccgggtcggacgcttgaattcgtgatcgt

SEQ ID NO: 10348 - DNA, 1059 bp, Homo sapiens
  SIMILAR (1)..(615): 1001254mologous to Escherichia coli ebgR product, repressor (AA 1-126),accession number X52031,Smith-Waterman Score=1049.
atggcaacactaaaagacatcgcaatcgaagctggcgtatccctggcgacagtatccagggtcttaaatgacgatccgacattgaatgtgaaagaagagacgaaacatcgcattctcgagatcgccgaaaagctggagtacaagaccagtagtgcccgtaaactccagacaggtgcagtcaaccaacaccatattctggctatctacagctaccagcaggagctggagatcaacgatccttactatctggcgatccgccacggcattgaaacccagtgcgaaaagctgggcatcgagctcaccaactgttatgaacacagcggcttaccagacattaaaaacgtcaccggtattttaattgtcggcaaacccacgcccgccctgcgcgccgctgccagcgcgttgaccgacaatatctgttttatcgactttcacgaacccggcagcggttacgatgcggtggatatcgatctggcacgcatcagtaaagaaatcatcgacttctatatcaaccagggcgttaatcgtattggttttattggcggtgaagatgagcctggcaaggcggatattcgtgaggtcgcctttgcggaatatggccgactgaaacaagtgggattacgcgtgctgattaaagacgaccagaaccgcaatatgtttgaacgcggcagcgcgaagattatgccgttctttaaaacgctgctggtggagctcgcgccagtgttcgactcgctcgataataaaattattattaccgggcataccgatgcgatggcctacaaaaacaatatctacaacaactggaacctttcgggtgaccgcgcgctttcggctcgtcgggtgctggaagaggccggaatgccggaagataaagtgatgcaggtaagcgcaatggcggaccagatgctgctggattccaaaaatccgcaaagcgcgggcaaccggcgcattgagattatggtgctgaccaaaagtgcgtccgatacgctgtatcaatactttggtcagcatggggataaagtggtgcagccgctggtgcaaaagctggataagcagcag

SEQ ID NO: 10349 - DNA, 2853 bp, Homo sapiens
ctaactggtgtgagatggtatctctttgtatctctttgtgcttttgctttgcatttctctgatggccagtgatgatgagcatttcttcatgtgtctgttggctgcataaatgtcttcttttgagaagtgtctgttcatatccttagcccacttgtttatggggttgtttgattttttcttgtaaatttgtttgagttctttgtagattctggatattagccctttgtcagatgagtagattgcaaaaattttctcccattctgtaggttgcctgttcactctgatggtagtttcttttgctgtgcagaagctctttagtttaattacatcccatttgtcaattttggcttttgttgccattgcttttggtgttttagacatgaagtccttgcccgtgcctatgtcctgaatggtaatgcctaggttttcttttagggtttttatggttttaggtctaacatttaagtctttaatccatcttgaattaatttttgtataaggtgtaaggaagggatccagtttcagctttctacatatggctagccagttttcccagcaccatttgttaaatagggaatcctttccccatttcttgtttttgtcaggtttgtcaaagatcagatagttgtagaagtgtggtattatttctgagggctctgttctgttccattgatctatatctctgttttggtaccagtaccatgctgttttggttactgtagccttatagtatagtttgaagtcaggtagtgtgatgcctccagctttgttcttttggctcaggattgacttggcaatgtgggctcttttttggttccatatgaactttaaagtagttttttcctaaaaacccctttctactctcagagaaatgcccctgatttctggatccaaaaatgtcaacactgagttgcttttcatgctggatgtaagaaccagcagagcatggaaacgtctaccctctgactccctagagcccccccagttcattgataccttatctgtcatgaaaaggaccatctgccactggcaccaatacaggacatttgtgcttggcccaaagagctgcccatcaaattgagtattaaatccaggaccatctagctggaatacttcatcttcttccagttctctttgcctgttgtccccactatccactctaatcattggtcctttgtactggtttcctgacaaatgttgcctaattccaggacacgaacctgcagcatctccaagtttcctccacacaacattgcacatttctctgactatagctttttctgtctcactaaggtcatgttcatactctttaccctgttgacgatctatagtttcctgaacatccaagaccagattaacatcagctctgtgctcatttgaccttctccactccaggcacataactgtggctgcaaccattacataaaatgtgtatctatcctggggcagcatgcgattttcttcctccagctgtcttactcttgcctccagctgcctaacataggacaaggttgattctttataaaagagtcttgaaagatccctttccccttcatggcaggcactgcctatgggcttccaccagacaccaaatctatgggtgcctgcgtcttggactttccaaccttcaaaactgtgagcaataaatttctgttgtttataaattacccaacctaaggtattctgttgtatcagcccaaaaggactcccatcccaccccagtggaggggtactgacggagcaggagcaggcacagctgtgtgcaatgcacggcggggcaggtgtccgacactgaatgagaggctctgcaccgccagagagcagcctgttgtctcctgactttttaatgatcgccattctaactggtgtgagatggtatctcattgtggttttggtttgcatttctctgatggcccgtgatgatgagcattttttcatgtgtctgttggctgcataaacatcttcttttgagaattgtctgttcatatccatcacccactttttaatggggttgtttgattttttcttgtaaatctgtttgagttttttgtagattctggatactagccctttgtcagatgagtagatttatcggtaccagtgggccgccgcaccgttaacagaaataattctcgaaccgcgttctgccgcgatggcataagtggagaaacgcttgccgttggtgacattccagatatcaatggcttcgttttcgagaataccggctgcgtcaagaaaatcctggtcaatggcgcaagaaccttcatagtgcaggtccgcatgagtcactttcaattggcgacgacgtgtatgccaatggtgagaagatcgattccccgcaccgtccggcactggatgcactcgccagcaacattgcgctgactgcggagaattttggcgatgcgcatgatagttgtaaccgccagtgaacaggttcgggcacggtaatcccataaacgacaactgcgcgccgtcggtaccaccgcggatcggtttcagttccggttcaatatcgcaatcgcgcatcgcctgctgggcgatatcgagaatatgcggatgctcaaccactttctcgcgcatattgtagtaactgtcttcaatcaccagttcaatgtagcaatcaggatgtaaccctttgcccacttttttggcgatctccatcattttacgtttacgcgcttcaaactgtttacggtcgaaatcacggatgatgtagtgcatatcggcccgttcaacggtgcctttcatgctcgccagatgatagaaaccttcatagccttctgtcatttccgggctttcatccgccggaacttccgcatgaatacgtgccgccagcgacagcgcatttaccat

SEQ ID NO: 10350 - DNA, 1259 bp, Homo sapiens
  SIMILAR (1)..(345): 911254mologous to Escherichia coli Orf 2 downstream of phoQ,accession number D90748,Smith-Waterman Score=567.
atgcgcccgttcggtgactacccggacgggggtattgatgatctgaagatttctttttctgtacccgccgccggcgtcggcccgcatttcgatcagtacgacgtgtttatcattcagggtaccgaacgtcgtcgctggcgagtgggcgaaaagctgcaaatgaaacagcactgcccacatccggatctgttacaggtcgatccgttcgaagccatcatcgatgaagagctggagcctggtgatattctttatattccgccaggattcccgcatgaaggctacgcgctggaaaatgcgatgaactattccgtgggctttcgcgcgccaaatacgcgggaactgatttagtggattgcccgattatgtgctgcaacgtgaactgggcggcaactactacagcgatccggatgttccacctcgcgctcatcctgcggatgttctgccgcaagagatggataaactgcgtgagatgatgctcggaattgtccacccacccggacccctttaagcaatggttgggggagtttatatcccagtcacgtcatgacctggatatcgcgccgccagacccgccttatcagccggatgaattctccgatgcgctgaaccaaggtaaagtcttgggcgccttgggtggtctgcgcgtattgcgcatgggcgacgccgtgtatcccaatggtgagaagatggattccccgccccgtccggcactggatgccctcgccagcaccattgcgctgactgcgaagaattttggcgatgcgctggaagatccgtcattcctcgcgatgctcgcggcgctggtcaatagcgggtattggttcttcgaagggtaagtttggatttaagccggatgcggcatcacatgccgcatcccttttcgcttacttccgttgcgccgttaactcggcaatacggacgatcacctgccccgctttttccataccttccagagtcacaaactcatgcttaccatgatagttgtaaccgccagtgaacaggttcgggcacggtaatcccataaacgacaactgcgcgccgtcggtaccaccgcggatcggtttcagttccggttcaatatcgcaatcgcgcatcgcctgctgggcgatatcgagaatatgcggatgctcaaccactttctcgcgcatattgtagtaactgtcttcaatcacccaggtcatggggaccaatcagggatggaaccctttgcccccctttttggcgatcccgggtccgagctgaattcgaatgaggtcgag

SEQ ID NO: 10351 - DNA, 474 bp, Homo sapiens; identical to SEQ ID NO: 3841
  SIMILAR (270)..(377): 881254mologous to Homo sapiens line-1 reverse transcriptase,accession number U83303,Smith-Waterman Score=160.

SEQ ID NO: 10352 - DNA, 413 bp, Homo sapiens; identical to SEQ ID NO: 8619
  SIMILAR (174)..(413): 951254mologous to Homo sapiens reverse transcriptase,accession number L27428,Smith-Waterman Score=416.

SEQ ID NO: 10353 - DNA, 532 bp, Homo sapiens
  SIMILAR (318)..(22): 981254mologous to Escherichia coli 37KD protein, similar to YI22-ECOLI,accession number D85613,Smith-Waterman Score=514.
cgtcagagcaccatcgctgattgtttctttcacggccactctgcctgtatgtgcccgtttcgatggcggtacagcaggttttcgctcaagcaacagcgcattctggcgcatgatccggtaaacacgtttggcattgatcgcaggcataccatcaagttctgcctgtctgcgaagcagcgcccatacccgacgataaccatacgttggcagctctccgataacatggtgtatacggagaagcacatccgtatcatcagtgtgacgactgcggcggccatccatccagtcatcggttcgtctgagaatgacgtgcaactgttctccggcggcgacagcagtaagacttccttcctggtattgcttacgccagagaaataactggctggctgctacaccatgttgccgggcaacgagggagaccgtcatccccggttcaaagctctgctgaacaattgcgatcttttcctgtgtggtacgccgtctgcgtttctccggccctaagacatcaatcatctgttctccaatgactagt

SEQ ID NO: 10354 - DNA, 694 bp, Homo sapiens
  SIMILAR (14)..(421): 811254mologous to Bacteriophage P1 non-essential to replication and lytic development,accession number X15639,Smith- Waterman Score=531.
gttgaaggccgtggcgacggaactgttgcccatgaatggctcgctgtggagcacgcaggctcgtatctctcccgcgttcctgctgaaggtaaaccagacattaatggactatcgaaccggaagagtacaacctgctattccgcagagtctccctgaagctctccgtttggctgccgacctggcagagcaaaagcaacggctggagcaaaaaatgcttatggatgcacctaaagtcgaattcgctgaacgcgttgctaccgccagcggggttctaatcggcaactatgccaaagtgctcggcctgggccaaaactatctcttcacctggttgcgtgataacggaattctgatcgcaaccggtgaacgcaggaacgtccccaaacaggattccatatctcacgccgggcatatcctgtcgcaatgtgcaaatctcgcggcaacaaccagtgaatacttcattcacaagcctcaccgcctgatcgcggcagaaactggttatagccaatcaaccgtcgttcgtgcattccgtgaagctgtaaacaaaggaattctgtctgtagagattgttatcggcgatcaccgtgaacgtcgcgctaacctgtaccggtttacaccatcctttttggccttcgcacaacaagccaaaaatgcgctgatagaaagcaaattaaagatctcttcagcggcaaccaag

SEQ ID NO: 10355 - DNA, 2141 bp, Homo sapiens; identical to SEQ ID NO: 5424
  SIMILAR (85)..(2139): 971254mologous to Homo sapiens putative p150,accession number U93563,Smith-Waterman Score=3480.

SEQ ID NO: 10356 - DNA, 748 bp, Homo sapiens
  SIMILAR (265)..(747): 951254mologous to Escherichia coli 37KD protein, similar to YI22-ECOLI,accession number D85613,Smith-Waterman Score=834.
atggaccagtgtccttataaaagaggcgccagagagctgctttgccccttccaccatgtggagacacagagagaaggtgccatctctgagaaagtgggtccacatcagataccaaatctattggaccttggtcatgacttcgatgactggatggatggccgccgcagtcgtcacactgatgatacggatgtgcttctccgtatacaccatgttatcggagagctgccaacgtatggttatcgtcgggtatgggcgctgcttcgcagacaggcagaacttgatgagtggaccgtgaaagaaagcaatcagcgatggtgctctgacgggttcgagttctgctgtgataacggagagagactgcgtgtcacgttcgcgctggactgctgtgatcgtgaggcactgcactgggcggtcactaccggcggcttcaacagtgaaacagtacaggacgtcatgctgggagcggtggaacgccgcttcggcaacgatcttccgtcgtctccagtggagtggctgacggataatggttcatgctaccgggctaatgaaacacgccagttcgcccggatgttgggacttgaaccgaagaacacggcggtgcggagtccggagagtaacggaatagcagagagcttcgtgaaaacgataaagcgtgactacatcagtatcatgcccaaaccagacgggttaacggcagcaaagaaccttgcagaggcgttcgagcattataacgaatggcatccgcata

SEQ ID NO: 10357 - DNA, 630 bp, Homo sapiens
  SIMILAR (1)..(387): 981254mologous to Bacteriophage P1 non-essential to replication and lytic development,accession number X15639,Smith- Waterman Score=640.
  misc_feature (1)...(630): n = a,t,c or g
acatttatcgactatcgaaccggaagattacaacctgctattccgcagagtctccctgaagctctccgtttggctgccgacctggcagagcaaaagcaacggctggagcaaaaaatgcttatggatgcacctaaagtcgaattnnntgaacgcgttgctaccgccagcggggttctaatcggcaactatgccaaagtgctcggcctgggccaaaactatctcttcacctggttgcgtgataacggaattctgatcgcaaccggtgaacgcaggaacgtccccaaacaagaatacatatctcgtgggtatttcacccttaaagaaaccgtgatcgatacaagcaatggaagcaggatttctttcacgactcgtataaccggcaaaggtgcggttgctggcgcctatatcgccgacatcaccgatggggaagatcgggctcgccacttcgggctcatgagcgcttgtttcggcgtgggtatggtggcaggccccgtggccgggggactgttgggcgccatctccttgcatgcaccattccttgcggcggcggtgctcaacggcctcaacctactactgggctgcttcctaatgcaggagtcgcataagggagagcgtcgaggagaacttcta

SEQ ID NO: 10358 - DNA, 2238 bp, Homo sapiens; identical to SEQ ID NO: 3843
  SIMILAR (829)..(2232): 941254mologous to Homo sapiens putative p150,accession number U93572,Smith-Waterman Score=2306.

SEQ ID NO: 10359 - DNA, 1887 bp, Homo sapiens
  SIMILAR (499)..(1881): 971254mologous to Homo sapiens putative p150,accession number U93574,Smith-Waterman Score=2368.
atgggcaaggacttcatgactaaaacaccaaaagcaatggcaacaaaagccaaaattgacaaatgggatgtaattaaactaaagagcttctgcacagcaaaagaaactaccatcagagtgaacaggatcaacaaaattgataaaccgctagcaagactaataaagaaaaaaagagagaagaatcaaatagacacaataaaaaatgataaaggggatatcaccactgatcccacagaaatacaaactaccatcagagaatactacaaacacctctacacaaataaactagaaaatctacaagaaatggataaattcctcgacacatacactctcccaagactaaaccaggaagaagttgaaactctgaatagaccaataacaggatctgaaattgtggcaataatgaatagtttaccaaccaaaaagagtccaggaccagatggattcacagctgaattctaccagaggtacaaggaggaactgcatcatcctgataccaaagcagggcaggacacaaccaaaaaagagaattttagaccaatatccttgatgaacattgatgcaaaaatcctcaataaaatactggcaaaacgaatccagcagcacatcaaaaagcttatccaccatgatcaagtgggcttcatccctgggatgcaaggctggttcaatatacgcaaatcaataaatgtaatccagcatataaacagagccaaagacaaaaaccacatgactatctcaatagatgcagaaaaagcctttgacaaaattcaacaacccttcatgctaaaaactctcaataaattaggtattgatgggacgtatttcaaaataataagagctatctatgacaaacccacagccaatatcatactgaatgggcaaaaactggaagcattccctttgaaaactggcacaagacagggatgccctctctcaccactcctattcaacatagtgttggaagttctggccagggcaattaggcaggagaaggaaataaagggtattcaattaggaaaagaggaagtcaaattgtccctgtttgcagatgacatgattgtatatctagaaaaccccactgtctcagcccaaaatctccttaagctgataagcaacttcagcaaagtctcaggatacaaaatcaatgtacaaaaatcacaagcattcttatacaccaacaaaagacaaacagagagccaaatcatgagtgaactcccattcacaattgcttcaaagagaataaaatacctaggaatccaacttccaagggatgtgaaggacctcttcaaggagaactacaaaccactgctcaaggaaataaaagaggatacaaacaaatggaagaacattccatgctcatgggtaggaagaatcaatatcgtgaaaatggccatactgcccaaggtaacttacagattcaatgccatccccatcaagctaccaatgactttcttcacagaattggaaaaaactactttaaagttcatatggaaccaaaaaagagcccgcatcgccaagtcaatcctaagccaaaagaacaaagctggaggcatcacactacctgacttcaaactatactacaaggctacagtaaccaaaacagcatggtactggtaccaaaacagagatatagatcaatggaacagaacagagccctcagaaataacgccacatatctacaactatctgatctttgacaaacctgagaaaaacaagcaatggggaaaggattccctatttaataaatggtgctgggaaaactggctagccatatgcagaaagctgaaactggatcccttccttacaccttatacaaaaatcaattcaagatggattaaagatttaaacgttagacctaaaaccataaaaaccctagaagaaacctag

SEQ ID NO: 10360 - DNA, 825 bp, Homo sapiens
  SIMILAR (262)..(579): 951254mologous to Cloning vector pSacBII RepL,accession number U09128,Smith-Waterman Score=493.
atgcaacaggtcgaaggccgtggcggcggcacttttgcccatgaattgctcgctgtggagtacgcaggctggatttctcccgcgtttcggctgaaggtaaaccagacatttatcgactatcgaaccggaagattacaacctgctattccgcagagtctccctgaagctctccgtttggctgccgacctggcagagcaaaagcaacggctggagcaaaaaatgcttatggatgcacctaaacaatggaagcaggatttctttcacgactcgtataaccggcaaagcgccgggcatatcctgtcgcaatgtgcaaatctcgcggcaacaaccagtgaatacttcattcacaagcctcaccgcctgatcgcggcagaaactggttatagccaatcaaccgtcgttcgtgcattccgtgaagctgtaaacaaaggaattctgtctgtagagattgttatcggcgatcaccgtgaacgtcgcgctaacctgtaccggtttacaccatcctttttggccttcgcacaacaagccaaaaatgcgctgatagaaagcaaattaaagatctcttcagcggcaaccaagactctaaaccagagaaactacttccacaggaagcctaattaccactcagataaactagtcagtaaaagtgacagaagttttacacccctgcaacttggtaaggtgatagggaaaggttatgatcaaggtcattccttagatgtggctattgaagagtgtggaagacaatttgaggtcaacaaggccagaggcaaagagatcagttgggtggtagtcctcgaactcaagcttggagcaaaacaatga

SEQ ID NO: 10361 - DNA, 2949 bp, Homo sapiens
  SIMILAR (1272)..(439): 991254mologous to Cloning vector pSacBII RepL,accession number U09128,Smith-Waterman Score=1401.
ttatcttgtgcaatgtaacatcagagattttgagacacaacgtggctttcccccccccccctgcaggtcgatagcagcaccaccaattaaatgattttcgaaatcgaacttgacattggaacgaacatcagaaatagctttaagaaccttaatggcttcggctgtgatttcttgaccaacgtggtcacctggcaaaacgacgatctttagaagttctcctcgacgctctcccttatgcgactcctgcattaggaagcagcccagtagtaggttgaggccgttgagcaccgccgccgcaaggaatggtgcatgcaaggagatggcgcccaacagtcccccggccacggggcctgccaccatacccacgccgaaacaagcgctcatgagcccgaagtggcgagcccgatcttccccatcggtgatgtcggcgatataggcgccagcaaccgcaccccattgttcgttatctttatttttggctaaaaccgcattaagagcttcgtttaccgtcatgcaatgcggtaggttatcgaagtttgatatcccgccaatatcaggcgaacgcttgttcttcaggtaagcatatttccgcgcagccgcctctactttctgcttgaactcatgtttttgagtgcgttttttggataaccgcagattgtcagcctttgcttttgccttagcgatccatgaagtcaattttttgaggctggttgttccggcaccgccggaaactgatctttttgtttttttaacttgtgacttcttattctttattgccacgtcatcctgacagggggagggggtatcattttgacatgggggtgtggataaaaaattaaataaagccaatgtcttagcgagaacagctttaaccttggttgccgctgaagagatctttaatttgctttctatcagcgcatttttggcttgttgtgcgaaggccaaaaaggatggtgtaaaccggtacaggttagcgcgacgttcacggtgatcgccgataacaatctctacagacagaattcctttgtttacagcttcacggaatgcacgaacgacggttgattggctataaccagtttctgccgcgatcaggcggtgaggcttgtgaatgaagtattcactggttgttgccgcgagatttgcacattgcgacaggatatgcccggcgctacgggatagaccggagtgtgttacaaagcaggccaattcatagccagaaaaagtaaaatcgctcatcgttatacagctcaggaaagtgactttagccagcattacaatgctggtggttcttactacgtcagcatcaagcaatcgcttcatcagccactgctgacctttgccggttatacgagtcgtgaaagaaatcctgcttccattgcttgtatcgatcacggtttctttaagggtgaaatacccacgagatatgtattcttgtttggggacgttcctgcgttcaccggttgcgatcagaattccgttatcacgcaaccaggtgaagagatagttttggcccaggccgagcactttggcatagttgccgattagaaccccgctggcggtagcaacgcgttcagcgaattcgactttaggtgcatccataagcattttttgctccagccgttgcttttgctctgccaggtcggcagccaaacggagagcttcagggagactctgcggaatagcaggttgtaatcttccggttcgatagtcgataaatgtctggtttagccgccaacatcccgtgaacagcctgacgggcttgtctgctcccggcatccgcttacagacaagctgtgaccgtctccgggagctgcatgtgtcagagttttcaccgtcatcaccgaaacgcgcgaggcagctgcggtaaagctcatcagcgtggtcgtgaagcgattcacagatgtctgcctgttcatccgcgtccagctcgttgagtttctccagaagcgttaatgtctggcttctgataaagcgggccatgttaagggcggttttttcctgtttggtcactgatgcctccgtgtaagggggatttctgttcatgggggtaatgataccgatgaaacgagagaggatgctcacgatacgggttacagtaaggcaaccccgccagcctagccgggtcctcaacgacaggagcacgatcatgcgcacccgtggccaggacccaacgctgcccgagatgcgccgcgtgcggctgctggagatggcggacgcgatggatatgttctgccaagggttggtttgcgcattcacagttctccgcaagaattgattggctccaattcttggagtggtgaatccgttagcgaggtgccgccggcttccattcaggtcgaggtggcccggctccatgcaccgcgacgcaaacgcggggaggcagacaaggtatagggcggcgcctacaatccatgccaacccgttccatgtgctcgccgaggcggcataaatcgccgtgacgatcagcggtccaatgatcgaagttaggctggtaagagccgcgagcgatccttgaagctgtccctgatggtcgtcatctacctgcctggacagcatggcctgcaacgcgggcatcccgatgccgccggaagcgagaagaatcataatggggaaggccatccagcctcgcgtcgcgaacgccagcaagacgtagcccagcgcgtcggccgccatgccggcgataatggcctgcttctcgccgaaacgtttggtggcgggaccagtgacgaaggcttgagcgagggcgtgcaagattccgaataccgcaagcgacaggccgatcatcgtcgcgctccagcgaaagcggtcctcgccgaaaatgacccagagcgctgccggcacctgtcctacgagttgcatgataaagaagacagtcataagtgcggcgacgatagtcatgccccgcgcccaccggaaggagctgactgggttgaaggctctcaagggcat

SEQ ID NO: 10362 - DNA, 1137 bp, Homo sapiens
atgattgatgtcttagggccggagaaacgcagacggcgtaccacacaggaaaagatcgcaattgttcagcagagctttgaaccggggatgacggtctccctcgttgcccggcaacatggtgtagcagccagccagttatttctctggcgtaagcaataccaggaaggaagtcttactgctgtcgccgccggagaacaggttgttcctgcctctgaacttgctgccgccatgaagcagattaaagaactccagcgcctgctcggcaagaaaacgatggaaaatgaactcctcaaagaagccgttgaatatggacgggcaaaaaagtggatagcgcacgcgcccttattgcccggggatggggatcgtcacactgatgatacggatgtgcttctccgtatacaccatgttatcggagagctgccaacgtatggttatcgtcgggtatgggcgctgcttcccagacaggcagaacttgatggtatgcctgcgatcaatgccaaacgtgtttaccggatcatgcgccagaatgcgctgttgcttgagcgaaaacctgctgtaccgccatcgaaacgggcacatacaggcagagtggccgtgaaagaaagcaatcagcgatggtgctctgacgggttcgagttctgctgtgataacggagagagactgcgtgtcacgttcgcgctggactgctgtgatcgtgaggcactgcactgggcggtcactaccggcggcttcaacagtgaaacagtacaggacgtcatgctgggagcggtggaacgccgcttcggcaacgatcttccgtcgtctccagtggagtggctgacggataatggttcatgctaccgggctaatgaaacacgccagttcgcccggatgttgggacttgaaccgaagaacacggcggtgcggagtccggagagtaacggaatagcagagagcttcgtgaaaacgataaagcgtgactacatcagtatcatgcccaaaccagacgggttaacggcagcaaagaaccttgcagaggcgttcgagcattataacgaatggcatccgcatagtgcgctgggttatcgctcgccacgggaatatctgcggcagcgggcttgtaatgggttaagtgataacagatgtctggaaatatag

SEQ ID NO: 10363 - DNA, 2121 bp, Homo sapiens
  SIMILAR (193)..(1866): 951254mologous to Homo sapiens putative p150,accession number U93563,Smith-Waterman Score=2780.
atgatgcctccactggtgataccctggcaaacaggatctggagtggacctcctgcaaactccaccagacctgcagaagagggtcctgactgttagaaggaaaactaacaatcagaaagcaatagcatcaacatcaacaaaaaggacgcccacgcaaaaaccccatccgaaggtcaccaacatcaaagatcaaagaactaatgacaaaaaccagatgattatctcaatagatgcagaaaagcccttcaataaaattcaacttcccttcatgctaaaaactctcaataaattaggtattgatgggacatatttcaaaataataagagctatctatgacaaacccacagccaatatcatactgaatgggcaaaaactggaagcattccctttgaaaactggcacaagacagggatgccctctctcaccgctcctattcaacatagtgttggaagttctggccagggcaatcaggcaggagaaggaaataaaaggtattcaattaggaaaagaggaagtcaaattgtccctgtttgcagacgacatgactgtttatctagaaaaccccatcgtctcagcccaaaatctccttaagctgataagcaacttcagcaaagtctcaggatacaaaatcaatgtaaaaaaatcacaagcattcttatacaccagcaacagacaaacagagagccaaatcatgagtgaactcccattcacaattgcttcaaagagaataaaatacctaggaatccaacttacaagggatgtgaaggacctcttcaaggagaactacaaaccactactcaaggaaataaaagaggatacaaacaaatggaagaacattccatgctcatgggtaggaagaatcaatatcgtgaaaatggccatactgcccaaggtaatttacagattcaatgccatccccatcaagctaccaatgactttcttcacagaattggaaaaaactactttaaagttcatatggaaccaaaaaagagcctgcatcgccaagtcaaccctaagccaaaagaacaaagctggaggcatcacactacctgacttcaaactatactacaaggctacagtaaccaaaacagcatggtactggtaccaaaacagagatatagatcaatggaacagaacagagccctcagaaataacgccgcatacctacaactatctgatctttgacaaacctgagaaaaacaagcagtggggaaaggattccctatttaataaatggtgctgggaaaactggctagccatatgtagaaagctgaaactggatcccttccttacaccttatacaaaaatcaattcaagatggattaaagatttaaacgttagacctaaaaccataaaaaccctagaagaaaacctaggcattaccattcaggacataggcatgggcaaggacttcatgtccaaaacaccaaaagcaatggcaacaaaagacaaaattgacaaatgggatctaattaaactcaagagcttctgcacagcaaaagaaactactatcagagcgaacaggcaacctacaacatgggagaaaattttcgcaacctactcatctgacaaagggctaatatccagaatctacaatgaactcaaacaaatttacaagaaaaaaacaaacaaccccatcaaaaagtgggcgaaggacatgaacagacacttctcaaaagaagacatttatgcagccaaaaaacacatgaaaaaatgctcatcatcactggccatcagagaaatgcaaatcaaaaccactatgagatatcatctcacaccagttagaatggcaatcattaaaaagtcaggaaacaacagagcatcactcttgtctggtgagtccagcgtggttcatcattgcatctggacttcagccagcagcaagtgggaacagaactctgtgggtcccaagcccttcttgtatctttgtgactgtaccactctagtgacttcttctgggcaacaaagtgagatcctgtctcaaaaaaaggaagaggaggagaagaagaagaagaagaagaagaagaagaagaagaaggaggaggaggaggaggaggaggaggaggaggaggaggaggaagagagaagaggaggaggaaaagaaagaggttacgtgaattag

SEQ ID NO: 10364 - DNA, 2868 bp, Homo sapiens
  SIMILAR (1)..(579): 1001254mologous to synthetic construct tet protein,accession number M20189,Smith-Waterman Score=973.
atgcccttgagagccttcaacccagtcagctccttccggtgggcgcggggcatgactatcgtcgccgcacttatgactgtcttctttatcatgcaactcgtaggacaggtgccggcagcgctctgggtcattttcggcgaggaccgctttcgctggagcgcgacgatgatcggcctgtcgcttgcggtattcggaatcttgcacgccctcgctcaagccttcgtcactggtcccgccaccaaacgtttcggcgagaagcaggccattatcgccggcatggcggccgacgcgctgggctacgtcttgctggcgttcgcgacgcgaggctggatggccttccccattatgattcttctcgcttccggcggcatcgggatgcccgcgttgcaggccatgctgtccaggcaggtagatgacgaccatcagggacagcttcaaggatcgctcgcggctcttaccagcctaacttcgatcattggaccgctgatcgtcacggcgatttatgccgcctcggcgagcacatggaacgggttggcatggattgtaggcgccgccctataccttgtctgcctccccgcgtttgcgtcgcggtgcatggagccgggccacctcgacctgaatggaagccggcggcacctcgctaacggattcaccactccaagaattggagccaatcaattcttgcggagaactgtgaatgcgcaaaccaacccttggcagaacatatccatcgcgtccgccatctccagcagccgcacgcggcgcatctcgggcagcgttgggtcctggccacgggtgcgcatgatcgtgctcctgtcgttgaggacccggctaggctggcggggttgccttactgcgaacgtgaagcgactgctgctgcaaaacgtctgcgacctgagcaacaacatgaatggtcttcggtttccgtgtttcgtaaagtctggaaacgcggaagtcagcgccctgcaccattatgttccggatctgcatcgcaggatgctgctggctaccctgtggaacacctacatctgtattaacgaagcgctggcattgaccctgagtgatttttctctggtcccgccgcatccataccgccagttgtttaccctcacaacgttccataaccgggcatgttcatcatcagtaacccgtatcgtgagcatcctctctcgtttcatcggtatcattacccccatgaacagaaatcccccttacacggaggcatcagtgaccaaacaggaaaaaaccgcccttaacatggcccgctttatcagaagccagacattaacgcttctggagaaactcaacgagctggacgcggatgaacaggcagacatctgtgaatcgcttcacgaccacgctgatgagctttaccgcagctgcctcgcgcgtttcggtgatgacggtgaaaactctgacacatgcagctcccggagacggtcacagcttgtctgtaagcggatgccgggagcagacaagcccctaaaccagacatttatcgactatcgaaccggaagattacaacctgctattccgcagagtctccctgaagctctccgtttggctgccgacctggcagagcaaaagcaacggctggagcaaaaaatgcttatggatgcacctaaagtcgaattcgctgaacgcgttgctaccgccagcggggttctaatcggcaactatgccaaagtgctcggcctgggccaaaactatctcttcacctggttgcgtgataacggaattctgatcgcaaccggtgaacgcaggaacgtccccaaacaagaatacatatctcgtgggtatttcacccttaaagaaaccgtgatcgatacaagcaatggaagcaggatttctttcacgactcgtataaccggcaaaggtcagcagtggctgatgaagcgattgcttgatgctggtgtgctggtacctgtcgcggcaacgctaacagacgtagtaagaaccaccagcattgtaatgctggctaaagtcactttcctgagctgtataacgatgagcgattttactttttctggctatgaattggcctgctttgtaacacactccggtctatcccgtagcgccgggcatatcctgtcgcaatgtgcaaatctcgcggcaacaaccagtgaatacttcattcacaagcctcaccgcctgatcgcggcagaaactggttatagccaatcaaccgtcgttcgtgcattccgtgaagctgtaaacaaaggaattctgtctgtagagattgttatcggcgatcaccgtgaacgtcgcgctaacctgtaccggtttacaccatcctttttggccttcgcacaacaagccaaaaatgcgctgatagaaagcaaattaaagatctcttcagcggcaaccaagatcctctacgccggacgcatcgtggccggcatcaccggcgccacaggtgcggttgctggcgcctatatcgccgacatcaccgatggggaagatcgggctcgccacttcgggctcatgagcgcttgtttcggcgtgggtatggtggcaggccccgtggccgggggactgttgggcgccatctccttgcatgcaccattccttgcggcggcggtgctcaacggcctcaacctactactgggctgcttcctaatgcaggagtcgcataagggagagcgtcgaggagaacttctaaagatcgtcgttttgccaggtgaccacgttggtcaagaaatcacagccgaagccattaaggttcttaaagctatttctgatgttcgttccaatgtcaagttcgatttcgaaaatcatttaattggtggtgctgctatcgacctgcaggggggggggggaaagccacgttgtgtctcaaaatctctgatgttacattgcacaagataa

SEQ ID NO: 10365 - DNA, 1641 bp, Homo sapiens; identical to SEQ ID NO: 7833
  SIMILAR (2)..(1603): 981254mologous to Homo sapiens putative p150,accession number U93564,Smith-Waterman Score=2788.

SEQ ID NO: 10366 - DNA, 3690 bp, Homo sapiens
  misc_feature (1)...(3690): n = a,t,c or g
atgattgaaagtatactggaggctacacgtgggttaaatgcagatactacgcccttttaccttggggccaaaaaaggaagtttgggagctcagaaactggcaaacacatgctttaatgaaattgaaaaacaagctcaagctgcggataaaatgaaggagcaggaagacctggccaaggtggtatctaaagaagaatcaatttactttgacgagccagtggagttaaggagcagttctttctctagctgggatgacagttcagattcctattggaaaaaagagaccagcaaagatactgaaacagttctgaaaaccacaggctattcagacagacctactgctcgccgcaagccagattatgagccagttgaaaatacagatgaggcccagaagaagtttggcaatgtcaaggccatttcatcagatatgtattttggaagacaatcccaggctgattatgagaccagggcccgcctagagaggctgtcggcaagttcctccataagctcggctgatctgttcgaggagccgaggaagcagccagcagagaacaaagatccattaaatttttttgaccctgtgtggatgccaaaccaaccctggttcctggcacctcgtggtcattgtaaggtgcaccctggggacaggtgccggcagcgctctgggtcattttcggcgatggaccgctttcgctggagcgcgacgatgatcggcctgtcgcttgcggtattcggaatcttgcacgccctcgctcaagccttcgtcactggtcccgccaccaaacgtttcggcgagaagcaggccattatcgccggcatggcggccgacgcgctgggctacgtcttgctggcgttcgcgacgcgaggctggatggccttccccattatgattcttctcgcttccggcggcatcgggatgcccgcgttgcaggccatgctgtccaggcaggtagatgacgaccatcagggacagcttcaaggatcgctcgcggctcttaccagcctaacttcgatcattggaccgctgatcgtcacggcgatttatgccgcctcggcgagcacatggaacgggttggcatggattgtaggcgccgccctataccttgtctgcctccccgcgtttgcgtcgcggtgcatggagccgggccacctcgacctgaatggaagccggcggcacctcgctaacggattcaccactccaagaattggagccaatcaattcttgcggagaactgtgaatgcgcaaaccaacccttggcagaacatatccatcgcgtccgccatctccagcagccgcacgcggcgcatctcgggcagcgttgggtcctggccacgggtgcgcatgatcgtgctcctgtcgttgaggacccggctaggctggcggggttgccttactgcgaacgtgaagcgactgctgctgcaaaacgtctgcgacctgagcaacaacatgaatggtcttcggtttccgtgtttcgtaaagtctggaaacgcggaagtcagcgccctgcaccattatgttccggatctgcatcgcaggatgctgctggctaccctgtggaacacctacatctgtattaacgaagcgctggcattgaccctgagtgatttttctctggtcccgccgcatccataccgccagttgtttaccctcacaacgttccataaccgggcatgttcatcatcagtaacccgtatcgtgagcatcctctctcgtttcatcggtatcattacccccatgaacagaaatcccccttacacggaggcatcagtgaccaaacaggaaaaaaccgcccttaacatggcccgctttatcagaagccagacattatcgcttctggagaaactcaacgagctggacgcggatgaacaggcagacatctgtgaatcgcttcacgaccacgctgatgagctttaccgcagctgcctcgcgcgtttcggtgatgacggaaacagctatgacccatggatttacgccaagcttgcatgcctgcaggtcgaaggccgtggcggcggcacttttgcccatgaattgctcgctgtggagtacgcaggctggatttctcccgcgtttcggctgaaggtaaaccagacatttatcgactatcgaaccggaagattacaacctgctattccgcagagtctccctgaagctctccgtttggctgccgacctggcagagcaaaagcaacggctggagcaaaaaatgcttatggatgcacctaaagtcgaattnnntgaacgcgttgctaccgccagcggggttctaatcggcaactatgccaaagtgctcggcctgggccaaaactatctcttcacctggttgcgtgataacggaattctgatcgcaaccggtgaacgcaggaacgtccccaaacaagaatacatatctcgtgggtatttcacccttaaagaaaccgtgatcgatacaagcaatggaagcaggatttctttcacgactcgtataaccggcaaaggtcagcagtggctgatgaagcgattgcttgatgctggtgtgctggatgacgtggcaataaagaataagaagtcacaagttaaaaaaacaaaaagatcagtttccggcggtgccggaacaaccagcctcaaaaaattgacttcatggatcgctaaggcaaaagcaaaggctgacaatctgcggttatccaaaaaacgcactcaaaaacatgagttcaagcagaaagtagaggcggctgcgcggaaatatgcttacctgaagaacaagcgttcgcctgatattggcgggatatcaaacttcgataacctaccgcattgcatgacgatcctctacgccggacgcatcgtggccggcatcaccggcgccacaggtgcggttgctggcgcctatatcgccgacatcaccgatggggaagatcgggctcgccacttcgggctcatgagcgcttgtttcggcgtgggtgaccacgttggtcaagaaatcacagccgaagccattaaggttcttaaagctatttctgatgttcgttccaatgtcaagttcgatttcgaaaatcatttaattggtggtgctgctatcgacctgcaggggggggggggaaagccacgtgcgacaatctatcgattgtatgggaagcccgatgcgccagagttgtttctgaaacatggcaaaggtagcgttgccaatgatgttacagatgagatggtcagactaaactggctgacggaatttatgcctcttccgaccatcaagcattttatccgtactcctgatgatgcatggttactcaccactgcgatccccgggaaaacagcattccaggtattagaagaatatcctgattcaggtgaaaatattgttgatgcgctggcagtgttcctgcgccggttgcattcgattcctgtttgtaattgtccttttaacagcgatcgcgcgcaatcacgaatgaataacggtttggttgatgcgagtgattttgatgacgagcgtaatggctggcctgttgaacaagtctggaaagaaatgcataagcttttgccattctcaccggattcagtcgtcactcatggtgatttctcacttgataaccttatttttgacgaggggaaattaataggttgtattgatgttggacgagtcggaatcgcagaccgataccaggatcttgccatcctatggaactgcctcgaaacggctttttcaaaaatatggtattga

SEQ ID NO: 10367 - DNA, 1059 bp, Homo sapiens
  SIMILAR (1)..(186): 561254mologous to Homo sapiens HDCMB45P,accession number AF068294,Smith-Waterman Score=153.
atggataaattcctcgacacatacaccctcccaagactaaaacaggaagaagttgaatctctgtatagaccaataacaggctctgaaattgaggcaataatcaatagcttaccaaccaaaaaaagtccaggaccagatggattcacagctgaattctaccagaggtacaaggaggaactggtaccattccttctgaaattattccaatcaatagaaaaagagggaatcctcccaaactcattttatgaggccagcatcatcctgataccaaagcctggcagagacacaaccaaaaaagagaattttagaccaatatccttgatgaacattgatgcaaaaatcctcaataaaatactgacaaaccgaatccagcagcacatcaaaaagcttatccaccatgatcaagtgggcttcatccctgggatggcaattaggcaggagaaggaaataaagggtattcaattaggaaaagaggaagtcaaattgtccctctttgcagatgacatgatagtatatctagaaaaccccattgtctcagcccaaaatctccttaagctgataagcaacttcagcaaagtctcaggatacaaaatcaatgtacaaaaatcacaagcattcttatacaccaataacagacaaacagagagccaaatcatgagtgaactcccattcatgattgcttcaaagagaataaaatacctaggaatccaacttacaagggacgtgaaggacctcttcaaggagaactacaaaccactgctcaatgaaataaaagaggatacaaacaaatggaagaacattccatgctcatgggtaggaagaatcaatatcgtgaaaatggccatactgcccaaggtaatttacagattcaatgccatccccatcaagctaccaatgactttcttcacagaattggaaaaaactactttcaagttcatatggaaccaaaagagagcccgcatcgccaagtcaatcctaagccaaaagaataaagctgaaggcatcatgctacctgacttcaaactatactacaaggctacagtaaccaaaacagcataa

SEQ ID NO: 10368 - DNA, 2265 bp, Homo sapiens; identical to SEQ ID NO: 2285
  SIMILAR (709)..(1242): 861254mologous to Homo sapiens putative p150,accession number U93563,Smith-Waterman Score=749.

SEQ ID NO: 10369 - DNA, 2040 bp, Homo sapiens
  SIMILAR (859)..(1944): 971254mologous to Homo sapiens The human homolog of mouse Cux -2,accession number AB006631,Smith-Waterman Score=1796.
atggaactcggtccctggctgcaagaagcccccacagcagacggagggacagccacaccagcagagtcgtttgtgacagcgcagaactgcaacagggagacaagctgtgaccgtctccgggagctgcatgtgtcagaggttttcaccgtcatcaccgaaacgcgcgaggcagctgcggtaaagctcatcagcgtggtcgtgaagcgattcacagatgtctgcctgttcatccgcgtccagctcgttgagtttctccagaagcactttacgaaacacggaaaccgaagaccattcatgttgttgctcaggtcgcagacgttttgcagcagcagtcgcttcacgttcgctcgcgtatcggtgattcattctgctaaccaccgggtcctcaacgacaggagcacgatcatgcgcacccgtggccaggacccaacgctgcccgagatgcgccgcgtgcggctgctggagatggcggacgcgatggatatgttctgccaagggttgcatggcctgcaacgcgggcatcccgatgccgccggaagcgagaagaatcataatggggaaggccatccagcctcgcgtcgcgaacgccagcaagacgtagcccagcgcgtcggccgccatgccggcgataatggcctgcttctcgccgaaacgtttggtggcgggaccagtgacgaaggcttgagcgagggcgtgcaagattccgaataccgcaagcgacaggccgatcatcgtcgcgctccagcgaaagcggtcctcgccgaaaatgacccagagcgctgccggcacctgtcctacgagttgcatgataaagaagacagtcataagtgcggcgacgatagtcatgccccgcgcccaccggaaggagctgactgggataaggtgaacttcactctgtgctcgggccctcggctggaggccgcgctggcctccaaggacagggagatcctgcggctgctgaaggacgtgcagcacctccagagctcactgcaggagctggaggaggcatccgccaaccagatcgccgacctggagcggcagctcacggccaagtccgaggccatagaaaagctggaagagaagctccaggcccagtctgactatgaggaaattaaaacggagctgagcatcctgaaagccatgaagctggcctccagcacctgcagcctcccccagggcatggccaagcctgaagactcactgcttattgcaaaggaggccttcttccccacgcagaaattccttctggagaagcccagcctcctggccagccctgaggaagacccatcagaggacgattccatcaaggattcactgggcacggagcagtcctacccctcccctcagcagctcccacctccaccagggccagaagaccccctgtctcccagccccgggcagcccctgctgggccccagcttggggcctgacggcactcggactttctcgctgtcccccttccccagcctggcatcaggggagagactgatgatgcccccagccgccttcaagggagaggcgggcggcctgctggtgttccccccagccttctatggcgccaagccccccacagcccctgccaccccggcccctggccctgagccactgggcggtcctgagcccgcggatggtggtgggggcggagcggcggggcccggggcagaggaggagcagctggacacggcagagatcgccttccaggtgaaggagcagctgctgaaacacaacatcgggcagcgggtgtttgggcattacgtgctggggctgtcgcagggctcggtcagcgagatcctagcccggcccaagccctggcgcaagctcacggtgaagggcaaggagcccttcatcaagatgaagcagttcctgtcggatgagcagaatgtactggcgctcaggaccatccaagtgcggcagcgaggtgagtgcccaagagggcccgtccccgctggccaccacgccaggtccagggcatcagggctgggggctgaggacacgcgctctgggttcaaagcccagctctaccaccacctggctgtgtga

SEQ ID NO: 10370 - DNA, 2409 bp, Homo sapiens
  SIMILAR (1303)..(2406): 961254mologous to Homo sapiens putative p150,accession number U93572,Smith-Waterman Score=1832.
atggagctgaaaaccaaggctcgagaactacgtgaagaatgcagaagcctcaggagcccatgcaatcaactggaagaaagggtatcagcgatggaagatgaaatgaatgaaatgaagcgagaagggaagtttagagataaaagaataaaaagaaatgagcaaagcctccaagaaatatgggactttgtgaaaagaccaaatctacgtctgattggtgtacctgaaagtgatggggagaatggaaccaagttggaaaacactctgcaggatattatccaggagaacttccccaatctagcaaggcaggccaacattcagattcaggaaatacagagaacgccacaaagatactcctcgagaagagcaactccaagacacataattgtcagattcaccaaagttgaaatgaaggaaaaaatgttaagggcagccagagagaaagcaccacaccacacctattccaaaattgaccacatacttggaagtaaagttctcctcagcaaatgtaaaagaacagaaattataacaaactatctctcagaccacagtgcaatcaaactagaactcaggataaagaatctcactcaaaaccactcaactacatggaaactgaacagcctgctcctgaatgactactgggtacacaacgaaatgaaggcagaaataaagatgttctttgaaaccaacgagaacaaagacacaacataccagaatctctgggacacattcaaagcagtgtgtagagggaagtttatagcactaaatgcccacaagagaaagcaggaaagatccaaaattgacaccctaacatcacaattaaaagaactagaaaagcaagagcaaacacattcaaaagctagcagaaggcaagaaataactaagatcagaggagaactgaaggaaatagaggcacaaaaaacccttcaaaaaatcaatgaatacaggagctggttttttgaaaggatcaacaaaatagatagaccgctagcaagactaataaagaaaaaaagagagaagaatcaaatagacacaataaaaaatgataaaggggatatcaccactgatcccacagaaatacaaattaccatcagagaatactacaaacacctctacgcaaataaactagaaaatctagaagaaatggataaattcctcgacacatacactctcccaagactaaaccaggaagtagttgaatctctgaagagaccaataacaggagctgaaattgtggcaataatcaatagcttaccaaccaaaaagagtccaggaccagatggattcacagccgaattctaccagagagacataaccaaaaaagagaattttagaccaatatccttgatgaacgttgatgcaaaaatcctcaataaaatactggcaaaacgaatccagcagcacatcaaaaagcttatccaccatgatcaattgggcttcatccctgggatgcaaggctggttcaatatacccaaatcaataaatgtaatccagcatataaacagagccaaagacaaaaaccacatgattatctcaatagatgcagaaaaggcctttgacaaaattcaacaacccttcatgctaaaaactctcaataaattaggtattgatgggacgtatttcaaaatactaagagctatctatgacaaacccacagccaatatcatactgaatgggcaaaaagtggaagcattccctttgaaaactggcacaagacagggatgccctctctcaccactcctattcaacatagtgttggaagttctggccagggcaattaggcaggagaaggaaataaagggtattcagttaggaaaagaggaagtcaaattgtccctgtttgcagacgacatgattgtatatctagaaaaccccattgtctcagcccaaaatctccttaagctgataagcaacttcagcaaagtctcaggatacaaaatcaatgtacaaaaatcacaagcattcttatacaccaacaacagacaaacagagagccaaatcatgagtgaactcccattcacaattgcttcaaagagaataaaatacctaggaatccaatttacaagggacgtgaaggacctcttcaaggagaactacaaaccactgctcaaggaaataaaagaggatacaaacaaatggaagaatattccatgctcatgggtaggaagaaacaatatcgtgaaaatggccatactgcccaaggtaatttatagattcaatgccatccctatcaagctaccaatgcctttcttcacagaattggaaaaaactactttaaaattcctatggaaccaaaaaagagcccgcatcgccaagtcaatcctaagccaaaagaacaaagctggaggcatcacactacctgacttcaaattatactacaaggctacagtaaccaaaacagcatggtactga

SEQ ID NO: 10371 - DNA, 2616 bp, Homo sapiens; identical to SEQ ID NO: 4623
  SIMILAR (670)..(2502): 961254mologous to Homo sapiens putative p150,accession number U93567,Smith-Waterman Score=3104.

SEQ ID NO: 10372 - DNA, 4073 bp, Homo sapiens
  SIMILAR (3)..(2438): 981254mologous to Homo sapiens putative p150,accession number U93567,Smith-Waterman Score=4161.
aactagaaaagcaagagcaaacacattcaaaagctagcagaaggcaacaaataactaaaatcagagcagaactgaaggaaatagagacacaaaaaacccttcaaaaaatcaatgaatccaggagctggttttttgaaaggatcaacaaaattgatagaccgctagcaagactaataaagaaaaaaagagagaagaatcaaatagacacaataaaaaatgataaaggggatatcaccaccgatcccacagaaatacaaactaccatcagagaatactacaaacacctctacgcaaataaactagaaaatctagaagaaatggataaattcctcgacacatacactctcccaagactaaaccaggaagaagttgaatctctgaatagaccaataacaggctctgaaattgtggcaataatcaatagtttaccaaccaaaaagagtccaggaccagatggattcacagccgaattctaccagaggtacaaggaggaactggtaccattccttctgaaactattccaatcaatagaaaaagagggaatcctccctaactcattttatgaggccagcatcattctgataccaaagccgggcagagacacaaccaaaaaagagaattttagaccaatatccttgatgaacattgatgcaaaaatcctcaataaaatactggcaaaccgaatccagcagcacatcaaaaagcttatccaccatgatcaagtgggcttcatccctgggatgcaaggctggttcaatatacgcaaatcaataaatgtaatccagcatataaacagagccaaagacaaaaaccacatgattatctcaatagatgcagaaaaagcctttgacaaaattcaacaacccttcatgctaaaaactctcaataaattaggtattgatgggacgtatttcaaaataataagagctatctatgacaaacccacagccaatatcatactgaatgggcaaaaactggaagcattccctttgaaaactggcacaagacagggatgccctctctcaccgctcctattcaacatagtgttggaagttctggccagggcaatcaggcaggagaaggaaataaagggtattcaattaggaaaagaggaagtcaaattgtccctgtttgcagacgacatgattgtttatctagaaaaccccatcgtctcagcccaaaatctccttaagctgataagcaacttcagcaaagtctcaggatacaaaatcaatgtacaaaaatcacaagcattcttatacaccaacaacagacaaacagagagccaaatcatgggtgaactcccattcacaattgcttcaaagagaataaaatacctaggaatccaacttacaagggatgtgaaggacctcttcaaggagaactgcaaaccactgctcaaggaaataaaagaggacacaaacaaatggaagaacattccatgctcatgggtaggaagaatcaatatcgtgaaaatggccatactgcccaaggtcatttacagattcaatgccatccccatcaagctaccaatgactttcttcacagaattggaaaaaactactttaaagttcatatggaaccaaaaaagagcccgcattgccaagtcaatcctaagccaaaagaacaaagctggaggcatcacactacctgacttcaaactatactacaaggctacagtaaccaaaacagcatggtactggtaccaaaacagagatatagatcaatggaacagaacagagccctcagaaataatgccgcatatctacaactatctgatctttgacaaacctgagaaaaacaagcaatggggaaaggattccctatttaataaatggtgctgggaaaactggctagccatatgtagaaagctgaaactggatcccttccttacaccttatacaaaaatcaattcaagatggattaaagatttaaacgttaaacctaaaaccataaaaaccctagaagaaaacctaggcattaccattcaggacataggcgtgggcaaggacttcatgtccaaaacaccaaaagcaatggcaacaaaagacaaaattgacaaatgggatctaattaaactaaagagcttctgcacagcaaaagaaactaccatcagagtgaacaggcaacctacaacatgggagaaaattttcgcaacctactcttctgacaaagggctaatatccagaatctacaatgaactcaaacaaatttacaagaaaaaaacaaaaaaccccatcaaaaagtgggcaaaggacatgaacagacacttctcaaaagaagacatttatgcagccaaaaaacacatgaagaaatgctcatcatcactggccatcagagaaatgcaaatcaaaaccactatgagatatcatctcacaccagttagaatggcaatcattaaaaagtcaggaaacaacagaaacatggatggagctggaggccattatcctaagcaaactaatgaaggaacagaaaaccaaataccagatgttctcacttgtaagtgggagctaaatgataagaacatatggacacaaagaggggaacaacacaccctggagcctgttggaggagaaggtgaattaagaaaagataatcactcaaccaaaaatgaccagtacgataataggcattttcaactggctgtaggaaatggccttatggctaagaccttcatggtcagtttcttctataaagccagtgcctacgttgtacccacaggagaattgccagatttagatataattcagttaaaacaatttggaaacgcattgtcacatctaacagtaggaacctcagtcactcaaatacaaaatttaaatacaatgggaataattggatcccaagatagcagggaccaactggccacactcaaatgtcaaggtaaaggggacccaaaatatcaatgtgatcctccagttaaagtaggtgctaatggaggtcagataattaatgaagttttagctcaggtccaacttacagtgggtccaaagacaaatggatattggagaatgacagtggattatcataagcttaaccaagatgtgactccaattgtagctgctgtaccagatgtggtttcattgcttgaggttatatcaactcttcaaaaagacttctattgctttttccttctgcaaaatatcacactggtccattatattgatggcattatgctgactgaatccagtgagcaagaagtagcagacacactggacttattgactagtatacgtggactcatggaatgccttatccaccatcatggtatcccacacagcattgcctctgaccaaggccctcactttatggctaaagaattgtgggagtgggctcatgctcatggaattcactggtcttaccatattccccatcatcctgaagcagctggattgatagaatggcggaatgaccttttgaagtcacaattacaacaccaactaggtgacaatgctttgcagggctggggcaaagttctccagaaggccatgtatgctctgaatcagcatccaatatatgttactgtttttcccattgccaggattcataagtcctggaatcaaggggtggaagtagaagtggcatcactcaccatcacccctagtgatccactagcaaaatttttgctttccgttcccacaacattacattctcctggcctagaggtcttagttccagctggaggaatgctgccaccaggagacacaacaatcccattgaactggaagttaatattgccacctggacactttgggctcctcctacctttaagtcaacaggctaagaaggcagttacagtgttggctagggtgattgacccagactatcaggatgaaatcagtctactactccacaatggaggtaaggaagagtatgcatggaattcaggagatccattaggtgtctcttggtattaccatgccctgtcattaaggtcaatgagaactacaacagtgcaatccaggcaggattacaaatggcccagatacctcaggaatgaagatttgggtcatgttaccagggaaaaaaaacacaacctgctgaggtgcttgctgaaggctaagggaatatag

SEQ ID NO: 10373 - DNA, 3171 bp, Homo sapiens
  SIMILAR (1126)..(1509): 801254mologous to Mus musculus Pro-Pol-dUTPase polyprotein,accession number Y12713,Smith-Waterman Score=509.
atgattgtgtatctaaaaaacccaatcgtctcagcgcaaaatctcctcaagctgataagcaacttcagcaaagtctcaggatacaaaatcaatgtagaaaaatcacaagcattcttatacaccaataacagacaaacagagagccaaatcatgagtgaactcccattcacacttgcttcaaagagaataaaatacctaggaatccaacttacgagtgacgtgaaggacctcttcaaggagaactacaaaccactgctcaaggaaataaaagaggatacaaacaaatggaagaacattccatgctcatgggtaggaagaatcaatatcgtgaaaatggccatactgcccaagcccccagacaaccacttgcatcagtatcacccaaaagaagcagattcctgggccccaacttctaccactgaatcagaacctctatggaagataaaccctgcgctgcctgaggaaacagtgatggcctcccctgaggcagttgccaggaaagataatgtagagtctcctcaggacccatctccaacacccctgtttgcttctagacctataactggactaaagtcccagtgggcccctagagtgccagaatgcataattagcacagacatacttagcaactggcagaacccccacattggctccccaactggtggggtgagggctgttatggtgggaaaggccaaatggaagccattagaggtgcctctacctagaaaaatagtaaatcaaaaacaatgtcacatccctggagggattgcagagattagtgctgccattaaggccttaaaagatgcaggggcaatgattcctacaatatccctgttcgactctactcagcctgtgcagaagacaggtggattttggagaatgacagtggattattgtaagcttaaccaagtggtgtctccaattgcagctgctgtaccagatgtggtttcattgcttgagcaaattaacacaccttcgggagtatatcaactctccagcttggtgtttaatcttcagagagaccttgatcgcctttcccttccacaagatatcacactggtccattacattgataacactatactgattggatccagtgacagagaagtagcaaacacactggacttattgcgcatttatcgagtgactggaaaggctgccagttttgagtggggtctacaacaggagaaggctctgcagcaggtccaggctgctctgccgcttgcgccatatgatccagcagatccaatggtgcttgaggtgtcagtggcagacagggatgctgtttggagcctttggcagcccgccataggtgaatcacagtggaggcctccaggattttggagcaaggccctattttctgcagataactgctctccttttgagaaacagctcttggcctgttactgggctttggtagaaactgaacgtttgattatgggtcaagtcacaaggggaccagaactgcctatcatgaactgggtgctttctgacccattagccataaagtgggtcatgaacagcaatattccatcatcaagtggaaatggtatatatgtggtcaggcaccagcaggtcctgagggcacaaggtgatcagccagctacttggtggcaggttgattatattggatctcttccatcaaggaaagggcagcagcttgccctcactggaatagacacttactccagatataggtttacctatcctgtacgcaatgcttttataaagactaccatccgtggactcacagaatgctttatccaccatcatgcatcaacagcttgtaatagcgtctgccccgattacgctgaacttcacgtgagatcgtcgaaggactgcgattcagcgccagtacgtatcgcacgaatgctcattttggctgacaaaccagctcgtatctcctcgcgctcagacagtgtcagactagtcattggagaacagatgattgatgtcttagggccggagaaacgcagacggcgtaccacacaggaaaagatcgcaattgttcagcagagctttgaaccggggatgacggtctccctcgttgcccggcaacatggtgtagcagccagccagttatttctctggcgtaagcaataccaggaaggaagtcttactgctgtcgccgccggagaacaggttgttcctgcctctgaacttgctgccgccatgaagcagattaaagaactccagcgcctgctcggcaagaaaacgatggaaaatgaactcctcaaagaagccgttgaatatggacgggcaaaaaagtggatagcgcacgcgcccttattgcccggggatggggattgcacgtcattctcagacgaaccgatgactggatggatggccgccgcagtcgtcacactgatgatacggatgtgcttctccgtatacaaccatgtttatcggagagctgccaacgtatggttatcgtcgaggtatggtgacgcttcgcagaacaggcagaacgtgaatgatatggcctgcgaatcaatgccaaaccgtgttttaccggaatcgatgcccagagatgcgctgttgcctgaagcgaaaaacctgctgtaccgtccatcgagaccgggcacataccaggcagagtggcccgtgaaagaaaagcaatcaagcgatggtgctctgacgggttcgagttctgctgtgataacggagagagactgcgtggtcacgttcgcgctggactgctgtgatctggagtggctgacggataatggttcatgctaccgagctaatgaaacacgccagttcgcccggatgttgggacttgaaccgaagaacacggcggtgcggagtccggagagtaacggaatagcagagagcttcgtgaaaacgataaagcgtgactacatcagtatcatgcccaaaccagacgggggcaaatccacaggtgaactacgctcctctgtttgttacgcaataaaaactggtgttttcgactatgcaaaacagtttccctcctcacgcaatctggaaaaatttggtgaggcccgacaagatttaaccataaaagaactggctgaaaaatttctggcactgaaagaaactgaagtcgccaaaacatcactcaacacataccgtgccgtcatcaaaaatatcctgagcataatcggtgaaaaaaatcttgcctcatcgattaataaagaaaaattactggag

SEQ ID NO: 10374 - DNA, 1545 bp, Homo sapiens; identical to SEQ ID NO: 10092
  SIMILAR (355)..(1005): 971254mologous to Homo sapiens putative p150,accession number U93568,Smith-Waterman Score=1072.

SEQ ID NO: 10375 - DNA, 1011 bp, Homo sapiens
  SIMILAR (352)..(1008): 871254mologous to Homo sapiens putative p150,accession number U93564,Smith-Waterman Score=996.
atgattgtttatctagaaaaccccatcgtctcagcccaaaatctccttaagctgataagcaacttcagcaaagtctcaggatacaaaatcaatgtacaaaaatcacaagcattcttatacaccaacaacagacaaacagagagccaaatcatgagtgaactcccattcacaattgcttcaaagagaataaaatacctaggaatccaacttacaagggatgtgaaggacctcttcaaggagaactacaaaccactgctcaaggaaataaaagaggacacaaacaaatggaagaacattccatggctcatgggtaggaagaatcaatatcgtgaaaatggccatactgcccaagtattggaagttacggccagggcaatcagggaagaaaaagaaagaaaggatattcatataggaagagcggaagtcaaattgtctctgtttgcagatgacatgattgtatatttagaaaaccccatcgtctcagcccaaaatctccttaagctggtaagcaacttcagcaaagtctcaggatacaaaatcaatgagcaaaaatcacaagcattcctattcaccaataatagacaaacagagagccaaatcatgagtgaactcccattcacaattgccacaaagagaataaaatacctaggaatacaatttacaagggatgtgaaggacctcttcaaggagaactacaaaccactgctcaaggaaataagagagggcacaaacaaatggaaaaacattccatgctcatggataggaaggatcaatatcatgaaaatggccatactgcccaaagtaatttatagattcaatattatccccattaagctaccattgacattcttcacagaattagaaaaaactactttaaacttcagatggaaccaaaaaagagcccatatagccaagacaatcttaaacaaaaagaacaaagctggaggcatcatgctacctgacttcaaactatactacaaggctacagtaaccaaaacatcatggtactga

SEQ ID NO: 10376 - DNA, 2244 bp, Homo sapiens; identical to SEQ ID NO: 5419
  SIMILAR (418)..(2238): 821254mologous to Homo sapiens putative p150,accession number U93569,Smith-Waterman Score=2508.

SEQ ID NO: 10377 - DNA, 2682 bp, Homo sapiens
  SIMILAR (1)..(1602): 941254mologous to Homo sapiens putative p150,accession number U93568,Smith-Waterman Score=2639.
atgattatctcaatagatgcagaaaaggcctttgacaaaattcaacaacacttcatgctaaaaactctcaataaattaggtattgatgggacatatctcaaaataataagagctatctatgacaaacccacagccaatatcatactgagtgggcaaaaactggaagcattccctttgaaaactggcacaagacagggatgccctctctcaccactcctattcaacatagtgttggaagttctggccagggcaattaggcaggagaaggaaataaagggtattcaattaggaaaagaggaagtcaaattgtccctgtatgcagatgacatgattgtatatctagaaaaccccattgtctcagcccaaaatctccttaagctgataagcaacttcagcaaagtctcaggatacaaaatcaatgtacaaaaatcacaagcgttcttatacaccaataacagacaaacagagagccaaatcatgagtgaactcccattcacaattgcttcaaagagaataaaatacctaggaatccaacttacaagggatgtgaaggacctcttcaaggagaactacaaaccactgctcaatgaaataaaagaggatacaaacaaatgcaagtacattccatgctcatgggtaggaaaaatcaatatcatgaaaatggccatactgcctaaggttatttatagattcaatgccatccccatcaagctaccaatgactttcttcacagaattggaaaaaactactttaaagttcatatggaaccacaaaggagcccgcatcaccaagtcaatcctaagccaaaagaacaaagctggaggcatcaggctacctgacttcaaactatactacaagactacagtaaacaaaacagcatgctactggtaccaaaacagagacagagatcaatggaacagaacagagccctcagaaataacgccacatatctacaactatctgatctttgacaaacctgacaaaaacaagcaatggggaaaggattccctatttaataaatggtgctgggaaaactggctagccatatgtagaaagctgaaactggatcccttctttacaccttatacaaaaattaattcaagatggattaaagacttaaacgttagacctaaaaccataaaaaccctagaagaaaacttaggcattaccattcaggacataggcgtgggcaatgacttcatgtctaaaacaccaaaggcaatggcaacaaaagccaaaattgacaaatggaatctaattcaactaaagagcttctgcacagcaaaagaaactaccatcagagtgaacaggcaacctacaaaatgggagaaaattttcgcaacctactcatctgacaaagggctaacatccagaatctacaatgaactcaaacaaatttacaagaaaaaaacaaacaaccccatcaaaaagtgggtgaaggacatgaacagacacttctcaaaagaagacatttatgcagccaaaaaacacatgaaaaaatgctcaccatcactggccatcagagaaatgcaaatcaaaaccacaatgagataccatctcacaccagttagaatggcaatcattaaaaagtcaggaaacaacagttcactgaacaatgtgatgaaaggaaatgatgaactgggggattctgtctcccggtttcagaagcagacactgagcctcaaatctgctaagattgccctgtgtgagagtcttatctcctgtagagaaagagctaaaattgtggaaaaacagacacaagctcttatcatgagagtggctgacctgaaacaaaaggtgcatgcacagccttgccaggctgccagttttaagtgggttccagaacaggagaaggctctgcaacaggtcaaggctgctgtgcaagctgctctgccacttgggccatatgacccagcagatccaatggtgcttgaggtgtcagtggcagataggggtgctctttggagcctttggcaggcttccatgggtgaatcacagaggatgtctctaggattttggagcaaggccctgccttcttctgcatataactactcttcctttaagagacagctcttggcctgttactgggttggtacagccataaagtgggtcttacatagcagcattccatcaccaaatggaagtggtatacatgtgactgggcttcagcaggtcctgaaggcacaacctgcactgatggtctcattgggaattccctatgaacagttgacagaggaagagaggacaagagcctgcttgacagatggttctgtaaaatatgcaagcaccacccgaaatgggacagctgaagcactatatcccctttctaggataaccctaagcaaggctgacttggctatggcagctgctgagtgcccagtttcccatcagctgaaaccaacactgagccctcaatatggcaccattcatcagggtgatcagccagctacctggtggcaggttgattatattgggactcttccattgtggaaaggccagagatttgtcctcactggaatagacacttacttcagatatgagtttgcctatcctgtaaataatgcttctgtgaagcctaccatctgtggactcacagaatgccttacctaccatcatggtattccacatggcattgcctctgaacaaggcattcactttacagctaaagaagtgtggcagtga

SEQ ID NO: 10378 - DNA, 2124 bp, Homo sapiens
atgcccttgagagccttcaacccagtcagctccttccggtgggcgcggggcatgactatcgtcgccgcacttatgactgtcttctttatcatgcaactcgtaggacaggtgccggcagcgctctgggtcattttcggcgaggaccgctttcgctggagcgcgacgatgatcggcctgtcgcttgcggtattcggaatcttgcacgccctcgctcaagccttcgtcactggtcccgccaccaaacgtttcggcgagaagcaggccattatcgccggcatggcggccgacgcgctgggctacgtcttgctggcgttcgcgacgcgaggctggatggccttccccattatgattcttctcgcttccggcggcatcgggatgcccgcgttgcaggccatgctgtccaggcagcctaacttcgatcattggaccgctgatcgtcacggcgatttatgccgcctcggcgagcacatggaacgggttggcatggattgtaggcgccgccctataccttgtctgcctccccgcgttgcgtcgcggtgcatggagccgggccacctcgacctgaatggaagccggcggcacctcgctaacggattcaccactccaagaattggagccaatcaattcttgcggagaactgtgaatgcgcaaaccaacccttggcagaacatatccatcgcgtccgccatctccagcagccgcacgcggcgcatctcgggcagcgttgggtcctggccacggtctggaaacgcggaagtcagcgccctgcaccattatgttccggatctgcatcgcaggatgctgctggctaccctgtggaacacctacatctgtattaacgaagcgctggcattgaccctgagtgatttttctctggtcccgccgcatccataccgccagttgtttaccctcacaacgttccataaccgggcatgttcatcatcagtaacccgtatcgtgagcatcctctctcgtttcatcggtatcattacccccatgaacagaaatcccccttacacggaggcatcagtgaccaaacaggaaaaaaccgcccttaacatggcccgctttatcagaagccagacattaacgcttctggagaaactcaacgagctggacgcggatgaacaggcagacatctgtgaatcgcttcacgaccacgctgatgagctttaccgcagctgcctcgcgcgtttcggtgatgacggaaacagctatgaccatgattacgccaagcttgcatgcctgcaggtcgaaggccgtggcggcggcacttttgcccatgaattgctcgctgtggagtacgcaggctggatttctcccgcgtttcggctgaaggtcatgcactggctgatgaaccgtatgcttgatgcaagaaaccgtgatcgatacaagcaatggaagcaggatttctttcacgactcgtataaccggcaaagcgccgggcatatcctgtcgcaatgtgcaaatctcgcggcaacaaccagtgaatacttcattcacaagcctcaccgcctgatcgcggcagaaactggttatagccaatcaaccgtcgttcgtgcattccgtgaagctgtaaacaaaggaattctgtctgtagagattgttatcggcgatcaccgtgaacgtcgcgctgacctgtaccggtttacaccatcctttttggtcttcgcacaacaagccaaaaatgcgctgatagaaagcaaatcaaagatcctcttcagcggcaaccaaggtgcggttgctggcgcctatatcgccgacatcaccgatggggaagatcgggctcgccacttcgggctcatgagcgcttgtttcggcgtgggtatggtggcaggccccgtggccgggggactgttgggcgccatctccttgcatgcaccattccttgcggcggcggtgctcaacggcctcaacctactactgggctgcttcctaatgcaggagtcgcataagggagagcgtcgaggagaacttctagcgcaatcacgaatgaataacggcttggttgatgcgagtgattctgatgacgagcgtaatggctggcctgttgaacaagtctggaaagaaatgcctaagctttttgccattctcacccggatttcagtcgtcacctcatggtga

SEQ ID NO: 10379 - DNA, 1497 bp, Homo sapiens
  SIMILAR (406)..(1065): 781254mologous to Homo sapiens reverse transcriptase homolog= pol {retroviral element},accession number S61070,Smith-Waterman Score=856.
atggcccgcaaagatatccaggttctaatcattggaacctatgaatattaccttgtaaagggggaaaaggtcttaacaattttagcgattaagttaaaggtcttaaaatggagtggttatcctggattatgtctcccagaatatcatctgggagaggttgaaggcgaggatgacatggaagtgacagccatggatggcagatgcttagaggtgaagcagggatcggagcgactgcaggtcgcagaccaggaatgtgtaggagacgggtcggggagactgtgcccatttgacaggtgtgaatgcgaacagaggctgcagctggttagaccagggctgtgcaaccctagagccattgccttgaccacaaagccacagtctcctagtcctaatattaagagactagtcattggagaacagatgattgatgtcttagggccggagaaacgcagacggcgtaccacacaggaaaagatcgcaattgttcagcagagctttgaaccggggatgacggtctccctcgttgcccggcaacatggtgtagcagccagccaagaaggaagtcttactgctgtcgacgccggagaacaggttgttcctgcctctgaacttgctgccgccatgaagcagattaaagaactccagcgcctgctcggcaagaaaacgatggaaaatgaactcctcaaagaagccgttgaatatggacgggcaaaaaagtggatagcgcacgcgcccttattgcccggggatggggaacgaaccgatgactggatggatggccgccgcagtcgtcacactgatgatacggatgtgcttctccgtatacaccatgttatcggagagctgccaacgtatggttatcgtcgggtatgggcgctgcttcgcagacaggcagaacttgatggtatgcctgcgatcaatgccaaacgtgtttaccggatcatgcgccagaatgcgctgttgcttgagcgaaaacctgctgtaccgccatcgaaacgggcacatacaggcagagtggccgtgaaagaaagcaatcagcgatggtgctctgacgggttcgagttctgctgtgataacggagagagactgcgtgtcacgttcgcgctggactgctgtgatcgtgaggcactgcactgggcggtcactaccggcggcttcaacagtgaaacagtacaggacgtcatgctgggagcggtggaacgccgcttcggcaacgatcttccgtcgtctccagtggagtggctgacggataatggttcatgctaccgggctaatgaaacacgccagttcgcccggatgttggacttgaacctacatgaactagggcggcctgccaagagagtcgttgtaatctcttactccggggatcgtcctggaaataatcggggtatggatgcaaaggtggagtctggaatgtcggttggcaataccctgtatattcggctggctaccacgggttgttggcgaagaatcgggggcatgacaccggttccggtgtga

SEQ ID NO: 10380 - DNA, 2784 bp, Homo sapiens; identical to SEQ ID NO: 6553
  SIMILAR (418)..(921): 551254mologous to Murine leukemia virus polymerase,accession number AF136491,Smith-Waterman Score=457.

SEQ ID NO: 10381 - DNA, 2448 bp, Homo sapiens
  SIMILAR (1258)..(1833): 751254mologous to Mus musculus Pro-Pol-dUTPase polyprotein,accession number Y12713,Smith-Waterman Score=774.
atgaacatcgatgcaaaaatcctcaataaagtactggcaaaccaaatccagcagcatatcggacagcttatccaccacgatcaagtgggcttcatccccaggatgcaaggctggttcaacatatgcaaatcaataaatgtaatccagcatgtaaacagaatcaacgacaaaaaccacatgattatctcactagacctagaaaaggcctttgacaaaattcaacagcccttcatgctaaaaactctcaataaattaggtattgatgggaagtatctcaaaacaataagagctatttatgacaaacccacagccaatatcatactgaatgggcaaaaactggaagcattccctttgaaaactggcacaagacagggatgccctctctcaccactcctattcaacatagtgttggaagttctggccagggcaatcaggcaggagaaagaaataaaaggtattcaattaagaaaagaggaagtcaaattgtccctgtttgcagatgacatgattgtatatttagaaaaccccatcatctcagccccaaatctccttaagctgataagcaacttcagcaaagtctcaggatacaaaatcaatgtacaaaaatcacaagcattcttatacaccaataagagacaaacagagagccaaatcatgagtgaactcccactcaaaactgcttcaaagagaataaaatacctaggaatccaagttacaagggttgtgaaggacctcttcaaggagaactacaaaccactgctcagtgaaataaaagaggatacaaacaaatggaagagcattccatgctcatgggtaggaagaatcggtattgtgaaaatggccaaactgcccaagagcttgaacgccgtgctgagagaaccattgctctcttcagggctgtcagggacatttaagtctgcagaagctgtctgctgccttttgttctactatgccctgccctcagaggtggaatctatagaggcagtaggccttgctgagctgtggtgggctctgcccagtttgtacttccaggccactttgtttacactacctataactagactaaagtaccagcaggctcccagagttaaactagaggcttatggaggtcaggtaattaatgaagctttagctcaggtaggccttacagtgggtctactgggtccctgggcttatcctgtggtcatttccccagtgtcagaatacataattggcatagacatagttagcagctggcagaaccctcacattggcttcctgactgctgccgtaccagatgtggtttcattgcttgagcaaattaacacatctcctggtacctggtatgcagccattgacttggtaaatgcctttttctccattgttgtccataaggcccatcagaagaaatttgccttcagctggcaaagccagcaatatacctttactctcctacctcaggggtatatcaactctcaggctttgtgtcataatcttatttggagagaacttgatcgctttctgcttccacaagatatcacagtggtccattacattgaagacattatgctgattggatccagcgagcaagaaatagcaaacacactggacttattggtgagacatttgtgtgtcagaggatgggagacaaatctgactaaaattaagggaacttctacttcagtaaaatttctaggggcccagtggtgtggagtctgtctcgatattccttctaaggtgaagaataacttgctgcatttggctcttcctacaaccaagaaagaggcacaacacctagtgggcctatttggattttggagacgatacattcttcatttagtcacaatgcaacctgaattgcctattatgaactgggtgctttctgatccatctagccataaagtgggatatgcacagcagcattccatcatcaaatggaagtggtataaacatgatcgggctcaagcaggtcctgaaggcacaaatgaactggctacagccactgctgagtgtccagtttgccagcagcagagaccaacactgagaccttcatatggcaccattccttggggtgatcatccagctacctggtggcaggttaattatactggacctattccatcatggaaagggccaaggtttgttctcactggaatagacacttactctggatatgggtttatctatcctgcatgcaatgcatatgccaagactaccatctatggacttatggaaagcgttattcaccgtcatggtattccacacagcattgcttttgaacaaggcactcactttatggctaaagaatttggcagtgggctcacgcttatgaaattcactggtcttaaccatgtttcccatcatctggaagcagctggattgatagaatggtggaatggccttttgaagtcacaattacaatgccaaataggtgacaacgctttgcagggctggggcaaagttctctaa

SEQ ID NO: 10382 - DNA, 1431 bp, Homo sapiens
  SIMILAR (232)..(2784): 211254mologous to Plasmodium falciparum glutamate-rich protein,accession number AF247634,Smith-Waterman Score=194.
atggatgaagctggaaactatcattctaagcaaactatcacaaggacagaaaaccaaacacagcatgttctcactcatagtgaggaaactgtggctcaggaagatgatgtgcctttgacaaggtcatggttgctgaaagcactcaagccccaagaggttcagagcagagccaagtcccctgatggccagtacaaagaggaggagaaagagaaggacagcagagggtgctctctgctggatttccccagcatgccagcttcccactgtgcagataaagcaaaatctgataggagcggggaggaagtgggctcaggctccaggagtacaagttggtatgcaagcaagtcattccaaacgccgcctccacacaaaccctctgagctgcaaattattaacctgcttaactctattgcagaaacaagcgctgctggggtgttggaagttctggccagggcaattaggcaggagaaggaaataaagggtattcaattaggaaaagaggaattcaaattgtccctgtttgcagatgacatgattgtatatctagaaaaccccattgtctcagcccaaaatctccttaagctgataagcaacttcagcaaagtctcaggatacaaaatcaatgtacaaaaatcacaagcattcttatacaccaataacagacaaacagagagccaaatcatgagtgaactcccattcacaattgcttcaaagagaataaaatacctaggaatccaacttacaagggatctgaaggacctcttcaaggagaactacaaaccactgctcaatgaaataaaagaggatacaaacaaatggaagaacattccatgctcatgggtaggaagaatcaatatcgtgaaaatggccatactgcccaagagggacgtgactgcaaattgtccaggttcttggcgttttgaacaaagaattggacaaaacacgcagcaaagaaagaatgaagcaacaaaagaacgaaagcagctctctcggctttcggctcggaggaggccaaggtgcaactttcttcggtcgtctcgaatccgggttcatccgacaccagccgcctccaccatgccgccgaagttccaccccaatgagatcaaagtcgtatacttcacgtgcactggagttgaagtcggtgccacttctgctctggcccccaagattggccccgcgggtctgtctccaaaagaggttggtgatgacattgccaaggtaacgggtgactggaagggcctgaggattacagtgaaactgaccattcagaacagacaggcccagattgaagtggtaccttctgcctccgccctgatcatcaaaaggaactaccaagagacagaaagaaacagaaaaacattaaacacagggggaatatcactttttatgagatcgtcaacattgctcgacagatgcagcactgatccttag

SEQ ID NO: 10383 - DNA, 2481 bp, Homo sapiens; identical to SEQ ID NO: 4454
  SIMILAR (233)..(559): 471254mologous to Homo sapiens Human protein clone HP10489,accession number Y94894,Smith-Waterman Score=117.

SEQ ID NO: 10384 - DNA, 1746 bp, Homo sapiens; identical to SEQ ID NO: 7073
  SIMILAR (418)..(1707): 921254mologous to Homo sapiens putative p150,accession number U93564,Smith-Waterman Score=2077.

SEQ ID NO: 10385 - DNA, 541 bp, Homo sapiens
  SIMILAR (2)..(277): 961254mologous to Cloning vector pSacBII RepL,accession number U09128,Smith-Waterman Score=444.
cgccgggcatatcctgtcgcaatgtgcaaatctcgcggcaacaaccagtgaatacttcattcacaagcctcaccgcctgatcgcggcagaaactggttatagccaatcaaccgtcgttcgtgcattccgtgaagctgtaaacaaaggaattctgtctgtagagattgttatcggcgatcaccgtgaacgtcgcgctgacctgtaccggtttacaccatcctttttggtcttcgcacaacaagccaaaaatgcgctgatagaaagcaaatcaaagatcctcttcagcggcaaccaaggtgcggttgctggcgcctatatcgccgacatcaccgatggggaagatcgggctcgccacttcgggctcatgagcgcttgtttcggcgtgggtatggtggcaggccccgtggccgggggactgttgggcgccatctccttgcatgcaccattccttgcggcggcggtgctcaacggcctcaacctactactgggctgcttcctaatgcaggagtcgcataagggagagcgtcgaggagaacttcta

SEQ ID NO: 10386 - DNA, 1533 bp, Homo sapiens
  SIMILAR (241)..(984): 1001254mologous to Homo sapiens Similar to PDZ domain- containing guanine nucleotide exchange factor I,accession number BC001956,Smith-Waterman Score=1306.
atgcccttgagagccttcaacccagtcagctccttccggtgggcgcggggcatgactatcgtcgccgcacttatgactgtcttctttatcatgcaactcgtaggacaggtgccggcagcgctctgggtcattttcggcgaggaccgctttcgctggagcgcgacgatgatcggcctgtcgcttgcggtattcggaatcttgcacgccctcgctcaagccttcgtcactggtcccgccaccaaacgtttcggcgagaagcaggccattatcgccggcatggcggccgacgcgctgggctacgtcttgctggcgttcgcgacgcgaggctggatggccttccccattatgattcttctcgcttccggcggcatcgggatgcccgcgttgcaggccatgctgtccaggcaggtagatgacgaccatcagggacagcttcaaggatcgctcgcggctcttaccagcctaacttcgatcattggaccgctgatcgtcacggcgatttatgccgcctcggcgagcacatggaacggtaaccgggcatgttcatcatcagtaacccgtatcgtgagcatcctctctcgtttcatcggtatcattacccccatgaacagaaatcccccttacacggaggcatcagtgaccaaacaggaaaaaaccgcccttaacatggcccgctttatcagaagccagacattaacgcttctggagaaactcaacgagctggacgcggatgaacaggcagacatctgtgaatcgcttcacgaccacgctgatgagctttaccgcagctgcctcgcgcgtttcggtgatgacggaaacagctatgaccatgattacgccaagcttgcatgcctgcaggtcgaaggccgtggcggcggcacttttgcccatgaattgctcgctgtggagtacgcaggctggatttctcccgcgtttcggctgaaggtaaaccagacatttatcgactatcgaaccggaagattacaacctgctattccgcagagtctccctgaagctctccgtttggctgccgacctggcagagcaaaagcaacggctggagcaaaaaatgcttatggatgcacctaaagtcgaattcgctgaacgcgttgctaccgccagcggggttctaatcggcaactatgccaaagtgctcggcctgggccaaaactatctcttcacctggttgcgtgataacggaattctgatcgcaaccggtgaacgcaggaacgtccccaaacaagaatacatatctcgtgggtatttcacccttaaagaaaccgtgatcgatacaagcaatggaagcaggatttctttcacgactcgtataaccggcaaagagattagtactgaagagcagctaaggcgcctgcaagaggagaagctttgcaaaatctgtatggatagaaatattgctatcgtttttgttccttgtggacatctagtcacttgtaaacaatgtgctgaagcagttgacaagtgtcccatgtgctacacagtcattactttcaagcaaaaaatttttatgtcttaa

SEQ ID NO: 10387 - DNA, 13935 bp, Homo sapiens
  SIMILAR (13935)..(7672): 931254mologous to Homo sapiens protocadherin Flamingo 1,accession number AF231023,Smith-Waterman Score=10020.
ttatcttgtgcaatgtaacatcagagattttgagacacaacgtggctttcccccccccccctgcaggtcgatagcagcaccaccaattaaatgattttcgaaatcgaacttgacattggaacgaacatcagaaatagctttaagaaccttaatggcttcggctgtgatttcttgaccaacgtggtcacctggcaaaacgacgatctttagaagttctcctcgacgctctcccttatgcgactcctgcattaggaagcagcccagtagtaggttgaggccgttgagcaccgccgccgcaaggaatggtgcatgcaaggagatggcgcccaacagtcccccggccacggggcctgccaccatacccacgccgaaacaagcgctcatgagcccgaagtggcgagcccgatcttccccatcggtgatgtcggcgatataggcgccagcaaccgcaccccattgttcgttatctttatttttggctaaaaccgcattaagagcttcgtttaccgtcatgcaatgcggtaggttatcgaagtttgatatcccgccaatatcaggcgaacgcttgttcttcaggtaagcatatttccgcgcagccgcctctactttctgcttgaactcatgtttttgagtgcgttttttggataaccgcagattgtcagcctttgcttttgccttagcgatccatgaagtcaattttttgaggctggttgttccggcaccgccggaaactgatctttttgtttttttaacttgtgacttcttattctttattgccacgtcatcctgacagggggagggggtatcattttgacatgggggtgtggataaaaaattaaataaagccaatgtcttagcgagaacagctttaaccttggttgccgctgaagagatctttaatttgctttctatcagcgcatttttggcttgttgtgcgaaggccaaaaaggatggtgtaaaccggtacaggttagcgcgacgttcacggtgatcgccgataacaatctctacagacagaattcctttgtttacagcttcacggaatgcacgaacgacggttgattggctataaccagtttctgccgcgatcaggcggtgaggcttgtgaatgaagtattcactggttgttgccgcgagatttgcacattgcgacaggatatgcccggcgctacgggatagaccggagtgtgttacaaagcaggccaattcatagccagaaaaagtaaaatcgctcatcgttatacagctcaggaaagtgactttagccagcattacaatgctggtggttcttactacgtctttgccggttatacgagtcgtgaaagaaatcctgcttccattgcttgtatcgatcacggtttctttaagggtgaaatacccacgagatatgtattcttgtttggggacgttcctgcgttcaccggttgcgatcagaattccgttatcacgcaaccaggtgaagagatagttttggcccaggccgagcactttggcatagttgccgattagaaccccgctggcggtagcaacgcgttcagcgaattcgactttaggtgcatccataagcattttttgctccagccgttgcttttgctctgccaggtcggcagccaaacggagagcttcagggagactctgcggaatagcaggttgtaatcttccggttcgatagtcgataaatgtctggtttaccttcagccgaaacgcgggagaaatccagcctgcgtactccacagcgagcaattcatgggcaaaagtgccgccgccacggccttcgaccgaaacagggctgtcggggacaggcctcgggtgttggagggcaaaggtgacagcatcatggacagaggcaaagagatgcttcttggtgatggatgcatcgaagaagtgcccagcctcaagctggctgaccacagggctgtggcaggccgccatgtacacctccacctcaatctcccggaagtcatggaaaatattcttcaggctcttgaggcacacagtgtccacaaaggagagggcacccaggtccaggatgaggctgtggaagtctggctgaggcaggcccagggccttcagtgtggacccatctggggccttggagtcttcttgaccattggctgttgcatcttccatcttatctcctgagctcacctgctggggagccagacatgcagacaaaaggggccctgcctgtttccgaagcttctcctctttctgcagttgcttcagcttcagctgctcctgcttcttgagcagtttcttcttctgggagatgaggaagtcgacatccacaccacacctctgcttcagcgcatcactgtagaactcagcattggcaaagtacacggtggccgaggagcggaagaccttcaccccccggacttccttggcctctgagtactctgccacatctctgtaaatatccgtgtctggcacctgccccaggacagagtagtggggcatctgtgtccggaccaccacgagcagcagggagaagatgaccgcaaccaccaagccaaggtccaggttcagcaagatggtggccgtgaaggtcaccagccagataagcagatccgcccgattggccttccagagggagcgcatgtcgctgagctgcctcagcatgcccttcaggttcacaatgatgatggctgccaggaccgccttgggcaggtcatggaagagttccccaagtttgacaatgatgaggaggatgaaaagggaagagatggctccagcaacctgcgagttgcccccggtgctctcctgtaccaggctccgagacatagagcaactcacggggaagcactggaagatgcctccgataaggttactgaggcccagggccaccagctcctggttgctgtccacccggtagccgtgcctcagggcgaagatcttccccagtgagatggcaatggcaaacccaaccacagcgatggtgaaggcgctgcccacgagctttgagaacagctgggtgttgggggccactgggggcaccagccctgcagggatgttgcccacgacatctacctcaaatctgtgctttagacccatgccataggagatgcctgtggccccgatgagcgtgagcagctccccgggtatcggcatgggcagctgctgctgcagcttgtcattcaacagcttcaccaccacgagcaccaccccagccacagctgcagtgaccacggtgccaaccttgctctggggcagcttccagcagacctccagcactgtatagatgagggacagtggcccagagtggctgctcagatggaggccaaacacatacttgagctgtgagacgaagacctgcacagctgcagctgtggtatagcctcggacaagaggttctgacaggtaggtgaccacgaagccgaagtggatcaggcccagccccacctggaagaggccaaccaggacactgagtgtggaggccacctgtacccgggcagcatctctggctgtctcattgatcatggagtcgttcaaggcctgcggggccagggattctgtcacactgcccaccatcacagacatgacagcaaaggtccctgtgtctactggtcccgggacacagaggctctccacggagatgtgccgggaagtgccaaacaggaagtagatgaagacagggtagaaggagctatagaggccaaacacggggggcaatccagccaggagggcgtaggccaagccctgcggaagctgcatgatggccacactcaggccggataacaggtcacccaggagccagtcacgcacaggataccggggtaaccagaccaaaaccgggaggtgttggagcagaagggcataggcccgagcacgggagcactgcaaccaggtccgccactggtgggtcctaggtgctgagccccagcgccccagctcctccaaatgctcctggttcagcagcggccgttccatgtggtagtctcgcctccgcaggtccattgcttgtgttgcagacagcagtgcctgtgtgtccctcggttctgagtctggcgacagctccgagatgctgtgagacgtggcagaacgtggcgtggagggcccaagcacagaggctgtggcagaaggtgtggcagtggtgtgagggcccaagggtgtgcttgaagattgcacagaggagagggccgaggagttgaaagaggcaaggatggaggaaagaatgtccaactgttctgtggaggggccatggctggggccactgaccgagtcctccctagctctgagcagctgcgggagtggcccaagggcttctcgtgaggggtgccggctaggcacctggtccagctgctcccgagagttcgagctcctagacagagagtccagcggccgggatggcaagagggggtcccttgagagttgccgctggggagacaggggcagaggtgggggctgtgggtcaaggtcccgggtgcggcggggcggaggcagcgtgctcaaccactctcgaggtgcccctaagtcgagcgcatcccgtgacccgaagcggccagccatggcgccagggtagtcccgaggtggctgcctccgtggcagggtgctgccccgatctttgggctccagtcggcctggtgcagcatccatgcattcctgggaccctggccggctcaggggacgtagaacaggggcaggggcttcctctagtcgctcacggctcagttgccgccggaggagcaggtccagctgttctctagaagagtagcggctggctggctgtgaaaggctgcccgtgcccccgccagcatagatgcgaccgtaagaggcagctggcacagcacggtggcccaaggtggctgcacggcaccaggacagctcaggggcacctcgggtctgtggcaccagtgggtattgcaaccggttcttcaggatgcctttcctctggcgctgggcccggcccagagaagtctcatccccactggtcagggccgggtctggctggttgttgttagctgcatccttgctggtgtccagccccaggcgcctttcagagccccaagtctgcagagcacagggggctgcctcgcactcccccagggctggccagtaggacaggaggtcattgccatccacatctttggggtgggtgaggagcctctcactctgggctgctcggcagagtggccgttggaagcgcccccgcgtccggccattgtcctcgctttctgaagatggaatggagagactcctctcctcctccaaggacaggtcactgtcagagtcggagtctgcgccagcatctcgatggaacatggccacgtccaggtcagtggggccagcatgagcctggaggctgtggtcagtgtggtcagcggctgagccatgtcgaaccaggacattgtccctgaggtagctgcggccccgctggctgtcctggtcctgggtccggccggagcgggcactgctcacagaggagacggtggaggcgcccagagtgatgcggatgaggccactctcctcaaagagagccgtgttgttgtaggccccaggtcccagcccaggtgctggccttgcctcctcaggcgctgccttcctgcccagacaggctggcatccaggcagcccgagcatctgcatttaggacacagaagagcagcagcaccgccaggccctggaggccgcagagtccagcatggaggtagtggaaggctaggatgctgtggttgactgccaggagcccaaagagccaggaggcactgaccagcagaagcagcaggaaggagctgcgaagggtcctgagtgcagaggtcttcttggcctccctctgccctgtggagcaggatgtgcgggcagcgaggagaaacatggtcccgttcatcactatgaccaggacaacagggccagcaaagctccagatgaggggctcgtggactgagatccagcagaagtcagggttcccatagccctcagggtccaggcccacagcaaggcccagcagcacagcagggacgccccagcccagggcatggtagaagcgcatggcgccgcggtccacgttgcgtggctcaacctgcatgcggtagaggtgcagcccctgcacgaagagccacgcgaaggtgctgaggaagaagtagtgcaggaggatggcgactgcagtgcacaccagctctgaccctgagttttggccccaggcctcctgggccagtagggtcatcaggacacaagttccctggccctgatcctgcacctgattgtgggtcctgtgaatccccagcaggaagaggagctctgccacccccagggcggctgccacattggcatggatcccacgcacattggacttgaggctgcgcaggctcagcaggatggctgcagtcagcaccagcgcagccacagacacagccacgaccacgtgggtgaacacagccagcagctccaggtcgccctccagcctctcacggggagaggcatccatgaggaccccaaaggtccctgtccggctgcagcgacaccgtgcgtgggacccattcctgtgcaccagctcgcagtcccgtgctgtccacacaccatgctgctccgccaggccaggtgggtcccactgcacacagatcgccttgctccgattcgctgtctgtagcaggcgaaactctaggctgatgggggactccaggattccccttaggaagttgcgtccgtggaacacagccacgctgaccaccggggagttcatgacggggttctgaggaagcctggcacctcggcgttctgcctggaactgggcagggagcagtccccctaaggtgcggtaaacgaggagaatgataatggagatcccaggctctggctctggcggggctggtggggggaccacacttgaggtggtggagttttctatgctgctgcttgtgggcagaacttcagatggggatggccgtggggactgggaaggcagcagcacatgggtgtgaggatcccaggcatcctggcctcgaaagaggttgctatggtagcgagggtagcgacgggccccccggggagaactggggtgctccatgcggtcaatgctgagcatgatattaggcgtcaccagccccatgggattcaggtatgtgagttccatattccttgcgagtgtggctgcatactcctccaggtgcctcaccagtcccgcgctgcctggggagcccccaggggcccgctgccccagcgccgcccacaagtcccctgtctctggggcaagcagtgcagagccggcccacagcagattctcattgaagtgggcatcctgtgtggctgtcagcccgaagccctgctgatggctctcgaaggccagcaggtgggccagcaggcgggcagtgactcgaacatcttggctaaaatagtggtcagtgtggccagtcacctcccgtagccgctgagccagcttcttggcctccatggtatccagtgccgtcttgttcagctctaggccatccagcagcagactgagctctcgaaaggcaggggaggtacagttgaagaggtcgggctccagccaaccctgggcctcatcacacagccgcacagcagcacccagggccccccggggacagggcactgtggccaggacgccaaactttgtctggggccaccacacaccagatctcagggacttagggcaggcatcatagagcacccggcagccgctggctgtcacctctgcgaagggactgtcacagctgttgcactggcggccaagggctcctgggcgacaggggcactgcccgctgtggggtgcacatgagcgcgaggtggagcccacagggtagcagtcacatgggaggcaagagtcactgccccgcggtcggtagtggaactccttgcagtgacactgcccatttgtcttgttgcagttgggatcaaaacctttgtgaacatcacagttgcaggggccacaggttgggctcccccaccagccccgtgggcactgctggtccatcctgtgctcacagtggtgcccgaaatagccacccacacagtcacaggtatagccatggggggctcctggcaggtgccggcatgatccctggttctgacaggggttcaggaggcaggcatccacacagcctgggccgtagtaacctggctggcaggtgcaagaaaaggtctgccagaggtcccggcagtctgcgtgaggtgggcagggcccagaggcacaggcgttggtcacaacacagccaggtccgcattcactcggtggctggatgcagccaaccagaccctgaggagcctcctctgcactgccggggggcaggcctcccacgtggagctgctttaccttcaggccctgcagctcactccccaccgccatggtgtcctggaagaggctaaagtccagtgagaccataaggacatggtggccccgccggccacctggttcctcctgcaactccagccgcagatcgtgccaccggccatcactgacagtcacctggtccagaaggagatgggaagcacggcccgagcccctggtcactgtcacagacagtaacccccgatctagctggcaaaggagcgtgctgtgtggcccagcctgcacttgcatcaggaccccctgcgttgcccgtgtccgaaatgccagccccaggtaccatggcacagacacagccatgtcacttccaaagttccagctcagtgtgccgttgccacggaaatggtggggatgggccatagtaagctgacagtctttgccgccgaagcccacagggcagtcgcagctgaagctgccccagcgctccgagcagaagccactgttcttgcaggggcctgagtcacaaaagtgtagcttggcttggcagcctgccatggtgccattatttgcgacaaaagccgccatgtccactcggcggccatcaatgtgcaggtcccgcatacagccgatgaagtccttatgggatacggggaagttctcggggaggttggggacacctcccagaagaagagggcccgtcaggtccagggacttcttggagcttgtttgcacaccagcagccgcgcatgagtagttgccaatctcagcaccaaactgcagagccacggccacatcacaatcatccacgcttagcacagccaccttgtccttggaggggccctgtgcaccccctagggcatctgtccggggcttgttgtagtatctcagatgcactgtatgccattgcccgtcactcaagccccctggaactgtggggctgaccacggtgttggattcacccgtggaatatgtgagccgcacttggccagccacgagttccagggccaggaagtcgtgcttctcgttcaggcgcccgttgtagaagagcagcccgctctgctgcactgtcgcgaacgagagggacagcgtaaggtggaatcgctgccgcaggccgcgaaacatgacgaacgaactgggcgggaaggagcgcgcagccacctcgcagcgcgggccctcgaaggcgccgcctgccgggcactggcagcgaaagccgccgttgggcgcgtcggtgcaggtgcccccgttgcggcagacgcccggcacgcagcggccggcctcggtgtccagctcgcagtcctctccggtgaagcgcgggcggcagacgcacgtgtagcctccctcgcgccgcgcgcaggctccgccgttgcgacatgggttggagtagcagaggtcgagctcggtctcgcaaaagtctcccgtgaatccgggcgggcagcggcagcgcaggccagcgatgggctggatgggtcggaacagcgtggaggccgaggccaggaagggcgcggacgagtcaaagcggagcacggacacgcatttcatgtagttctcacagggctctcgcaggcacacgttgtcgtcgaagggcagtacgtcgagcagggagcgagccgccagcgccgcccggcgcacgtacaactgctcttgcagctcctcggagctgaaccagggccctgcagcgcccgccccggccccacgtggagctagcgccgagaaactcacattgagcacggtgccccctacgtctgtgtcgttctggatgttgaagatgaagacgtcctcagcgggcgtagcgagcaccgcagccacgccctcgaggaagcggcccagcagcggtgacaggaagcgctcctgccacatgttctcaaggcgcacggtcaggctgttggccagcaactcctccgtgatgatgaccacgcgcagcacacactgcgccgtcacgctgtgcaggccatctgtgacagtcaccaacatggaggccaccagtgggcggttattgtctagctttcggctgagtcgcagctccccactggtctggttgactaccagcagctgcagctcattgccacgctcaaaggagtagaagaggtggtcggagacatcggggtcataagctgggatgcgcccaataatgcccgacgggaaggtgtctgaacggttggatacatagttgttgaagaggatctggaagttgttgagcacagggctgttgtcattctggtcaaccaggcggacgtgcacagtggcccggctgaccaaaggagcagatgtggcctgcaccacaatcacatattcttggcgagcctcatagtctaggtcaatgagtgccgtcagttctccagagaagatgtccatttggaacagctcagggatgttcccctccacgatctggtacattatatgggcattggggccttcgtcagggtccactgcagtgatctgggccaccactgagcccacaatgctattctctttcacccgcacctcaaactcctcagctgggaagacaggtgcattgtcgttcacatcctgcaccatcacctggatactgactggagtccggagtgggggcacacctctgtccactgcgtaggcagtcaactcatacactgatactgcctcccggtctagccgccttactgtacggacaattccagaggtgggctcaatggtaaaatctccatccccatcttcaccattctggaaagtgtactggacccggccattggcatgagcatcccggtcagtggctgagatctgcaggacactggtgaaaggtggggcatcctcagagaccagccctgtatagtgggaggccacaaattgtggagcattgtcattcacgtcattgaccatcacctccacataagtagtgtctgccttctgtgggatgccattgtcccgagctgtgatagccagggtgtaggtcacctggtcctcatagtctaatggggcctgtaatgtaatggctcctgagtctgcatcaatgcggaactggggcaggttgtcctccaggagataggtgatacgagcattctcacccacgtcatcatcagaggcactgatgaccactatggtgctacccattggccgatcttcattcacactcactgagtagtgggcactttgaaagaccggccgatgagtgttggcatctgtgatgttgatgtgcacatagcagtgatcatgaagggcacggtcagatgcagttagtaccagcttgaagtagcgttcctgcttgtagtccagtggcagagccagagtcaccagacccacacccccctgggtgctgatggcaaagcgattccgggtgttgccgcctgtgatctggtagctgatggcactgttggcatcacggtctactgcggtcacgctgaccacactggtgcccacagctgcatcctcattcagtcgtaggtggtactccttcattgtgaactcaggccgattgtcattaacgtccagcacagtcacggtgacactggctgaggcagagagtgggggtgagccatggtctcgagcctccacaccaaagaagtaatgctccacagactcacggtccaggggaccactcacagagacccagccagtggcgctgtttatcacaaaaggagtatcaggtgccacaccagttagggagtactccaatctggcattctccccatggtctgcatcgactgcctgaatgtggatgactgagtgacccaagggagcattttccaagacagaaacttggaagggcgtgctgacaaaaataggaatgtggtcattgatgtccaccacctggatgctggccaggcccgtgttgttggacagcggtggccggccagcatcctgcgccctgatgcgcaaggcatactctctctctgcctcgaagtccagaggtgccaccacctggatctcgccagtgaggctgtcgatggcaaagtgtccacggctattgccactgatgatgttgtagtgcaccaatccgttggcgtccttgtcccggtcagtggccgtgacgcgcagcacgactgtgtgggggcgcacatcctcgcgcacctgcgccacgtagcgcttctcgctgaactgaggagcattgtcgttctcgtctagcacagttatgtgtacgcgcacagtggccgagcgcggcccgggttcctggccctggtcgctggcttccaccaccagctcatagctttccatgtgctcgcggtccactcggccgctggtgctgatgaggccggagcgtggatcaatctcgaaggcggcggcagctgcagcgcgcgcagctggcggccccacgaagcggtagcgcaggttggcgttggggggcgcgtcgccgtcagtggcacgcagctgcaggatagggtagccctcctccacattctcgcgaagggtctcccggtactgcgcttgctcaaaaaccggcgagtggtcgttgcggtcggctactgtcacggccaccatcgtggtggccgagaggcgcggcgacccgtggtcctgcgcggtcacacgcaggtagtgacgctccatgctctcgcggtccagagctgccgccgtacggataaggccgctctgcgggtcgatgctgaacagctccagcgagcggctgttcatgagtgccgccagcgagtagactaggcgcccggcctcgccggcgtccgggtcctgagcaaccacgcgtagcaccgcggtgcctgctgcctcattctccggcaccagcgtctggtagttgtactgcggaaactgcgggtggcggtttgcggcgcgacgaaagcgtgcccggttcgccgaggttactttcctggcttcaggacgggccgggagtcccgggggacgcggcccggggcgctgcgggaggaagcggcagcggaagagaccccgggagcgcatgcgcttgggcgccggctcgggagctgtccgagactcgcggggtgctgaacctgatgcaggagctgtcctcgccgtgcgtggtgctgaatccagctcggggccagatcccgaggcccctggaagacagttccgccggggggctgtcctttctgctccggatgtcgtggctctctcgccctgacccttgctccctgttgcccataattccccacagcagcgcgcggtgcccactcttttgcgggagcctgtcccagcgttccgctgggaggacaccggcttgggaccgtggtgccgaatcaaaaagtctgaagggaggggcgagctgttccccgagcccgggacccctgaggacagagcccctggtgacagactacctctttgcaaaggtcctgtccgcccgcaagaggagacctctgggcgccagtataacacagaccctggtccctgtcctgtctctcgttcgcggctgcccaatggctggacgccgtgttcaatccccagctcctcattcggctgctcagggggccctcgactattccgggcgctttgccttctccctcggagccccacgaagataggctccctgacccccaggccaggccccccatcctcccggaccccggaagactccggacaaagagctaaggctccgccaccgatatgcgcccttggccccgtagtggcagctaagcctgggtcccagccctggtgcccaccgccccccagctcctcctggctgagggggaacaaagagaggagaaggagcaggagtatgggggtcgaccgtcccccgaggccccgccacggcggccgcctcgccat

SEQ ID NO: 10388 - DNA, 1905 bp, Homo sapiens
  SIMILAR (1272)..(439): 991254mologous to Cloning vector pSacBII RepL,accession number U09128,Smith-Waterman Score=1401.
ttatcttgtgcaatgtaacatcagagattttgagacacaacgtggctttcccccccccccctgcaggtcgatagcagcaccaccaattaaatgattttcgaaatcgaacttgacattggaacgaacatcagaaatagctttaagaaccttaatggcttcggctgtgatttcttgaccaacgtggtcacctggcaaaacgacgatctttagaagttctcctcgacgctctcccttatgcgactcctgcattaggaagcagcccagtagtaggttgaggccgttgagcaccgccgccgcaaggaatggtgcatgcaaggagatggcgcccaacagtcccccggccacggggcctgccaccatacccacgccgaaacaagcgctcatgagcccgaagtggcgagcccgatcttccccatcggtgatgtcggcgatataggcgccagcaaccgcaccccattgttcgttatctttatttttggctaaaaccgcattaagagcttcgtttaccgtcatgcaatgcggtaggttatcgaagtttgatatcccgccaatatcaggcgaacgcttgttcttcaggtaagcatatttccgcgcagccgcctctactttctgcttgaactcatgtttttgagtgcgttttttggataaccgcagattgtcagcctttgcttttgccttagcgatccatgaagtcaattttttgaggctggttgttccggcaccgccggaaactgatctttttgtttttttaacttgtgacttcttattctttattgccacgtcatcctgacagggggagggggtatcattttgacatgggggtgtggataaaaaattaaataaagccaatgtcttagcgagaacagctttaaccttggttgccgctgaagagatctttaatttgctttctatcagcgcatttttggcttgttgtgcgaaggccaaaaaggatggtgtaaaccggtacaggttagcgcgacgttcacggtgatcgccgataacaatctctacagacagaattcctttgtttacagcttcacggaatgcacgaacgacggttgattggctataaccagtttctgccgcgatcaggcggtgaggcttgtgaatgaagtattcactggttgttgccgcgagatttgcacattgcgacaggatatgcccggcgctacgggatagaccggagtgtgttacaaagcaggccaattcatagccagaaaaagtaaaatcgctcatcgttatacagctcaggaaagtgactttagccagcattacaatgctggtggttcttactacgtctttgccggttatacgagtcgtgaaagaaatcctgcttccattgcttgtatcgatcacggtttctttaagggtgaaatacccacgagatatgtattcttgtttggggacgttcctgcgttcaccggttgcgatcagaattccgttatcacgcaaccaggtgaagagatagttttggcccaggccgagcactttggcatagttgccgattagaaccccgctggcggtagcaacgcgttcagcgaattcgactttaggtgcatccataagcattttttgctccagccgttgcttttgctctgccaggtcggcagccaaacggagagcttcagggagactctgcggaatagcaggttgtaatcttccggttcgatagtcgataaatgtctggtttaccttcagccgaaacgcgggagaaatccagcctgcgtactccacagcgagcaattcatgggcaaaagtgccgccgccacggccttcgactgatggagagtcagggttcgcggactgaccagtgacgtacaaggagccagaagggaagacgtgaggggtggcgggtagcaccgaggccggccaggccaggcacaggactgcagccgtctctggcat

SEQ ID NO: 10389 - DNA, 2901 bp, Homo sapiens
  SIMILAR (229)..(324): 401254mologous to Homo sapiens rECEF 84,accession number R42822,Smith-Waterman Score=60.
ttatcttgtgcaatgtaacatcagagattttgagacacaacgtggctttcccccccccccctgcaggtcgatagcagcaccaccaattaaatgattttcgaaatcgaacttgacattggaacgaacatcagaaatagctttaagaaccttaatggcttcggctgtgatttcttgaccaacgtggtcacctggcaaaacgacgatctttagaagttctcctcgacgctctcccttatgcgactcctgcattaggaagcagcccagtagtaggttgaggccgttgagcaccgccgccgcaaggaatggtgcatgcaaggagatggcgcccaacagtcccccggccacggggcctgccaccatacccacgccgaaacaagcgctcatgagcccgaagtggcgagcccgatcttccccatcggtgatgtcggcgatataggcgccagcaaccgcaccccattgttcgttatctttatttttggctaaaaccgcattaagagcttcgtttaccgtcatgcaatgcggtaggttatcgaagtttgatatcccgccaatatcaggcgaacgcttgttcttcaggtaagcatatttccgcgcagccgcctctactttctgcttgaactcatgtttttgagtgcgttttttggataaccgcagattgtcagcctttgcttttgccttagcgatccatgaagtcaattttttgaggctggttgttccggcaccgccggaaactgatctttttgtttttttaacttgtgacttcttattctttattgccacgtcatcctgacagggggagggggtatcattttgacatgggggtgtggataaaaaattaaataaagccaatgtcttagcgagaacagctttaaccttggttgccgctgaagagatctttaatttgctttctatcagcgcatttttggcttgttgtgcgaaggccaaaaaggatggtgtaaaccggtacaggttagcgcgacgttcacggtgatcgccgataacaatctctacagacagaattcctttgtttacagcttcacggaatgcacgaacgacggttgattggctataaccagtttctgccgcgatcaggcggtgaggcttgtgaatgaagtattcactggttgttgccgcgagatttgcacattgcgacaggatatgcccggcgctacgggatagaccggagtgtgttacaaagcaggccaattcatagccagaaaaagtaaaatcgctcatcgttatacagctcaggaaagtgactttagccagcattacaatgctggtggttcttactacgtctttgccggttatacgagtcgtgaaagaaatcctgcttccattgcttgtatcgatcacggtttctttaagggtgaaatacccacgagatatgtattcttgtttggggacgttcctgcgttcaccggttgcgatcagaattccgttatcacgcaaccaggtgaagagatagttttggcccaggccgagcactttggcatagttgccgattagaaccccgctggcggtagcaacgcgttcagcgaattcgactttaggtgcatccataagcattttttgctccagccgttgcttttgctctgccaggtcggcagccaaacggagagcttcagggagactctgcggaatagcaggttgtaatcttccggttcgatagtcgataaatgtctggtttaccttcagccgaaacgcgggagaaatccagcctgcgtactccacagcgagcaattcatgggcaaaagtgccgccgccacggccttcgactctgccgcagtcacactcaagactacacatgcgcgtgtgggcactggaactaaaatccgggttgagaggctgggcctgatattttgtggctagaagggccccacataactcaggtccagggaggtgagtgacctggaaaggacagagcggacatgaggcctgtgtgcggcctggctcctggaggccgatgtgcgagcgagccacagcttttcgggccaaagcggcgaaggtctcatccaggttgatatagtcctgccgctcctcctggtcccccgtgcgatggtttcgggagcgctggaggatgtgagccctgtcccggatgtgatgcccaatggacatctgctccagtccactgtctgaatcccgaacagtcctccgtgtctcccggatcccgcctggtgccgagcgcatctctgatgtctcttggtagaccttgggggcaccatcacccgtattggagtaggagatgacagtggaagatgagaaggtctggcaattgcctccagctgtcatgtgttccatgtttccaatcatgtcattcatcatcccaaacatgtccatgaaaccacccgactgctgcatccggcggctggcaggcctggtccctggcatgttgccatctgtgatgctgaggaaggggctatatccaaagccacctgacaacatacggctcatatgctgacggtgaatagcaaagggatccatcaggaacatgggatcctcaggctccacgtccctcatgaagcggaacatcctgatctcagctccagggggctccacacccgcatcccgggctcccagaccctgcagccccgtgggcccgctcccgtccggggctgccagctctgcccgagcctcaccagtgcccgattcgggctcagcggcccatccggccggtttcgcttcccggtacgctgcagggtcagggtcgcggcccggaacgtggggattggtccgggcttgagctcctcggccttccacgccgcctcctcccacagctgccacctccgtacggccccctcggccaacggagcccgaacccggggccgggccgtgggagccccgccccctggcgcgggtggtgagatggctggggccgagtcccaggggcgccggggccat

SEQ ID NO: 10390 - DNA, 2151 bp, Homo sapiens
  SIMILAR (667)..(1365): 901254mologous to Homo sapiens putative p150,accession number U93572,Smith-Waterman Score=1097.
ttatcttgtgcaatgtaacatcagagattttgagacacaacgtggctttcccccccccccctgcaggtcgatagcagcaccaccaattaaatgattttcgaaatcgaacttgacattggaacgaacatcagaaatagctttaagaaccttaatggcttcggctgtgatttcttgaccaacgtggtcacctggcaaaacgacgatctttagaagttctcctcgacgctctcccttatgcgactcctgcattaggaagcagcccagtagtaggttgaggccgttgagcaccgccgccgcaaggaatggtgcatgcaaggagatggcgcccaacagtcccccggccacggggcctgccaccatacccacgccgaaacaagcgctcatgagcccgaagtggcgagcccgatcttccccatcggtgatgtcggcgatataggcgccagcaaccgcaccccattgttcgttatctttatttttggctaaaaccgcattaagagcttcgtttaccgtcatgcaatgcggtaggttatcgaagtttgatatcccgccaatatcaggcgaacgcttgttcttcaggtaagcatatttccgcgcagccgcctctactttctgcttgaactcatgtttttgagtgcgttttttggataaccgcagattgtcagcctttgcttttgccttagcgatccatgaagtcaattttttgaggctggttgttccggcaccgccggaaactgatctttttgtttttttaacttgtgacttcttattctttattgccacgtcatcctgacagggggagggggtatcattttgacatgggggtgtggataaaaaattaaataaagccaatgtcttagcgagaacagctttaaccttggttgccgctgaagagatctttaatttgctttctatcagcgcatttttggcttgttgtgcgaaggccaaaaaggatggtgtaaaccggtacaggttagcgcgacgttcacggtgatcgccgataacaatctctacagacagaattcctttgtttacagcttcacggaatgcacgaacgacggttgattggctataaccagtttctgccgcgatcaggcggtgaggcttgtgaatgaagtattcactggttgttgccgcgagatttgcacattgcgacaggatatgcccggcgctacgggatagaccggagtgtgttacaaagcaggccaattcatagccagaaaaagtaaaatcgctcatcgttatacagctcaggaaagtgactttagccagcattacaatgctggtggttcttactacgtctttgccggttatacgagtcgtgaaagaaatcctgcttccattgcttgtatcgatcacggtttctttaagggtgaaatacccacgagatatgtattcttgtttggggacgttcctgcgttcaccggttgcgatcagaattccgttatcacgcaaccaggtgaagagatagttttggcccaggccgagcactttggcatagttgccgattagaaccccgctggcggtagcaacgcgttcagcgaattcgactttaggtgcatccataagcattttttgctccagccgttgcttttgctctgccaggtcggcagccaaacggagagcttcagggagactctgcggaatagcaggttgtaatcttccggttcgatagtcgataaatgtctggtttaccttcagccgaaacgcgggagaaatccagcctgcgtactccacagcgagcaattcatgggcaaaagtgccgccgccacggccttcgacctggcagtagtggatatccacctctacttcagacttacagcttcccaccttgacatactgcagcctggcagtgatgtcgttgcactcaggctcctcacatgtgtcacagcaggtgcctggaattttcataattttacctccctcagccagacacttgtgttcatcaaagggtgggcagcctgtgaccctcttctcccagaagtactctcctctctcattgaccttgcagaagtgagtatcacagccatcctggagcgtctcatcacgcttcagtgtcatgatctgtcctcctcttagctgaatggtgcaagccgtaggcaaacatctcccacaacattcacctgtgttattttcttccttgtaacccttcat

SEQ ID NO: 10391 - DNA, 2259 bp, Homo sapiens
  SIMILAR (1)..(888): 1001254mologous to Cloning vector pZC320 SopA,accession number U26464,Smith-Waterman Score=1548.
atgaaactcatggaaacacttaaccagtgcataaacgctggtcatgaaatgacgaaggctatcgccattgcacagtttaatgatgacagcccggaagcgaggaaaataacccggcgctggagaataggtgaagcagcggatttagttggggtttcttctcaggctatcagagatgccgagaaagcagggcgactaccgcacccggatatggaaattcgaggacgggttgagcaacgtgttggttatacaattgaacaaattaatcatatgcgtgatgtgtttggtacgcgattgcgacgtgctgaagacgtatttccaccggtgatcggggttgctgcccataaaggtggcgtttacaaaacctcagtttctgttcatcttgctcaggatctggctctgaaggggctacgtgttttgctcgtggaaggtaacgacccccagggaacagcctcaatgtatcacggatgggtaccagatcttcatattcatgcagaagacactctcctgcctttctatcttggggaaaaggacgatgtcacttatgcaataaagcccacttgctggccggggcttgacattattccttcctgtctggctctgcaccgtattgaaactgagttaatgggcaaatttgatgaaggtaaactgcccaccgatccacacctgatgctccgactggccattgaaactgttgctcatgactatgatgtcatagttattgacagcgcgcctaacctgggtatcggcacgattaatgtcgtatgtgctgctgatgtgctgattgttcccacgcctgctgagttgtttgactacacctccgcactgcagtttttcgatatgcttcgtgatctgctcaagaacgttgatcttaaagggttcgagcctgatggcacacaggcaaagatgacacaaggtgaacgcaggaacgtccccaaacaagaatacatatctcgtgggtatttcacccttaaagaaaccgtgatcgatacaagcaatggaagcaggatttctttcacgactcgtataaccggcaaagacgtagtaagaaccaccagcattgtaatgctggctaaagtcactttcctgagctgtataacgatgagcgattttactttttctggctatgaattggcctgctttgtaacacactccggtctatcccgtagcgccgggcatatcctgtcgcaatgtgcaaatctcgcggcaacaaccagtgaatacttcattcacaagcctcaccgcctgatcgcggcagaaactggttatagccaatcaaccgtcgttcgtgcattccgtgaagctgtaaacaaaggaattctgtctgtagagattgttatcggcgatcaccgtgaacgtcgcgctaacctgtaccggtttacaccatcctttttggccttcgcacaacaagccaaaaatgcgctgatagaaagcaaattaaagatctcttcagcggcaaccaagtgtgacaatctaaaaacttgtcacacttcacatggatctgtcatggcggaaacagcggttatcaatcacaagaaacgtaaaaatagcccgcgaatcgtccagtcaaacgacctcactgaggcggcatatagtctctcccgggatcaaaaacgtatgctgtatctgttcgttgaccagatcagaaaatctgatggcaccctacaggaacatgacggtatctgcgagatccatgttgctaaatatgctgaaatattcggattgacctctgcggaagccagtaaggatatacggcaggcattgaagagtttcgcggggaaggaagtggttttttatcgccctgaagaggatgccggcgatgaaaaaggctatgaatcttttccttggtttatcaaacgtgcgcacagtccatccagagggctttacagtgtacatatcaacccatatctcattcccttctttatcgggttacagaaccggtttacgcagtttcggcttagtgaaacaaaagaaatcaccaatccgtatgccatgcgtttatacgaatccctgtgtcagtatcgtaagccggatggctcaggcatcgtctctctgaaaatcgactggatcatagagcgttaccagctgcctcaaagttaccagcgtatgcctgacttccgccgccgcttcctgcaggtctgtgttaatgagatcaacagcagaactccaatgcgcctctcatacattgagaaaaagaaaggccgccagacgactcatatcgtattttccttccgcgatatcacttccatgacgacaggatag

SEQ ID NO: 10392 - DNA, 751 bp, Homo sapiens
  SIMILAR (1)..(348): 991254mologous to Escherichia coli 37KD protein, similar to YI22-ECOLI,accession number D85613,Smith-Waterman Score=572.
atgattgatgtcttagggccggagaaacgcagacggcgtaccacacaggaaaagatcgcaattgttcagcagagctttgaaccggggatgacggtctccctcgttgcccggcaacatggtgtagcagccagccagttatttctctggcgtaagcaataccaggaaggaagtcttactgctgtcgccgccggagaacaggttgttcctgcctctgaacttgctgccgccatgaagcagattaaagaactccagcgcctgctcggcaagaaaacgatggaaaatgaactcctcaaagaagccgttgaatatggacgggcaaaaaagtggatagcgcacgcgcccttattgcccggggatggggattgcacgtcattctcagacgaaccgatgactggatggatggccgccgcagtcgtcacactgatgatacggatgtgcttctccgtatacaccatgttatcggagagctgccaacgtatggttatcgtcgggtatgggcgctgcttcgcagacaggcagaacttgatgggatgcctgcgatcaatgcccaacgtgtttaccggatcttgcgccaaaatggccctgttgcttgagcgaaaacctgttggaccgccatcgtttgggaattcaactttgggccccggagaccaaagattccatctcaagaaaaagaaagagaaagcggtgtggttaaatttcccagcgtttagagattcttttttttcggggtctatgtctgcgcgtgacttct

SEQ ID NO: 10393 - DNA, 1422 bp, Homo sapiens
  SIMILAR (2893)..(3855): 591254mologous to Homo sapiens bA145E8.1 (KIAA1074),accession number AL162272,Smith-Waterman Score=910.
atggagtcttttcagtgtgccctaaaggaggtgggccttgatgagccactgagacttgctggcttcaggggagactcagcacattaccagctctggtggctacagggcaaaagtaaagaggcaaaagcagaggcaaaagtaaaggcgactttgtcttgcaccttaggtaccaaaaccgccacagtgttggaagttctggccagggcaatcaggcaggagaaggaaataaagggtattcaattaggaaaagaggaagtcaaattgtccctgtttgcagacgacatgattgtttatctagaaaaccccatcgtctcagcccaaaatctccttaagctgataagcaacttcagcaaagtctcaggatacaaaatcaatgtacaaaaatcacaagcattcttatacaccaacaacagacaaacagagagccaaatcatgagtgaactcccattcacaattgcttcaaagagaataaaatacctaggaatccaacttacaagggatgtgaaggacctcttcaaggagaactacaaaccactgctcaaggaaataaaagaggatacaaacaaatggaagaacattccatgctcatgggtaggaagaatcaatatcgtgaaaatggccatactgcccaagggaatttacagattcaatgccatccccatcaagctaccaatgattttcttcacagaattggaaaaaactactttaaagttcatatggaaccaaaaaagagcccgcatcgccaagtcaatcctaagccaaaagaacaaatctggaggcatcacactacctgacttcaaactatactacaaggctacagtaaccaaaacagcatggtactggtcccaaaacagagatatagatcaatggaacagaacagagccctcagaaataacgccgcgtatctacaactatctgatctttgacaaacctgagaaaaacaagcaatggggaaaggattccctatttaataaatggtgctgggaaaactggctagccatatgtagaaagctgaaactggatcccttccttacaccttatacaaaaatcaattcaagatggattaaagatttaaacgttagacctaaaaccataaaaaccctagaagaaaacctaggcattaccattcaggacataggcgtgggcaaggacttcatgtccaaaacaccaaaagcaatggcaacaaaagccaaaattgacaaatgggatctaattaaactaaagagcttctgcacagcaaaagaaactaccatcagagtgaacaggcaacctacaacatgggagaaaattttcgcaacctactcatctgacaaagggctaatatccagaatctacaatgaactcaaacaaatttacaagaaaaaaacaaacaaccccatcaaaaagtgggcgaaggacatgaacagacacttctcaaaataa

SEQ ID NO: 10394 - DNA, 524 bp, Homo sapiens
  SIMILAR (1)..(423): 851254mologous to Escherichia coli 37KD protein, similar to YI22-ECOLI,accession number D85613,Smith-Waterman Score=576.
atgattgatgtcttagggccggagaaacgcagacggcgtaccacacaggaaaagatcgcaattgttcagcagagctttgaaccggggatgacggtctccctcgttgcccggcaacatggtgtagcagccagccagttatttctctggcgtaagcaataccaggaaggaagtcttactgctgtcgccgccggagaacaggttgttcctgcctctgaacttgctgccgccatgaagcagattaaagaactccagcgcctgctcggcaagaaaacgatggaaaatgaactcctcaaagaagacgatgaatttgggcgggcaaaaaagtggatagcgcaacgcgcccttattggccggggatggagagttagcttagtcaccgggttgagttgctgtggacgagcgacccatgtcggaatcccgcgcccacgtggctgcccaaagttccgagtctccgggctgcaggttctagtcacggaaccgagttgggagagtcataggggctgggacttggaggatcggctgag

SEQ ID NO: 10395 - DNA, 1005 bp, Homo sapiens
  SIMILAR (979)..(1656): 871254mologous to Homo sapiens unknown,accession number AF148856,Smith-Waterman Score=984.
atgattgatgtcttagggccggagaaacgcagacggcgtaccacacaggaaaagatcgcaattgttcagcagagctttgaaccggggatgacggtctccctcgttgcccggcaacatggtgtagcagccagccagttatttctctggcgtaagcaataccaggaaggaagtcttactgctgtcgccgccggagaacaggttgttcctgcctctgaacttgctgccgccatgaagcagattaaagaactccagcgcctgctcggcaagaaaacgatggaaaatgaactcctcaaagaagccgttgaatatggacgggcaaaaaagtggatagcgcacgcgcccttattgcccggggatggggattgcacgtcattctcagacgaacgcctgcaggtcctgtcaggtagtacgcctgatatgcctgtcgactttctaacctctgaccaaaaacagaattacggttgttatgctgcagaacctaatgacgtgcaactggcgcgctattttcatcttgatgaacgggatctggccttcattaaccaacgacggggcaaacataataggctgggcattgcgcttcagctcaccacagcccgttttctgggaacatttctgacggatttaactcaggttctgcctggtgttcaacattttgtcgcggtacagcttaatatccaccgtccagaagttctctcccgctatgctgaacgggacactacccttagagaacatactgcattaattaaggaatattacggctatcatgaatttggtgattttccatggtctttccgcctgaagcgtctgctatatacccgggcgtggctcagtaatgagcgaccgggtctgatgtttgattttgccactgcatggttgcttcaaaataaggtattactgcccggagcaaccacactagtacgtctcatcagtgaaattcgtgaaagggcaaatcagcggctgtggaaaaagctggccgcactgccgaacaaatggcaggcagctcaa

SEQ ID NO: 10396 - DNA, 1659 bp, Homo sapiens
  SIMILAR (1108)..(1656): 971254mologous to Escherichia coli 37KD protein, similar to YI22-ECOLI,accession number D85613,Smith-Waterman Score=971.
atggctcgcttccagctcagcgagaggtttgctttaatgctgccatatgagctgtttctccggcattgccagtacgaggtatatccaggcggccaacttggcaggctgttaatattctgccagtgttcaaagatatggtatatcaagatgttggtcaaaagctacaaagtaccttacggtgcggtactggcgaaaggcgatggcgaacaggttgctggcggcgaaaccgttgcaaactgggacccgcacaccatgccggttatcaccgaagtaagcggttttgtacgctttactgacatgatcgacggccagaccattacgcgtcagaccgacgaactgaccggtctgtcttcgctggtggttctggattccgcagaacgtaccgcaggtggtaaagatctgcgtccggcactgaaaatcgttgatgctcagggtaacgacgttctgatcccaggtaccgatatgccagcgcagtacttcctgccgggtaaagcgattgttcagctggaagatggcgtacagatcagctctggtgacaccctggcgcgtattccgcaggaatccggcggtaccaaggacatcaccggtggtctgccgcgcgttgcggacctgttcgaagcacgtcgtccgaaagagccggcaatcctggctgaagtcagcggtatcattccttcggtgaaacaaaatgtaacatctctatggacacgcacacggataacaactatgaacaaatcagggaaatacctcgtctggacagtgctctctgtaatgggagcatttgctctgggatacattgctttaaatcgtggggaacagatcaacgcgctgtggattgtggtggcgtcggtctgtatctatctgatcgcttaccgtttttatgggctgtatatcgccaaaaatgtgctggcggttgacccgacgcgtatgacgccagcggtgcgccataacgacgggctggactatgtgccgacggacaagaaagtgctgttcggtcaccattttgcggccattgccggagcaggtccgctggtggggccggtactggcggcgcaaatgggctacctgccggggatgatctggctgctcgctggggtggttctcgccgccagagtggccgtgaaagaaagcaatcagcgatggtgctctgacgggttcgagttctgctgtgataacggagagagactgcgtgtcacgttcgcgctggactgctgtgatcgtgaggcactgcactgggcggtcactaacggcggcttcaacagtgaaccagtacaggacgtcatgctgggagcggtggaacgccgcttcggcaacgatcttccgtcgtctccagtggagtggctgacggataatggttcatgctaccgggctaatgaaacacgccagttcgcccggatgttgggacttgaaccgaagaacacggcggtgcggagtccggagagtaacggaatagcagagagcttcgtgaaaacgataaagcgtgactacatcagtatcatgcccaaaccagacgggttaacggcagcaaagaaccttgcagaggcgttcgagcattataacgaatggcatccgcatagtgcgctgggttatcgctcgccacgggaatatctgcggcagcgggcttgtaatgggttaagtgataacagatgtctggaaatatag

SEQ ID NO: 10397 - DNA, 1662 bp, Homo sapiens
  SIMILAR (2401)..(3543): 941254mologous to Homo sapiens putative p150,accession number U93569,Smith-Waterman Score=1834.
atggagctgccaaggctggacttggcacagagaagaccacttctcaaccagcatgaatgggctgatgccttctggcagctcctccacctccaccaggcacctgcgggccggggcttcttggcagggattcacacaagtgccttgtgtttaaggaagagtaaattgagtaacttacgcgaataccagaatcgtattgcagatatcgcaaaacgctctaaagctgtgcttggctgggcaagcactgcgcagttcggtactgataaccaattcattaaagatgatgccgcgcgtgccgcatctatccttgaagctgcacgtaaagacccgggttttgcgggtatctttgataatgccaccgctcaaatcgctacagcgtgggcaagtgcactggctgactacgccgcagcacataaatctatgccgcgtccggaaattctggcctcctgccaccagacgctggaaaactgcctgatagagtccacccgcaatagcatggatgccactaataaagcgatgctggaatctgtcgcagcagagatgatgagcgtttctgacggtgttatgcgtctgcctttattcctcgcgatgatcctgcctgttcagttgggggcagctaccgctgatgcgtgtaccttcattccggttacgcgtgaccagtccgacatctatgaagtctttaacgtggcaggttcatcttttggttcttatgctgctggtgatgttctggacatgcaatccgtcggtgtgtacagccagttacgtcgccgctatgtgctggtggcaagctccgatggcaccagcaaaaccacaaccttcaagatggaagacttcgaaggccagaatgtaccaatccgaaaaggtcgcactaacataaacgttaaccgtagtaagtctgccaatgatgttagttcatcaaatgtggcaaagagggctggacactataggagctgtatctgcattagagtaagccacagcagtcattacaagcctcaccgcctgatcgcggcagaaactggttatagccaatcaaccgtcgttcgtgcattccgtgaagctgtaaacaaaggaattctgtctgtagagattgttatcggcgatcaccgtgaacgtcgcgctaacctgtaccggtttacaccatcctttttggccttcgcacaacaagccaaaaatgcgctgatagaaagcaaattaaagatctcttcagcggcaaccaaggttaaagctgttctcgctaagacattggctttatttaattttttatccacacccccatgtcaaaatgataccccctccccctgtcaggatgacgtggcaataaagaataagaagtcacaagttaaaaaaacaaaaagatcagtttccggcggtgccggaacaaccagcctcaaaaaattgacttcatggatcgctaaggcaaaagcaaaggctgacaatctgcggttatccaaaaaacgcactcaaaaacatgagttcaagcagaaagtagaggcggctgcgcggaaatatgcttacctgaagaacaagcgttcgcctgatattggcgggatatcaaacttcgataacctaccgcattgcatgacggtaaacgaagctcttaatgcggttttagccaaaaataaagataacgaacaatggggtataccggcaggattcagagggtaa

SEQ ID NO: 10398 - DNA, 1227 bp, Homo sapiens
  SIMILAR (436)..(987): 961254mologous to Cloning vector pSacBII SacB,accession number U09128,Smith-Waterman Score=931.
  misc_feature (1)...(1227): n = a,t,c or g
atgattgtatatctagaaaaccccattgtctcagcccaaaatctccttaagctgataagcaacttcagcaaagtctcaggatacaaaatcaatgtacaaaaatcacaagcattcttatacaccaataacagacaaacagagagccaaatcatgagtgaactcccattcacaattgcttcaaagagaataaaatacccaggaatccaacttacaagggacgtgaaggacctcttcaaggagaactacaaaccactgctcaaggaaataaaagaggatacaaacaaatggaagaacattccatgctcatgggtagaaagaatcaatattgtgaaaatggccatactgcccaagaccgcaaagaatggtccggttctcccacctttacattcggaggaaaaaattccgtttaattctccattgattattccgttaaacaattacggcaaccaaagcctgacaaaagcgcaggtaaatgtgtcaaaatctgatgacacactcaaaatcaacggagtggaagatcacaaatctatttttgacggagacggaaaaacatatcagaccgttcagcagtttatcgatgaaggcaattatacatccggcgacaaccatacgntgagagaccctcactacgttgaagacaaaggccataaataccttgtattcgaagccaacacgggaacagaaaacggataccaaggcgaagaatctttatttaacaaagcgtactacggcggcggcacgaacttcttctgtaaagaaagccagaagcttcagcagagcgctaaaaaacgcgatgctgagttagcgaacggcgccctcggtatcatagagttaaataatgattacacattgaaaaaagtaatgaagccgctgatcacttcaaacacggtaactgatgaaatagagcgcgcgaatgttttcaaaatgaacggcaaatggtacttgttcactgattcacgcggttcaaaaatgacgatcgatgggattttgccgatttcggaccccaccatcaaacaggattttcgcctgctggggcaaaccagcgtggaccgcttgctgcaactctctcagggccaggcggtgaagggcaatcagctgttgcccgtctcactggtgaaaagaaaaaccaccctggcgcccaatacgcaaaccgcctctccccgcgcgttggccgattcattaatgcagctggcacgacaggtttcccgactggaaagcgggcagtga

SEQ ID NO: 10399 - DNA, 2241 bp, Homo sapiens; identical to SEQ ID NO: 2293
  SIMILAR (250)..(759): 921254mologous to Homo sapiens p40,accession number U93564,Smith-Waterman Score=805.

SEQ ID NO: 10400 - DNA, 1254 bp, Homo sapiens
  SIMILAR (27)..(116): 431254mologous to Homo sapiens Granulin D,accession number R41882,Smith-Waterman Score=70.
  misc_feature (1)...(1254): n = a,t,c or g
atgagtgaactcccattcacaattgcttcaaagagaataaaatacctaggaatccaacttacaagggatgtgaaggacctcttcaaggagaactacaaaccactgctcaaggaaataaaagaggatacaaagaaatggaagaacattccatgctcatgggtaggaagaatcaatatcgtgaaaatggccatactgcccaaggcagacatctgtgaatcgcttcacgaccacgctgatgagctttaccgcagctgcctcgcgcgtttcggtgatgacggtgaaaactctgacacatgcagctcccggagacggtcacagcttgtctgtaagcggatgccgggagcagacaagcccgtcaggctgttcacgggatgttggcggacatttatcgactatcgaaccggaagattacaacctgctattccgcagagtctccctgaagctctccgtttggctgccgacctggcagagcaaaagcaacggctggagcaaaaaatgcttatggatgcacctaaagtcgaattnnntgaacgcgttgctaccgccagcggggttctaatcggcaactatgccaaagtgctcggcctgggccaaaactatctcttcacctggttgcgtgataacggaattctgatcgcaaccggtgaacgcaggaacgtccccaaacaagaatacatatctcgtgggtatttcacccttaaagaaaccgtgatcgatacaagcaatggaagcaggatttctttcacgactcgtataaccggcaaaggtcagcagtggctgatgaagcgattgcttgatgctggtgcggttgctggcgcctatatcgccgacatcaccgatggggaagatcgggctcgccacttcgggctcatgagcgcttgtttcggcgtgggtatggtggcaggccccgtggccgggggactgttgggcgccatctccttgcatgcaccattccttgcggcggcggtgctcaacggcctcaacctactactgggctgcttcctaatgcaggagtcgcataagggagagcgtcgaggagaacttctaaagatcgtcgttttgccaggtgaccacgttggtcaagaaatcacagccgaagccattaaggttcttaaagctatttctgatgttcgttccaatgtcaagttcgatttcgaaaatcatttaattggtggtgctgctatcgacctgcaggggggggggggaaagccacgttgtgtctcaaaatctctgatgttacattgcacaagataa

SEQ ID NO: 10401 - DNA, 1398 bp, Homo sapiens
  SIMILAR (250)..(939): 831254mologous to Homo sapiens p40,accession number U93569,Smith-Waterman Score=987.
gctgacgacctggcagagcataagcaacggctggagcaaacaatgcttatggatgcacctaaagtcgaattcgctgaacgcgttgctaccgacagcggggttctaatcggcgactatgccaaagtcgaaggccgtggcggcggcacttttgcccatgaattgctcgctgtggagtacgcaggctggatttctcccgcgtttcggctgaaggtaaaccagacatttatcgactatcgaaccggaagattacaacctgctattccgcagagtctccctgaagctctccgtttggctgccgacctggcagagcaaaagcaacggctggagcaaaaaatgcttatggatgcacctaaagtcgaattcgctgaacgcgttgctaccgccagcggggttctaatcggcaactatgccaaagtgctcggcctgggccaaaactatctcttcacctggttgcgtgataacggaattctgatcgcaaccggtgaacgcaggaacgtccccatactaggatacttatctcgtggggttttcacccttaaagggaccgtgatcgatacagcattggagcaggatttcttcacgactcgtttaccggtcgaaggccgtggcggcggcacttttgcccatgaattgctcgctgtggagtacgcaggctggatttctcccgcgtttcggctgaaggtaaaccagacatttatcgactatcgaaccggaagattacaacctgctattccgcagagtctccctgaagctctccgtttggctgccgacctggcagagcaaaagcaacggctggagccaaaaatgcttatggatgcacctaaagttcgattcgctgaacgcgttgctaccgccaacggggttctaatcggcaactatgccaaagtgctcggcctgggccaaaactatctcttcacctggttgcgtgataacggaattctgatcgcaaccggtgaacgcaggaacgtccccaaacaagaatacatatctcgtgggtatttcacccttaaagaaaccgtgatcgatacaagcaatggaagcaggatttctttcacgactcgtataaccggcaaaggtcagcagtggctgatgaagcgattgcttgatgctggtgtgctggatgacgtggcaataaagaataagaagtcacaagttaaaaaaacaaaaagatcagtttccggcggtgccggaacaaccagcctcaaaaaattgacttcatggatcgctaaggcaaaagcaaaggctgacaatctgcggttatccaaaaaacgcactcaaaaacatgagttcaagcagaaagtagaggcggctgcgcggaaatatgcttacctgaagaacaagcgttcgcctgatattggcgggatatcaaacttcgataacctaccgcattgcatgacg

SEQ ID NO: 10402 - DNA, 2985 bp, Homo sapiens
  SIMILAR (2223)..(658): 891254mologous to Homo sapiens putative p150,accession number U93568,Smith-Waterman Score=2308.
atggaagatgaaatgaatgaaatgaagcgagaagggaagtttagagaaaaaagaataaaaagaaatgagcaaagcctccaagaaatatgggactatgtgaaaagaccaaatctacatctgattggtgtacctgaaagtgatgtggagaatggaaccaagttggaaaacactctgcaggatattatccaggagaacttccccaatctagcaaggcaggccaacgttcagattcaggaaatacagagaacgccacaaagatactcctcgagaagagcaactccaagacacataattgtcagattcaccaaagttgaaatgaaggaaaaaatgttaagggcagccagagagaaagggcactgtaactctggcaaaagtcacagatccctttgggaacaaaacaagggaatatttaccacatgtatttgtgatgatgccgaggacttacagtctccttcaactgctggaccctggtttggggttctttataccaaaggtggaccctaccctcaggaagacatattcagtgaagaagttcatacaggccctaagttgaggaagaaaattcaagagtaccagttaacaagcaaatggtcaaaaagtgatgttcaggtttctgtggagaggagaatggctggaggaaatccaaaccagtgccatattggggaagttctcctggatggattcacagctgaattctaccggaggtacaaggaggaactggtaccattccttctgaaactattccaatcaatagaaaaagagggaatcctccctaactcattttatgaggccagcatcattctgatacaaaagccaggcagagacacaacaaaaaaagagaattttagaccaatatccttgatgaacattgatgcaaaaatcctcaataaaatactggcaaaacgaatccagcagcacatcgaaaagcttatccaccatgatcaagtgggcttcatccctgtgatgcaaggctggttcaatatatgcaaatcaataaatgtaatccagcatataaacagagccaaagacaaaaaccacatgattatctcaatagatgcagaaaaagcctttgataaaattcaacaacccttcatgctaaaaactctcaataaattaggtattgatgggatgtatttcaaaataataagagctatctatgacaaacctacagccaatatcatactgaatgggcaaaaactggcagcattccctttgaaaactggcacaagacagggatgccctctctcaccactcctattcaacatagtgttggaagtcctggccagggcaatcaggcaggagaaggaaataaagggtattcaattaggaaaagaggaagtcaaattgtccctgtttgcagatgacatgatcgtatatctagaaaaccccattgtctcagcccaaaatctccttaagctgataagcaacttcagcaaagtctcaggatacaaaatcaatgtacaaaaatcacaagcattcttatacaccaataacagacaaacagagagccaaatcatgagtgaactcccattcacaagtgcttcaaagagaataaaatacctaggaatccaacttacaagggatgtgaaggacctcttcaaggagaactacaaaccactgctcaaggaaataaaagaggatacaaacaaatggaagaacattccatgctcatgggtaggaagaatcaatatcgtgaaaatggccatactgcccaaggtaatttatagattcaatgccatccccatcaagctaccaatgcctttcttcacagaattggaaaaaactactttaaagttcatatggaaccaaaaaagagccctcatcaccaagttaatcctaagccaaaagaacaaagctggaggcatcacactacctgactttaaactatactacaaggctacagtaaccaaaacagcatggtactggtaccaaaacagagataaagatcaatggaacagaacagagccctcagaaataacgccgcatatctacaattatctgatctttgacaaacctgagaaaaacaagcaatggggaaaggattctctatttaataaatggtgctgggaaaacgggctagccatatgtagaaagctgaaactggatcccttccttacaccttatacaaaaattaattcaagatggattaaagacttaaacgttagacctaaaaccagaaaaaccctagaagaaaacctaggcattaccattcaggacataggcatgggcaaggacttcatgtctaaaacaccaaaagcaatggcaacaaaagacaaaatagacaaatgggatctaattaaactaaagagcttctgcacagcaaaagaaactaccatcagagtgaacaggcaacctacaaaatgggagaaaattttcgcaacctactcatctgacaaagggctaatatccagaatctacaatgaactcaaacagatttacaagaaaaaaacaaacaaccccatcaaaaagtgggcgaaggacatgaacagacacttctcaaaagaagacatttatgcagccaaaaaacacatgaaaaaatgctcatcatcactggccatcagagaaatgcaaatcaaaaccacaatgagataccatctcacaccagttagaatggcaatcattaaaaagtcaggaaacaacagcactattcacagtagcaaagacatggattcaacccaaatgtgcatcaatgatacactgtatgaagaaagtgtagaacatatacaccatgaaatacaatccagccataaaaaaggagttcacatcctttgcagcaatatggatggagctgaaagccactttcctaagcaaactaatgcaagaacagaaagccaaatactgcatgttctcacttggctttcttttaacccaccagttacaattactaaagttcatgaaaatgtctaccagccaagtaccactcgtaacactgaaacaacgcagggagtcccaagaaccagggaagaccaagaagcatatttataa

SEQ ID NO: 10403 - DNA, 2277 bp, Homo sapiens; identical to SEQ ID NO: 5445
  SIMILAR (445)..(1854): 851254mologous to Homo sapiens putative p150,accession number U93563,Smith-Waterman Score=2042.

SEQ ID NO: 10404 - DNA, 1064 bp, Homo sapiens
  SIMILAR (409)..(792): 901254mologous to Escherichia coli ORF 2 (AA 1-301),accession number V00279,Smith-Waterman Score=609.
atgaaaacgctgctgattattgacgctaatctcggcacgcgcctatatggcgaagaccctgctggcgcggcggcgcgaaaagcaaaactggaaatcatcgacaatccgaacgacgctgaaatggcgattgttctcggtgattccatcccgaacgacagcgcgctgaacggtaaaaatgtctggctgggcgatatttcccgggcagttgcgcaccctgagctgttcctgagtgaacgcaaaggccatgcgaaaccttacactgcgccggtcgctgcgacagcaccagttggcgccagcggtccgaaacgcgtagttgcggtgactgcttgcccgactggcgtagcacacacctttatggcgctgaagccattgaaaccgaagcgaaaaaacgtggctgggatccccgataccggtcagtattgtgaaacagtacagacgtcatgctgggagcggtggaaacgccgcttcggcaacgatcttccgtcgtctccagtggagtggctgacggataatggttcatgctaccgggctaatgaaacacgccagttcgcccggatgttgggacttgaaccgaagaacacggcggtgcggagtccggagagtaacggaatagcagagagcttcgtgaaaacgataaagcgtgactacatcagtatcatgcccaaaccagacgggttaacggcagcaaagaaccttgcagaggcgttcgagcattataacgaatggcatccgcatagtgcgctgggttatcgctcgccacgggaatatctgcggcagcgggcttgtaatgggcgcgccggagttttatccagcgggactctagagatccccgataccgagctccgattcgaatccatccgctgcccggtgcaaatcatctccgccagtgataatctgctggtgccaacagcatgttccagtgaacttcatgccgccctgcccgatagccagaaaatggtgatgccctatgccggacacgcctgcaacgtgaccgatcccgaaacgtttaatgctctgttactcaacgggcttgccagcctgttacatcaccgtgaagccgccct

SEQ ID NO: 10405 - DNA, 1827 bp, Homo sapiens; identical to SEQ ID NO: 5436
  SIMILAR (247)..(1563): 961254mologous to Homo sapiens unknown protein,accession number M22334,Smith-Waterman Score=2229.

SEQ ID NO: 10406 - DNA, 1662 bp, Homo sapiens
  SIMILAR (831)..(157): 931254mologous to Escherichia coli 37KD protein, similar to YI22-ECOLI,accession number D85613,Smith-Waterman Score=1121.
acagcgcggatgagtcagtgtttcatcgcgtttcgcatagccgttttcatcgagctgatagttccaggacgatttttcgtattgacgtttttcagcgtcgtagccgctgaacagaccgtcttcgaaagcaaaatcattgatgaacttttgtaaggagcttatgaaggaaacaagcccgtgccgcagatattcccgtggcgagcgataacccagcgcactatgcggatgccattcgttataatgctcgaacgcctctgcaaggttctttgctgccgttaacccgtctggtttgggcatgatactgatgtagtcacgctttatcgttttcacgaagctctctgctattccgttactctccggactccgcaccgccgtgttcttcggttcaagtcccaacatccgggcgaactggcgtgtttcattagcccggtagcatgaaccattatccgtcagccactccactggagacgacggaagatcgttgccgaagcggcgttccaccgctcccagcatgacgtcctgtactgtttcactgttgaagccgccggtagtgaccgcccagtgcagtgcctcacgatcacagcagtccagcgcgaacgtgacacgcagtctctctccgttatcacagcagaactcgaacccgtcagagcaccatcgctgattgctttctttcacggccactctgcctgtatgtgcccgtttcgatggcggtacagcaggttttcgctcaagcaacagcgcattctggcgcatgatccggtaaacacgtttggcattgatcgcaggcatacccatcaagttctgcctgtctgcgaagcaacgcccatacccgacgataaccatacgttggcagctttccgataaacatggggtatacggagaaggcacatccggaatcaatagtggggacgaactggcggggggccatatcattccaagttcatcgggttcgtgttgggaaaagtgaccgtggccaaatgttttgccatcgccaggacgttccggcagcatatcaacgccgatgatccgttttgcaccgcgacctttcgccagcatcatcgccatcatgccgactgcgcccagaccgaccaccagcacgttatcactgccggaaacttcgccgcgcaaaattccttcatacgctgtaccaacgccgcaactgataaacgcaccatcttcgtagctcagcgcatccggcaggaggatcagatctttgtcttccgccagcaagtattcggcatgaccgccgtcacgctgccagccgtaagccgcttttccttcgccagtacaagaaataggaaaaccgcgacggcagttcgggcaaaaaccacagccagaaatgtgatacaccagcacgcggtcgccctctttaaaatggcggcagccttgccccatcgccacaatctgcccgcacggttcatgaccgttgataaagccctggtataacggtttatcgggtgccgccgctgtggcacggtgttgatgatagatatagtggacatcgcttccgcaaatcccggaggatttcattttgatcagtacctggttaatccccggcgtcggcaccgcaacttcccgcagatcgacggtcgaatttcctggtaaataagctgccagcatcgttttcataaatccctcattaacaatacgattaattttcat

SEQ ID NO: 10407 - DNA, 1992 bp, Homo sapiens
atggccgctttcatggccctacaacatgagccaccattgcctatttggtccttggataaagctaatgttttggcctcttcaagattatggagaaaaactgtggaggaaaccatcaagaacgaattccctacattgaaggttcaacatcaattgattgattctgccgccatgatcctagttaagaacccaacccacctaaatggtattataatcaccagcaacatgtttggtgatatcatctccgatgaagcctccgttatcccaggttccttgggtttgttgccatctgcgtccttggcctctttgccagacaagaacaccgcatttggtttgtacgaaccatgccacggttctgctccagatttgccaaagaataaggtcaaccctatcgccactatcttgtctgctgcaatgatgttgaaattgtcattgaacttgcctgaagaaggtaaggccattgaagatgcagttaaaaaggttttggatgcagtttttagactagtcattggagaacagatgattgatgtcttagggccggagaaacgcagacggcgtaccacacaggaaaagatcgcaattgttcagcagagctttgaaccggggatgacggtctccctcgttgcccggcaacatggtgtagcagccagccagttatttctctggcgtaagcaataccaggaaggaagtcttactgctgtcgccgccggagaacaggttgttcctgcctctgaacttgctgccgccatgaagcagattaaagaactccagcgcctgctcggcaagaaaacgatggaaaatgaactcctcaaagaagccgttgaatatggacgggcaaaaaagtggatagcgcacgcgcccttattgcccggggatggggaacgaaccgatgactggatggatggccgccgcagtcgtcacactgatgatacggatgtgcttctccgtatacaccatgttatcggagagctgccaacgtatggttatcgtcgggtatgggcgctgcttcgcagacaggcagaacttgatggtatgcctgcgatcaatgccaaacgtgtttaccggatcatgcgccagaatgcgctgttgcttgagcgaaaacctgctgtaccgccatcgaaacgggcacatacaggcagagtggccgtgaaagaaagcaatcagcgatggtgctctgacgggttcgagttctgctgtgataacggagagagactgcgtgtcacgttcgcgctggactgctgtgatcgtgaggcactgcactgggcggtcactaccggcggcttcaacagtgaaacagtacaggacgtcatgctgggagcggtggaacgccgcttcggcaacgatcttccgtcgtctccagtggagtggctgacggataatggttcatgctaccgggctaatgaaacacgccagttcgcccggatgttgggacttgaaccgaagaacacggcggtgcggagtccggagagtaacggaatagcagagagcttcgtgaaaacgataaagcgtgactacatcagtatcatgcccaaaccagacgggttaacggcagcaaagaaccttgcagaggcgttcgagcattataacgaatggcatccgcatagtgcgctgggttatcgctcgccacgggaatatctgcggcagcgggcttgtaatggtcaggcaccgtgtatgaaatctaacaatgcgctcatcgtcatcctcggcaccgtcaccctggatgctgtaggcataggcttggttatgccggtactgccgggcctcttgcgggatatcgtccattccgacagcatcgccagtcactatggcgtgctgctagcgctatatgcgttgatgcaatttctatgcgcacccgttctcggagcactgtccgaccgctttggccgccgcccagtcctgctcgcttcgctacttggagccactatcgactacgcgatcatggcgaccacacccgtcctgtggatctacccactagtcaattcaccatcttgttga

SEQ ID NO: 10408 - DNA, 1936 bp, Homo sapiens
  SIMILAR (1)..(711): 1001254mologous to Escherichia coli Aminopeptidase n (EC 3.4.11.2) (alpha-aminoacylpeptide hydrolase),accession number D90732,Smith-Waterman Score=1195.
atggctgaattgttcgatatcatcgacccgattgctattgccgaagtacgcgaagcactcactcgtactctggcgactgaactggcggatgagctactggctatttacaacgcgaattaccagagcgagtaccgtgttgagcatgaagatattgcaaaacgcactctgcgtaatgcctgcctgcgtttcctcgcttttggtgaaacgcatctggctgatgtgctggtgagcaagcagttccacgaagcaaacaatatgactgatgcgctggcggcgctttctgcggcggttgccgcacagctgccttgccgtgacgcgctgatgcaggagtacgacgacaagtggcatcagaacggtctggtgatggataaatggtttatcctgcaagccaccagcccggcggcgaatgtgctggagacggtgcgcggcctgttgcagcatcgctcatttaccatgagcaacccgaaccgtattcgttcgttgattggcgcgtttgcgggcagcaatccggcagcgttccatgccgaagatggcagcggttacctgttcctggtggaaatgcttaccgacctcaacagccgtaacccgcaggtggcttcacgtctgattgaaccgctgattcgcctgaaacgttacgatgccaaacgtcaggagaaaatgcgcgcggcgctggaacagttgaaagggctggaaaatctctctggcgatctcacccggtcagccatcgctaacgcttcgctcacatcattgcgtccccacctggaagatgcctatatctccagccagcgtaatcatctggaaaacgttgccaacgcgctcgataagcatttgcagtataacgtcgactacggcgagtggtgcaatggtaaacgcctgaccgggatcagttttgctggcacgctgtttgtgctcaaactggggttggccttcggcggcgctcttatcggctggatgctggcttatggcggatatgatgcggcagaaaaagcgcagaacagcgccacgattagcatcattattgcgctattcacgattgttccggcgatctgttatttgctgagcgcgattatcgctaaacgctactactcactcacgacgcacaatctgaaaaccattatggaacagctggctcagggtaaacgccgttgccagcaacaattcacctctcaagaattgcacgtcattctcagacgaaccgatgactggatggatggccgccgcagtcgtcacactgatgatacggatgtgcttctccgtatacaccatgttatcggagagctgccaacgtatggttatcgtcgggtatgggcgctgcttcgcagacaggcagaacttgatggtatgcctgcgatcaatgccaaacgtgtttaccggatcatgcgccagaatgcgctgttgcttgagcgaaaacctgctgtaccgccatcgaaacgggcacatacaggcagagtggccgtgaaagaaagcaatcagcgatggtgctctgacgggttcgagttactgctgtgataacggagagagactgcgtgtcacgttcgcgctggactgctgtgatcgtgaggcactgcactgggcggtcactaccggcggcttcaacagtgaaacagtacaggacgtcatgctgggagcggtggaacgccgcttcggcaacgatcttccgtcgtctccagtggagtggctgacggataatggttcatgctaccgggctaatgaaacacgccagttcgcccggatgttggacttgaacctacatgaactagggcggcctgccaagagagtcgttgtaatctcttactccggggatcgtcctggaaataatcggggtatggatgcaaaggtggagtctggaatgtcggttggcaataccctgtatattcggctggctaccacgggttgttggcgaagaatcgggggcatgacaccggttccggtgtga

SEQ ID NO: 10409 - DNA, 1662 bp, Homo sapiens
  SIMILAR (922)..(1656): 971254mologous to Escherichia coli DNA recombinase,accession number M64367,Smith-Waterman Score=1212.
atgcagcaaaccgttcatgccgaacaaagcgcgatcagccacgcctggttgagtggtgaaaaagcgcttgcagccatcaccgttaactacacgccttgtggtcactgccgtcagtttatgaatgaactgaacagcggtctggatctgcgtattcatctgccgggccgcgaggcacacgcgctgcgtgactatctgccagatgcctttgggccgaaagatctggagattaaaacgctgctcagtagtaccatgatgaaacgaatgtgtttctccgtatactccatctgccaaacgtatggttatcgtcgggtatgggaactgattcgcagacaggcagaattgaatggaatgcttgcgatcaatgccaaacgtgtttaccggatcatgcgccagaatgcgatgttgcttgagcgaaaacttgctgtaccgccatcgaaacgggcacatacaggcagagtggccgtgaaagaaagcaatcagcgatggtgctctgacgggttcgagttctgctgtgataacggagagagactgcgtgtcacgttcgcgctggactgctgtgatcgtgaggcactgcactgggcggtcactaccggcggcttcaacagtgaaacagtacaggacgtcatgctgggagcggtggaacgccgcttcggcaacgatcttccgtcgtctccagtggagtggctgacggataatggttcatgctaccgggctaatgaaacacgccagttcgcccggatgttgggacttgaaccgaagaacacggcggtgcggagtccggagagtaacggaatagcagagagcttcgtgaaaacgataaagcgtgactacatcagtatcatgcccaaaccagacgggttaacggcagcaaagaaccttgcagaggcgttcgagcattataacgaatggcatccgcatagacgggccggagcacagcgttttcatgcccagccgctgagcgccaatgacacgctgaaaaatatactcctcgccgccttaccgttcaagccaacgggcgcacaggcacgcgtagtggcggagatcgagcgcgatatggcgctggatgtgccgatgatgcgtctggtgcagggcgatgtaggttccggtaaaacgctggtcgccgccctcgccgcgttgcgtgcgattgcccacggcaaacaggtagcattgatggcaccaaccgaattactcgccgagcagcacgccaataacttccgcaactggtttgcaccgctcggtatcgaagtgggctggctcgccggtaagcagaaaggtaaagcacggctggcacagcaggaagccatcgccagcggtcaggtgcagatgattgtcggtacacacgccatcttccaggaacaggtgcagtttaacggcctggcgctggtgattatcgacgaacagcatcgttttggcgtgcatcagcgtctggcattgtgggagaaaggccagcagcagggcttccatccgcatcagttgatcatgaccgccacgccgatcccccgcacgctggcaatgactgcgtatgccgatctcgatacctcggtgatagatgagctgccgccaggccgcacgccagtgactacggtcgctattcctgatacccgccgtaccgacatcattgaccgcgtgcaccacgccatgcatattgtaaccgaaaaataa

SEQ ID NO: 10410 - DNA, 990 bp, Homo sapiens
  SIMILAR (100)..(690): 901254mologous to Escherichia coli ORF 2 (AA 1-301),accession number V00279,Smith-Waterman Score=927.
atgttatcggagagctgccaacgtatggttatcgtcgggtatgggcgctgcttctcagacaggcagaacttgatggtatgcctgcgatcaatgccaatacgtgtttaccggatcatgcgccagaatgcgctgttgcttgagcgaaaacctgctgtaccgccatcgaaacgggcacatacaggcagagtggccgtgaatgaaagcaatcagcgatgttctgctgtgataacggacagatcactgcgtgtcacgttcgcgctggactgctgtgatcgtgaggcactgcactgggcggtcactaccggcggcttcaacagtgaaacagtacaggacgtcatgctgggatcggtggaacgccgcttcggcaacgatcttccgtcgtctccagtggagtggctgacggataatggttcatgctaccgggctaatgaaacacgccagttcgcccggatgttgggacttgaaccgaagaacacggcggtgcggagtccggagagtaacggaatagcagagagcttcgtgaaaacgataaagcgtgactacatcagtatcatgcccaaaccagacgggttaacggcagcaaagaaccttgcagaggcgttcgagcattataacgaatggcatccgcctagtgcgctgggttatcgatcgccacgggaatatctggggcagcgggttgtactgggcatgccatcggtagcggaccatcttcagcgtttttcggcgcaccggtacgcagggtttcacgcacatcggtcacagcaaaagcatgtccacgcggcttgttgtaatcgcgcgagaagggataccccgcccacaggatcaccagccgtggatcttccgccagggcgtcaacacgctctgactgttccgaggtggctttccaggagagatattgatcgggatgctgcggggcaaaggtttcattcttcgcttccacagttacaggttttgcgggagcagccgtttgttcagcgtgaacagaagtga

SEQ ID NO: 10411 - DNA, 1281 bp, Homo sapiens
  SIMILAR (271)..(684): 981254mologous to Escherichia coli 37KD protein, similar to YI22-ECOLI,accession number D85613,Smith-Waterman Score=731.
atgggaggtctaggaggtgcagtggttcgtcggcttggagttgcacttcaggattgctgctccttgccagcaacggcgcaaagcttgacggcggatgagtttgacgagctgacagcagtaggcttcagcagtgtggtaaggcgtgtcggtagtgggctgtggtcctatgtgctggaaggtttctgcggtgaacgtcttgtgaaatgtgagaaatgtgttgtgattcgtgagatgggttgtgttgctaaagttgtaaatttgcatttaaatgataacggagagagactgcgtgtcacgttcgcgctggactgctgtgatcgtgaggcactgcactgggcggtcactaccggcggcttcaacagtgaaacagtacaggacgtcatgctgggagcggtggaacgccgcttcggcaacgatcttccgtcgtctccagtggagtggctgacggataatggttcatgctaccgggctaatgaaacacgccagttcgcccggatgttgggacttgaaccgaagaacacggcggtgcggagtccggagagtaacggaatagcagagagcttcgtgaaaacgataaagcgtgactacatcagtatcatgcccaaaccagacgggttaacggcagcaaagaaccttgcagaggcgttcgagcattataacgaatggcatccgcatacaaggctactggagctaacttcagaacggcaggatttattggaaaatatgcagcaaatcaaagaattaaaggaactattgaaaagcaaggatcagaaatgtggtgctggcgacccagctggtctgcagctcttgagagttgacaggacaccttaccagccccctggatccacttccactggggaggggcagcttcccaaagctgactggggttctatgaccaggaagtggggggctattggacaggcaaaacgatgtctgccacatcccttcatgcaacctacactcatgccgatcagaggatccccaagaaaatctgctggtggagatacaatggtgctcatttatcagcgcatgatgctgcagtcgttaagtaatgaaggtgttctttattatgaaggagcacttgataatctttctgaagaattatcgcttagcttggatgaagatgtcgaaaaaatacaaatgactttagctttcttttcaaaatatggattgatacaaattgatgaagaacaaaatgccgaaatgttacaagttcatgcgattgtagaccaagaaacagactgggctagatataagagaaatcaaagttattttgcatga

SEQ ID NO: 10412 - DNA, 1651 bp, Homo sapiens
  SIMILAR (620)..(979): 1001254mologous to Escherichia coli 37KD protein, similar to YI22-ECOLI,accession number D85613,Smith-Waterman Score=657.
atgaagagacagcggtaccctacggtatccgtatcggcctctattctcgtgaataatctcactaatacgctttttaacggccgcctacttgtcaagcttgctgatgcaagcatgcatgcctgcaggtccgtttcccggcaacatggtgtagcacccagccagttatttctctggcgtaagcaataccaggaaggaagtcttactgctgtcgccgccggagaacaggttgttcctgcctctgaacttgctgccgccatgaagcagattaaagaactccagcgcctgctcggcaagaaaacgatggaaaatgaactcctcaaagaagccgttgaatatggacgggcaaaaaagtggatagcgcacgcgcccttattgcccggggatggggattgcacgtcattctcagacgaaccgatgactggatggatggccgccgcagtcgtcacactgatgatacggatgtgcttctccgtatacgccatgttatcggggagctgccaacgtatggttatcgtcgggtatgggcgctgcttcgcacacaggcagaacttgataggtatgcctgcgatcaatgccaaacgtgtttaccggatcatgcgccagaatgcgctgttgctttgagcgaaaacctgctgtaccgccatcgaaacgggcacatacaggcagagtggccgtgaaagaaagcaatcagcgatggtgctctgacgggttcgagttctgctgtgataacggagagagactgcgtgtcacgttcgcgctggactgctgtgatcgtgaggcactgcactgggcggtcactaccggcggcttcaacagtgaaacagtacaggacgtcatgctgggagcggtggaacgccgcttcggcaacgatcttccgtcgtctccagtggagtggctgacggataatggttcatgctaccgggctaatgaaacacgccagttcgcccggatgttgggacttgaaccgaagaacacggcgtgctactacggtcccagggatccgcagcccgtacgctcggctgcggccacgcgcacggcaccgcaggaccaccggagcagcgctgatacccgccggcggctcagcccccgcagacagccgccgcggtcctatttcgggatcgtgcgcgaccaggaaccacgccgagcgaaacgcccgcgccttcaccgagctcgcgtagacgcacgcggacacggcaagggcgcgcagcggcctcggcagcccagtctgcacattggacttcccagacgagagcccgccgcagcgcggggtcagaacggcggaccacgagacccaaacgctgccggggagaacaccggacggcccagacaccagccacagaccaaaagccagagcacgcgccgtgcccacactaaagcgccggcgaacggcgtccacttaactcgatgtcgcgccgtggccatccagtcggacgaatcccaaaacttcaggccagatcactcgagccctccaccactaccgccatcacgacttacgtcagggtacaacgccaaatccggaggcgccaccgcatacttatccctgggaacttggccaggtccaggaggcactgggctccatccccccacagggcgcgggcctcaaatggtggctgctgattggttagaacgtcgggactgtttagatgggtga

SEQ ID NO: 10413 - DNA, 1908 bp, Homo sapiens
  SIMILAR (436)..(1821): 941254mologous to Homo sapiens putative p150,accession number U93572,Smith-Waterman Score=2296.
atggataaattcctcgacacatacatcctcccaagactaaaccaggaagaagttgaatctctgaacagaccaataacaggctctgaaattgaggcaataatcaatagcttaccaaccaaaaaaagtccgggaccagatggattcacagccgaattctaccagagttacaaagaggagctggtaccattccttctgaaactattccaatcaatagaaaaagagggaatcctccctaactcattttatgaggccagcatcatcctgataccaaagcctggcagagacacaaccaaaaaggagaaatttagaccaatatccttgatgaacatcgatgtaaaaatcctcaataaaatactggcagaccaaatccagcagcacatcaaaaagcttatccaccatgatcaagtgggcttcatccctgggatgcaaggctggttcaacatattgttggaagttctggccagggcaatcaggcaggagaaggaaataaagggtattcaattaggaaaagagaaagtcaaattgtccctgtttgcagatgacatgattgtgtatctagaaaaccccatcgtctcagccccaaatctcctcaagctgataagcaagttcagcaaagtctcaggatacaaaatcaatgtacaaaaatcacaagcattcttatacaccaataacagacaaacagagagccaaatcatgagtgaactcccattcacaactgcttcaaagagaataaaatacctaggaatccaacttacaagggatgtgaaggacctcttcaaggagaactacaaaccactgctcaatgaaattaaagaggatacaaagaaatggaagaacattccatgctcatgggtaggaagaatcaatatcgtgaaaatggccatactgcccaaggtaatttatagattcaatgccatccccatcaagctaccaatgactttcttcacagaattggaaaaaactactttaaagttcatatggaaccaaaaaagagcccgccttgccaagtcaatcctaagccaaaagaacaaagctggaggcatcacgctacctgacttcaaactatactacaaggctacagtaaccaaaacagcatggtaccggtaccaaaacagagatatagaccaatggaacagaacagagccctcagaattaatgccacatatctacaactatctgatctttgacaaacctgagaaaaacaagcaatggggaaaggattccctatttaagaactggtgctgggaaaactggctagccatatgtagaaagctgaaactggatcccttccttacaccttatacaaaaattaattcaagatggattaaagacttaaatgtgagacctaaaaccataaaaaccctagaagaaaacctaggcattaccattcaggacataggcatcggcaaggacttcatgtctaaaacaccaaaagcaatggcagcaaaagccaaaattgacaaatgggatctaattaaactaaagagcttctgcacagcaaaagaaactaccatcagagtgaacaggcaacctacaaaatgggagaaaagttttgcaatctactcatctgacaaagggctaatatccagaatctacaatgaacacaaacaaatttacaagaaaaaaacaaacaaccccatcaaaaagtgggcgaaggttatgaacagacacttctcaaaagaagacatttatgcagccaaaaaacacatgaaaaaatgctcatcatcactggccatcagagaaatgcaaatcaaaaccactatgagataccatctcacagcagttagaatggcaatcattaaaacatcaggaaacaacagatattcagtgttacgggcatatgccaaagaatcacagtcagcctacattgaaaaaaagctggcatttgggaacctgggctatacttga

SEQ ID NO: 10414 - DNA, 2823 bp, Homo sapiens
  SIMILAR (1759)..(2166): 991254mologous to Cloning vector pSacBII RepL,accession number U09128,Smith-Waterman Score=674.
atgcccttgagagccttcaacccagtcagctccttccggtgggcgcggggcatgactatcgtcgccgcacttatgactgtcttctttatcatgcaactcgtaggacaggtgccggcagcgctctgggtcattttcggcgaggaccgctttcgctggagcgcgacgatgatcggcctgtcgcttgcggtattcggaatcttgcacgccctcgctcaagccttcgtcactggtcccgccaccaaacgtttcggcgagaagcaggccattatcgccggcatggcggccgacgcgctgggctacgtcttgctggcgttcgcgacgcgaggctggatggccttccccattatgattcttctcgcttccggcggcatcgggatgcccgcgttgcaggccatgctgtccaggcagcctaacttcgatcattggaccgctgatcgtcacggcgatttatgccgcctcggcgagcacatggaacgggttggcatggattgtaggcgccgccctataccttgtctgcctccccgcgttgcgtcgcggtgcatggagccgggccacctcgacctgaatggaagccggcggcacctcgctaacggattcaccactccaagaattggagccaatcaattcttgcggagaactgtgaatgcgcaaaccaacccttggcagaacatatccatcgcgtccgccatctccagcagccgcacgcggcgcatctcgggcagcgttgggtcctggccacggtctggaaacgcggaagtcagcgccctgcaccattatgttccggatctgcatcgcaggatgctgctggctaccctgtggaacacctacatctgtattaacgaagcgctggcattgaccctgagtgatttttctctggtcccgccgcatccataccgccagttgtttaccctcacaacgttccataaccgggcatgttcatcatcagtaacccgtatcgtgagcatcctctctcgtttcatcggtatcattacccccatgaacagaaatcccccttacacggaggcatcagtgaccaaacaggaaaaaaccgcccttaacatggcccgctttatcagaagccagacattaacgcttctggagaaactcaacgagctggacgcggatgaacaggcagacatctgtgaatcgcttcacgaccacgctgatgagctttaccgcagctgcctcgcgcgtttcggtgatgacggaaacagctatgaccatgattacgccaagcttgcatgcctgcaggtcgaaggccgtggcggcggcacttttgcccatgaattgctcgctgtggagtacgcaggctggatttctcccgcgtttcggctgaaggtaaaccagacatttatcgactatcgaaccggaagattacaacctgctattccgcagagtctccctgaagctctccgtttggctgccgacctggcagagcaaaagcaacggctggagcaaaaaatgcttatggatgcacctaaagtcgaattcgctgaacgcgttgctaccgccagcggggttctaatcggcaactatgccaaagtgctcggcctgggccaaaactatctcttcacctggttgcgtgataacggaattctgatcgcaaccggtgaacgcaggaacgtccccaaacaagaatacatatctcgtgggtatttcacccttaaagaaaccgtgatcgatacaagcaatggaagcaggatttctttcacgactcgtataaccggcaaagacgtagtaagaaccaccagcattgtaatgctggctaaagtcactttcctgagctgtataacgatgagcgattttactttttctggctatgaattggcctgctttgtaacacactccggtctatcccgtagcgccgggcatatcctgtcgcaatgtgcaaatctcgcggcaacaaccagtgaatacttcattcacaagcctcaccgcctgatcgcggcagaaactggttatagccaatcaaccgtcgttcgtgcattccgtgaagctgtaaacaaaggaattctgtctgtagagattgttatcggcgatcaccgtgaacgtcgcgctaacctgtaccggtttacaccatcctttttggccttcgcacaacaagccaaaaatgcgctgatagaaagcaaattaaagatctcttcagcggcaaccaaggcaaaagcaaaggctgacaatctgcggttatccaaaaaacgcactcaaaaacatgagttcaagcagaaagtagaggcggctgcgcggaaatatgcttacctgaagaacaagcgttcgcctgatattggcgggatatcaaacttcgataacctaccgcattgcatgacgatcctctacgccggacgcatcgtggccggcatcaccggcgccacaggtgcggttgctggcgcctatatcgccgacatcaccgatggggaagatcgggctcgccacttcgggctcatgagcgcttgtttcggcgtgggtatggtggcaggccccgtggccgggggactgttgggcgccatctccttgcatgcaccattccttgcggcggcggtgctcaacggcctcaacctactactgggctgcttcctaatgcaggagtcgcataagggagagcgtcgaggagaacttctaaagatcgtcgttttgccaggtgaccacgttggtcaagaaatcacagccgaagccattaaggttcttaaagctatttctgatgttcgttccaatgtcaagttcgatttcgaaaatcatttaattggtggtgctgctatcgacctgcaggggggggggggaaagccacgttgtgtctcaaaatctctgatgttacattgcacaagataa

SEQ ID NO: 10415 - DNA, 1217 bp, Homo sapiens
  SIMILAR (268)..(726): 961254mologous to Homo sapiens putative p150,accession number U93572,Smith-Waterman Score=741.
atggacagtatgtctggagggggacagtataggaagattaatgggaatccaacatcagtgaagtgccctttgctgctgctgccagccattctgactccagagccggtgaataggtggagacaaagctgcaaagcatttgcacggcattctccgcttgctttcagagtgacaatttcaacaagcaccttttttgacggcttgctggtgacaggactatacacatctacaagtgttcaggcatcacagagcattggaggttccagtgctttcggatttgtgttggaagttctggccagggcaattaggcaggagaaggaaataaagggtattcaattaggaaaagaggaaatcaaattgtccctgtttgcaggcgacatgattgtatatctagaaaaccccattgtctcagcccaaaatctccttaagctgataagcaacttcagcaaagtctcaggatacaaaatcaatgtacaaaaatcacaagcattcttatacaccaacaacagacaaacagagagccaaatcatgagtgaactcccattcacaattgcttcaaagagaataaaatacctaggaatccaacttacaagggatgtgaaggacctcttcaaggagaactacaaaccactgctcaaggaaataaaagaggatacaaacaaatggaagaacattccatgctcatgggtaggaagaatcaatatcgtgaaaatggccatactggccaagaagacagatggatcttggagaatgacagtggattatcgtaagcttaaccttgtggtgagtccagttgcagctgctgtaccagatgtggttgtactgcttgagcaaattaacacatctcctggtactcggtatgcagtcattgacttggcaaatgcctttttctccattcctggccataaggcccaccggaagcaatttgccttcagctggcaaagccagcaatatacctttactgtcctacctcatgggtatatcaactctctgccttggtgtcataatctttttctgagagaccttgatcgcttttcgcttccacaagatatcacactggtccatgacattgatgacattatgctgattggatccagtgagcaagaagtaacaagcacactggacttactcatgagatatttttgtgccagaggatgggaaataaatccaactaaaattcagggaacttctatgtcagtaaaatttctacgggtctggtg

SEQ ID NO: 10416 - DNA, 1134 bp, Homo sapiens
  SIMILAR (563)..(988): 931254mologous to Shigella flexneri TnpF,accession number AF141323,Smith-Waterman Score=698.
atgtaccaacagtccctgtacgttgttcgtgtgattgttctcatactgttaatctcagcctgtcgcaagtacgatgtaatgactctcaagagccgtgattggacggcctttattgatagcaagcgcccttattgcccggggatggggagtaagcttagtcagccgtgtctccgggtgtcgcgtgcgcagttgcacgtcattctcagacgaaccgatgactggatggatggccgccgcagtcgtcacactgatgatacggatgtgcttctccgtatacaaccatgtttatcggagagctgccaacgtatggttatcgtcgaggtatggtgacgcttcgcagaacaggcagaacgtgaatgatatggcctgcgaatcaatgccaaaccgtgttttaccggaatcgatgcccagagatgcgctgttgcctgaagcgaaaaacctgctgtaccgtccatcgagaccgggcacataccaggcagagtggcccgtgaaagaaaagcaatcaagcgatggtgctctgacgggttcgagttctgctgtgataacggagagagactgcgtggtcacgttcgcgctggactgctgtgatcgtgaggcactgcactgggcggtcactaccggcggcttcaacagtgaaacagtacaggacgtcatgctgggagcggtggaacgccgcttcggcaacgatcttccgtcgtctccagtggagtggctgacggataatggttcatgctaccgggctaatgaaacacgccagttcgcccggatgttgggacttgaaccgaagaacacggcggtgcggagtccggagagtaacggaatagcagagagcttcgtgaaaacgataaagcgtgactacatcagtatcatgcccaaaccagacgggttaacggcagcaaagaaccttgcagaggcgttcgagcattataacgaatggcatccgcatagtggtaccagggggcgaagggcgagattctctgtgcgcgcgacttacgcggccgggcgcttagcgaccatccctgggtaccgcgggggacctctcggcctgatgtgtggacaacccaataggaaacccacggatggtgccaatgagcggctgacgatgatccgcgctgctaccgcgatgagcgaagg

SEQ ID NO: 10417 - DNA, 2607 bp, Homo sapiens
  SIMILAR (1638)..(1135): 991254mologous to Escherichia coli ORF 2 (AA 1-301),accession number V00279,Smith-Waterman Score=900.
atggccagtgttggcgagtttacccccaccccgttcccactcagggctccgcaaacctcggcacactgcagtgcagtcgacctggaggaggccggcgctggtgacccagcttgtgataaactggtcggccagcgcaactaccggtgcggacatgttaagagggccccggggtgggttttttcggggcacgatctcaggcccgctgatgaccgctgtggtatgaatgaggtcaccgcattcggagaggtggatgtccagatgtggactcaggaaatggcctcatcccgaaagtctcgggctacctcggacgagagcagcctggagaccagcccgccagactcgtcgcagcggccgtccgctaggcccgcgtctccgggctcggacgccgagaaaaggaagaagcggcgggtgctattctccaaggcgcagacgctggagttggagcggcgcttccggcagcagcggtacctgtctgcgcccgagcgcgagcagctggcgagcctgcttcgcctcacgcccacgcaggtcaagatctggttccagaatcatcgctacaagctgaagcgcgctcgcgctccaggggcggcggagtcgcctgacctggcagcatccgccgagctgcacgccgcgcccggcctgctgcgtcgcgtggtggtgccggtgcttgttcgcgacgggcagccgtgcggcggcggcggcggtggcgagagctgctggcgtttcgaataccgaaaagtcaaccctgtggaccacgacagggcagaaggagtttctccggagatgagccggcgaggccagggcctcttgtgcaagcagtcactttctcacagaagcgacgacctcgctcccaggcacccgctgctgggagatgcgccagaggagagcagttggggcatcagagcacaacaagaagagcctaaagaagatgcaggccagcaatgccaaggctgtgagtgtatgtgccgaggctatcaaggccctcgtaaaggccaaggagacatctgttatcacttaacccattacaagcccgctgccgcagatattcccgtggcgagcgataacccagcgcactatgcggatgccattcgttataatgctcgaacgcctctgcaaggttctttgctgccgttaacccgtctgccactccactggagacgacggaagatcgttgccgaagcggcgttccaccgctcccagcatgacgtcctgtactgtttcactgttgaagccgccggtagtgaccgcccagtgcagtgcctcacgatcacagcagtccagcgcgaacgtgacacgcagtctctctccgttatcacagcagaactcgaacccgtcagagcaccatcgctgattgctttctttcacggccactctgcctgtatgtgcccgtttcgatggcggtacagcaggttttcgctcaagcaacagcgcattctggcgcatgatccggtaaacacgtttggcattgatcgcaggcataccatcaagttctgcctgtctgcgaagcagcgcccatacccgacgataaccatacgttggcagctctccgataacatggtgtatacggagaagcacatccgtatcatcagtgtgacgactgcggcggccatccatccagtcatcggttcgtctgagaatgacccagatggcaagcccgtgaagcgcacaatctcaagtgttagtgcggatggtaagaccatagagattaacatcggctttggctttcctgtgaagcctaaaacggtattcgcaatcgaccgcaccgaccttgcgttgcagcagttcgtagttacaaaaatcgacaagggcgatgatgatgaggaatttacctacaaaatcacggcggtggagtacgatcctaataagtacgatgaaattgattacggggttaacatcgacgaccgaccgacaagcatcgttgagccagaacagatccctaagcctgaaaacgtgaaagtgttctcagagtcgagaatcgtccaggggatgagcgtagaaacgatgattgtaagctgggataaagtgccgtacgcagttttctatgacgtacagtggagaaaggataacggcaactggcaaaacgttccgcagacagcaaacaaagaggtttatgttgaagggatttacgctggcaactatcaggttcgcgtgcgccccgtcgctggttcgggcacgacttcaggctggtcaaatatcgtcgcggcaacgttgacgggtaaacagggtgaaccgggccgaccgattaacctcacagctacggatgatgttgtttttggtatccgtacaaaatgggggttctctgatggttctggagatacagcctatacagagttgcaacagtcaccggatggaacagtggataacgcaagtttgctttcattgattccgtatccgcagcatgagtattatcactcaccgatgccgggaggtaatattgtgtggtatcgggtaaggacggttgacaggatcggtaacgtatctcagtggactgattttgtcagaggcatggcatcaacaaacgttgacgatatcatcggggagatttctgtcgatatcgaaaactcgccgggttacgagtggcttgttgtgggagactgcgggagcaactga

SEQ ID NO: 10418 - DNA, 2607 bp, Homo sapiens
atgcccttgagagccttcaacccagtcagctccttccggtgggcgcggggcatgactatcgtcgccgcacttatgactgtcttctttatcatgcaactcgtaggacaggtgccggcagcgctctgggtcattttcggcgaggaccgctttcgctggagcgcgacgatgatcggcctgtcgcttgcggtattcggaatcttgcacgccctcgctcaagccttcgtcactggtcccgccaccaaacgtttcggcgagaagcaggccattatcgccggcatggcggccgacgcgctgggctacgtcttgctggcgttcgcgacgcgaggctggatggccttccccattatgattcttctcgcttccggcggcatcgggatgcccgcgttgcaggccatgctgtccaggcaggtagatgacgaccatcagggacagcttcaaggatcgctcgcggctcttaccagcctaacttcgatcattggaccgctgatcgtcacggcgatttatgccgcctcggcgagcacatggaacggtaaccgggcatgttcatcatcagtaacccgtatcgtgagcatcctctctcgtttcatcggtatcattacccccatgaacagaaatcccccttacacggaggcatcagtgaccaaacaggaaaaaaccgcccttaacatggcccgctttatcagaagccagacattaacgcttctggagaaactcaacgagctggacgcggatgaacaggcagacatctgtgaatcgcttcacgaccacgctgatgagctttaccgcagctgcctcgcgcgtttcggtgatgacggaaacagctatgaccatgattacgccaagcttgcatgcctgcaggtcgaaggccgtggcggcggcacttttgcccatgaattgctcgctgtggagtacgcaggctggatttctcccgcgtttcggctgaaggtaaaccagacatttatcgactatcgaaccggaagattacaacctgctattccgcagagtctccctgaagctctccgtttggctgccgacctggcagagcaaaagcaacggctggagcaaaaaatgcttatggatgcacctaaagtcgaattcgctgaacgcgttgctaccgccagcggggttctaatcggcaactatgccaaagtgctcggcctgggccaaaactatctcttcacctggttgcgtgataacggaattctgatcgcaaccggtgaacgcaggaacgtccccaaacaagaatacatatctcgtgggtatttcacccttaaagaaaccgtgatcgatacaagcaatggaagcaggatttctttcacgactcgtataaccggcaaaggtcagcagtggctgatgaagcgattgcttgatgcaagaaaccgtgatcgatacaagcaatggaagcaggatttctttcacgactcgtataaccggcaaagcgccgggcatatcctgtcgcaatgtgcaaatctcgcggcaacaaccagtgaatacttcattcacaagcctcaccgcctgatcgcggcagaaactggttatagccaatcaaccgtcgttcgtgcattccgtgaagctgtaaacaaaggaattctgtctgtagagattgttatcggcgatcaccgtgaacgtcgcgctaacctgtaccggtttacaccatcctttttggccttcgcacaacaagccaaaaatgcgctgatagaaagcaaattaaagatctcttcagcggcaaccaaggttaaagctgttctcgctaagacattggctttatttaattttttatccacacccccatgtcaaaatgataccccctccccctgtcaggatgacgtggcaataaagaataagaagtcacaagttaaaaaaacaaaaagatcagtttccggcggtgccggaacaaccagcctcaaaaaattgacttcatggatcgctaaggcaaaagcaaaggctgacaatctgcggttatccaaaaaacgcactcaaaaacatgagttcaagcagaaagtagaggcggctgcgcggaaatatgcttacctgaagaacaagcgttcgcctgatattggcgggatatcaaacttcgataacctaccgcattgcatgacggtaaacgaagctcttaatgcggttttagccaaaaataaagataacgaacaatggggtgcggttgctggcgcctatatcgccgacatcaccgatggggaagatcgggctcgccacttcgggctcatgagcgcttgtttcggcgtgggtatggtggcaggccccgtggccgggggactgttgggcgccatctccttgcatgcaccattccttgcggcggcggtgctcaacggcctcaacctactactgggctgcttcctaatgcaggagtcgcataagggagagcgtcgaggagaacttctaaagatcgtcgttttgccaggtgaccacgttggtcaagaaatcacagccgaagccattaaggttcttaaagctatttctgatgttcgttccaatgtcaagttcgatttcgaaaatcatttaattggtggtgctgctatcgacctgcaggggggggggggaaagccacgttgtgtctcaaaatctctgatgttacattgcacaagataa

SEQ ID NO: 10419 - DNA, 2562 bp, Homo sapiens; identical to SEQ ID NO: 2291
  SIMILAR (1)..(1080): 961254mologous to Homo sapiens putative p150,accession number U93563,Smith-Waterman Score=1780.

SEQ ID NO: 10420 - DNA, 1989 bp, Homo sapiens
  SIMILAR (718)..(1551): 991254mologous to Cloning vector pSacBII RepL,accession number U09128,Smith-Waterman Score=1401.
atgctgaatggagagaaattagcagttaagcaagaagctcttctggctgccattagtgaaaaagacgccaatatagctctcttggagctttcgtcctctaagaagaagacccaagaggaagtggctgccctgaagcgggagaaggatcgtctggtacagcagcttaagcagcaggtcgaaggccgtggcggcggcacttttgcccatgaattgctcgctgtggagtacgcaggctggatttctcccgcgtttcggctgaaggtaaaccagacatttatcgactatcgaaccggaagattacaacctgctattccgcagagtctccctgaagctctccgtttggctgccgacctggcagagcaaaagcaacggctggagcaaaaaatgcttatggatgcacctaaagtcgaattcgctgaacgcgttgctaccgccagcggggttctaatcggcaactatgccaaagtgctcggcctgggccaaaactatctcttcacctggttgcgtgataacggaattctgatcgcaaccggtgaacgcaggaacgtccccaaacaagaatacatatctcgtgggtatttcacccttaaagaaaccgtgatcgatacaagcaatggaagcaggatttctttcacgactcgtataaccggcaaaggtcagcagtggctgatgaagcgattgcttgatgctgacgtagtaagaaccaccagcattgtaatgctggctaaagtcactttcctgagctgtataacgatgagcgattttactttttctggctatgaattggcctgctttgtaacacactccggtctatcccgtagcgccgggcatatcctgtcgcaatgtgcaaatctcgcggcaacaaccagtgaatacttcattcacaagcctcaccgcctgatcgcggcagaaactggttatagccaatcaaccgtcgttcgtgcattccgtgaagctgtaaacaaaggaattctgtctgtagagattgttatcggcgatcaccgtgaacgtcgcgctaacctgtaccggtttacaccatcctttttggccttcgcacaacaagccaaaaatgcgctgatagaaagcaaattaaagatctcttcagcggcaaccaaggttaaagctgttctcgctaagacattggctttatttaattttttatccacacccccatgtcaaaatgataccccctccccctgtcaggatgacgtggcaataaagaataagaagtcacaagttaaaaaaacaaaaagatcagtttccggcggtgccggaacaaccagcctcaaaaaattgacttcatggatcgctaaggcaaaagcaaaggctgacaatctgcggttatccaaaaaacgcactcaaaaacatgagttcaagcagaaagtagaggcggctgcgcggaaatatgcttacctgaagaacaagcgttcgcctgatattggcgggatatcaaacttcgataacctaccgcattgcatgacggtaaacgaagctcttaatgcggttttagccaaaaataaagataacgaacaatggggtgcggttgctggcgcctatatcgccgacatcaccgatggggaagatcgggctcgccacttcgggctcatgagcgcttgtttcggcgtgggtatggtggcaggccccgtggccgggggactgttgggcgccatctccttgcatgcaccattccttgcggcggcggtgctcaacggcctcaacctactactgggctgcttcctaatgcaggagtcgcataagggagagcgtcgaggagaacttctaaagatcgtcgttttgccaggtgaccacgttggtcaagaaatcacagccgaagccattaaggttcttaaagctatttctgatgttcgttccaatgtcaagttcgatttcgaaaatcatttaattggtggtgctgctatcgacctgcaggggggggggggaaagccacgttgtgtctcaaaatctctgatgttacattgcacaagataa

SEQ ID NO: 10421 - DNA, 3213 bp, Homo sapiens
  SIMILAR (613)..(2187): 841254mologous to Homo sapiens type IV collagen alpha 5 chain,accession number U04520,Smith-Waterman Score=2479.
atgtcaagtgaatgggagtggttgaggtgctcagaagttaaaggtcagagagacgtgaggccagggtgtttggggtgggactttcgtgtgtatattgttgaggacacccaggatgaggacagaacttggagtgtcaaggaagcctgtgagctggtccttagagttcaggaaatgatcatcacaagggtggtagatgctgcaccacaccacacctattccaaaattgaccacatagttggaagtaaagctctcctcagcaaatgtaaaagaacagaaattataacaaactgtctctcagaccacagtgcaatcaaactagaactcaggattaagaatctcactcaaagccgctcaactacatggaaactgaacaacctgctcctgaatgactactgggtacataacgaaatgaaggcagaaataaagatgttctttgaaaccaacgagaacaaagacaccacataccagaatctctgggacgcattcaaagcagtgtgtagagggaaatttatagcactaaatgcctacaagagaaagcaggaaagatccaaaattgacaccctaacatcacaattaaaagaactagaaaagcaagagcaaacacattcaaaagctagcagaaggcaagaaataactaaaatcagagcagaactgaaggaaatagagacacaaaaaacccttcaaaaaatcaatgaatccaggagctggttttttgaaaggatcaacaaaattgatagaccgctagcaagactaataaagaaaaaaagagagaagaatcaaatagacgcaataaaaaatgataaaggggatatcaccaccgatcccacagaaatacaaactaccatcagagaatactacaaacaactctacgcaaataaactagaaaatctagaagaaatggatacattcctcgacacatacactctcccaagactaaaccaggaagaagttgaatctctgaatagaccaataacaggctctgaaattgtggcaataatcaatagtttaccaaccaaaaagagtccaggaccagatggattcacagccgaattctaccagaggtacaaggaggaactggtaccattccttctgaaactattccaatcaatagaaaaagagggaatcctccctaactcattttatgaggccagcatcattctgataccaaagccaggcagagacacaaccaaaaaagagaattttagaccaatatccttgatgaacattgatgcaaaaatcctcaataaaatactggcaaaccgaatccaacagcacatcaaaaagcttatccaccatgatcaagtgggcttcatccctgggatgcaaggctggttcaatatacgcaaatcaataaatgtaatccagcatataaacagagccaaagacaaaaaccacatgattatctcaatagatgcagaaaaggcctttgacaaaattcaacaacccttcatgctaaaaactctcaataaattaggtattgatgggacgtatgtcaaaataataagagctatctatgacaaacccacagccaatatcatactgaatgggcaaaaactggaagcattccctttgaaaactggcacaagacagggatgccctctctcaccgctcctattcaacatagtgttggaagttctggccagggcaatcaggcaggagaaggaaataaagggtattcaattaggaaaagaggaagtcaaattgtccctgtttgcagacgacatgattgtttatctagaaaaccccatcgtctcagcccaaaatctccttaagctgataagcaacttcagcaaagtctcaggatacaaaatcaatgtacaaaaatcacaagcattcttatacaccaacaacagacaaacagagagccaaatcatgggtgaactcccattcacaattgcttcaaagagaataaaatacctaggaatccaacttacaagggatgtgaaggacctcttcaaggagaactacaaaccactgctcaaggaaataaaagaggatacaaacaaatggaagaacattccatgctcatgggtaggaagaatcaatatcgtgaaaatggccatactgcccaaggtaatttatagattcaatgccatccccatcaagctaccaatgactttcttcacagaattggaaaaaactactttaaagttcatatggaaccaaaaaagagcccgcattgccaagtcaatcctaagccaaaagaacaaagctggaggcatcacactacctgacttcaaactatactacaaggctacagtaaccaaaacagcatggtactggtaccaaaacagagatatagatcaatggaacagaacagagccctcagaaataacgccgcatacctacaactatctgatctttgacaaacctgagaaaaacaagcaatggggaaaggattccctatttaataaatggtgctgggaaaactggctagccatatgtagaaagctgaaactggatcccttccttacaccttatacaaaaatcaattcaagatggattaaagatttaaacgttagacctaaaaccataaaaaccctagaagaaaacctaggcattaccattcaggacataggcgtgggcaaggacttcatgtccaaaacaccaaaagcaatggcaacaaaagccaaaattgacaaatgggatctaattaaactaaagagcttctgcacagcaaaagaaactaccatcagagtgaacaggcaacctacaacatgggagaaaattttcgcaacctactcatctgacaaagggctaatatccagaatctacaatgaactcaaacaaatttacaagaaaaaaacaaacaaccccatcaaaaagtgggcgaaggacatgaacagacacttctcaaaagaagacatttatgcagccaaaaaacacatgaaaaaatgctcatcatcactggccatcagagaaatgcaaatcaaaaccactatgagatatcatctcacaccagttagaatggcaatcattaaaaagtcaggaaacaacagccagagaggcttttatgattctataaaaagccccacaaaggaatcctatgcagccataaaaaggaacgagatcatgtcctttgcaggctatggatggagctggacgctgttatccttagcaactaacacaggaacggaaaaccaaacactgcatattttcacttataagtgggagctgaacaatgagagcacatggatacatgaagggatgggg

SEQ ID NO: 10422 - DNA, 2214 bp, Homo sapiens
  SIMILAR (55)..(1047): 1001254mologous to Homo sapiens interleukin-5 receptor type 2 precursor,accession number X61177,Smith-Waterman Score=1750.
ttagttcatcaactcctttgccaagtgtgtcacaacatgctttggcatcctccacgcataaaggacgcggatttcttctacgttcaggttgtagcctgaatcattttggtgatttcctgcttcaatgggcagccaagcttcactctctatcaactggtgagaacggcttgcccggcagcttcgatgtgtgcctctgaatcctgccggtataccccattgttcgttatctttatttttggctaaaaccgcattaagagcttcgtttaccgtcatgcaatgcggtaggttatcgaagtttgatatcccgccaatatcaggcgaacgcttgttcttcaggtaagcatatttccgcgcagccgcctctactttctgcttgaactcatgtttttgagtgcgttttttggataaccgcagattgtcagcctttgcttttgccttagcgatccatgaagtcaattttttgaggctggttgttccggcaccgccggaaactgatcttttttgttttttaacttgggacttcttattctttattgccacgtaatcgcggatgaacaggcagacatctgtgaatcgcttcacgaccacgctgatgagctttaccgcagctgcctcgcgcgtttcggtgatgacggtgaaaacctctgacacatgcagctcccggagacggtcacagcttgttggcgctccaatcgcctcgatgggcttctcctccagatacagctgcagatcctgggcgggcacaccgttgagcgtcacctcgtagtgcagattgcactcgttgtcaatggacatccaggccatgccgacggcatgtggattctgtgcatccgtgtgctcctgtcgcttcagcagaatgggttccgccgagtcccgagcatcggccactggacggggcactaggcggccacggatcaggctcgtctcatgctcggtggccacattaacgcccagttcgccggcatacagcgactcgaggaccttgggacccaacttctccacactaccaatggcctggttgaagttgaagctcggcgtcagatcctccagcttggccttccgcttgccctgctcctcaatcaaactgatgttgggcctatcccgggtgttcacgtgctccgtttcgatgttgtaggccagagatccatcggtgttcaagtagacccacgccaaaccgctgctcttggtcgaggattcggcactgtgcggcgccagcagggtctggaagatttcgcagctggctcgggtcacgatgtgtccctggatgcgcagatgtgggtacttcttggactccacggtcagcaggagtttgccacgcgacatcagtcgaagattctgtatggaaatgggcgacgacagctccaggacattgatctcggcagagggtttgcgcacacgtggaatctcatcgaagatcacctccttccgttctgccagctcaattttcacactcagtgctgcatcggcgtacttgttcctgcgttcaccggttgcgatcagaattccgttatcacgcaaccaggtgaagagatagttttggcccaggccgagcactttggcatagttgccgattagaaccccgctggcggtagcaacgcgttcagcgaattcgactttaggtgcatccataagcattttttgctccagccgttgcttttgctctgccaggtcggcagccaaacggagagcttcagggagactctgcggaatagcaggttgtaatcttccggttcgatagtcgataaatgtctggtttaccttcagccgaaacgcgggagaaatccagcctgcgtactccacagcgagcaattcatgggcaaaagtgccgccgccacggccttcgaccaggtgaagagatagttttggcccaggccgagcactttggcatagttgccgattagaaccccgctggcggtacaacgcgttcacgaattcgactttaggtgcatccataagcattttttgctccagccgttgcttttgctctgccaggtcggcagccaaacggagagcttcagggagactctgcggaatagcaggttgtaatcttccggttcgatagtcgataaatgtctggtttaccttcagccgaaacgcgggagaaatccagcctgcgtactccacagcgagcaattcatgggcaaaagtgccgccgccacggccttcgacgcttcgctgtacgatcccggtattttggcactccgcgatgttcat

SEQ ID NO: 10423 - DNA, 3297 bp, Homo sapiens
  SIMILAR (1819)..(2661): 1001254mologous to Cloning vector pSacBII RepL,accession number U09128,Smith-Waterman Score=1432.
  misc_feature (1)...(3297): n = a,t,c or g
atgaatttgctcgctgaggagtacgcaggctggatttctccggcgtttcggctgaaggtaaaccagacatttatggactatcgaaccggaagattacaacctgctattccgcagagtctccctgaagctctccgtttggctgccgacctggcagagcaaaagcaacggctggagcaaaaaatgcttatggatgcacctaaagtcgaattcgctgaacgcgttgctaccgccagcggggttctaatcggcaactatgccaaagtgctcggcctgggccaaaactatctcttcacctggttgcgtgataacggaattctgatcgcaaccggtgaacgcaggaacgtccccaaacaagaatacatatctcgtgggtatttcacccttaaagaaaccgtgatcgatacaagcaatggaagcaggatttctttcacgactcgtataaccggcaaaggtcagcagtggctgatgaagcgattgcttgatgctgacgtagtaagaaccaccagcattgtaatgctggctaaagtcactttcctgagctgtataacgatgagcgattttactttttctggctatgaattggcctgctttgtaacacactccggtctatcccgtagcgccgggcatatcctgtcgcaatgtgcaaatctcgcggcaacaaccagtgaatacttcattcacaagcctcaccgcctgatcgcggcagaaactggttatagccaatcaaccgtcgttcgtgcattccgtgaagctgtaaacaaaggaattctgtctgtagagattgttatcggcgatcaccgtgaacgtcgcgctaacctgtaccggtttacaccatcctttttggccttcgcacaacaagccaaaaatgcgctgatagaaagcaaattaaagatctcttcagcggcaaccaaggttaaagctgttctcgctaagacattggctttatttaattttttatccacacccccatgtcaaaatgataccccctccccctgtcaggatgacgtggcaataaagaataagaagtcacaagttaaaaaaacaaaaagatcagtttccggcggtgccggaacaaccagcctcaaaaaattgacttcatggatcgctaaggcaaaagcaaaggctgacaatctgcggttatccaaaaaacgcactcaaaaacatgagttcaagcagaaagtagaggcggctgcgcggaaatatgcttacctgaagaacaagcgttcgcctgatattggcgggatatcaaacttcgataacctaccgcattgcatgacggtaaacgaagctcttaatgcggttttagccaaaaataaagataacgaacaatggggctggatttctccggcgtttcggctgaaggtaaaccagacatttatggactatcgaaccggaagattacaacctgctattccgcagagtctccctgaagctctccgtttggctgccgacctggcagagcaaaagcaacggctggagcaaaaaatgcttatggatgcacctaaagtcgaattcgctgaacgcgttgctaccgccagcggggttctaatcggcaactatgccaaagtgctcggcctgggccaaaactatctcttcacctggttgcgtgataacggaattctgatcgcaaccggtgaacgcaggaacgtccccaaacaagaatacatatctcgtgggtatttcacccttaaagaaaccgtgatcgatacaagcaatggaagcaggatttctttcacgactcgtataaccggcaaaggtcagcagtggctgatgaagcgattgcttgatgctgacgtagtaagaaccaccagcattgtaatgctggctaaagtcactttcctgagctgtataacgatgagcgattttactttttctggctatgaattggcctgctttgtaacacactccggtctatcccgtagcgccgggcatatcctgtcgcaatgtgcaaatctcgcggcaacaaccagtgaatacttcattcacaagcctcaccgcctgatcgcggcagaaactggttatagccaatcaaccgtcgttcgtgcattccgtgaagctgtaaacaaaggaattctgtctgtagagattgttatcggcgatcaccgtgaacgtcgcgctaacctgtaccggtttacaccatcctttttggccttcgcacaacaagccaaaaatgcgctgatagaaagcaaattaaagatctcttcagcggcaaccaaggttaaagctgttctcgctaagacattggctttatttaattttttatccacacccccatgtcaaaatgataccccctccccctgtcaggatgacgtggcaataaagaataagaagtcacaagttaaaaaaacaaaaagatcagtttccggcggtgccggaacaaccagcctcaaaaaattgacttcatggatcgctaaggcaaaagcaaaggctgacaatctgcggttatccaaaaaacgcactcaaaaacatgagttcaagcagaaagtagaggcggctgcgcggaaatatgcttacctgaagaacaagcgttcgcctgatattggcgggatatcaaacttcgataacctaccgcattgcatgacggtaaacgaagctcttaatgcggttttagccaaaaataaagataacgaacaatggggtataccggcaggattcagaggcctacttcactcgtttactaatgctgctggtgagcaaatcactgttacctgctctctgaactacaacattggtcagattgccctgtcgttctccaaagcgccggataaaggcactgagatcgcaattgagacggaaatcaatattgaagccgctcctgagctgatcccgctgatcaaccacgaaatgaagaaatacaccctgttcccaagtcagttcgttatcgcggctgagcacacggtacaggcggcgtatgaagcacagcgtgaatttggtctggacctgggttccctacagttccgcaccctgaaggaatacctgtctcatgaacaggatatgctgcgtcttcgcatcatgatctggcgcactcttgcgaccgacacctttgaccngcctctgccggttaaccagtcctttgatgtatgggcaaccatcattcgtggcaaattccagactgtatatcgcgacattattgagcgcgttaaatcttctggtccgatgggcatgtttgctgggtcgatgcagcatctttcttcaaacagttgccgcaaggatttcttccagccagccgaagactatatccagactccgtatgttcactacatcggtaccccatttaggaccacccacagcacctaa

SEQ ID NO: 10424 - DNA, 2266 bp, Homo sapiens
  SIMILAR (170)..(2248): 921254mologous to Homo sapiens putative p150,accession number U93563,Smith-Waterman Score=3334.
ccaggccatgaccttagagggaagatggcagcaatcccagagaagttctacaaaacagagagatgggacttcttttcccatggtagagcccacaaagactgaagagcccttcatgagctccctgccccctcatcctaaccaggccgcagagtggcaaagtggaagacctagaccaaaaacaggagctgaaattgtggcaataaccaatagcttaccaaccaaaaagagtccaggaccagatggattcacagcagaattctaccagaggtacaaggaggaactggtaccattccttctgaaactattccaatcagtagaaaaagagggaatcctccctaactcattttatgaggccagcatcatcctgctaccaaagccaggcagagacaaaaccaaaaaagagaattttagaccaatatccttgatgaacattgatgcaaaaatcctcaataaaatactggcaaaccgaattcagcagcacatcaaaaagcttatccaccatgatcaagtgggcttcgtccctgggatgcaaggctggttcaatatacgcaaatcaataaatgcaatccagcatataaacagaaccaaagacaaaaaccacatgattatctcaatagatgcagaaaaggcctttgacaaaattcaacaacccttcatgctaaaaactctcaataaattaggtattgatgggaagtatctcaaaataataagagctttctatgacaaacccacagccaatatcatactgaatgggcaaaaactggaagcattccctttgaaaactggcacaagacagggatgccctctctcaccactcctattcaacatagtgttggaagttctggacagggcaattaggcaggagaaggaaataaagggtattcaattaggaaaagaggaagtcaaattgtccctgtttgcagatgacatgattgtatatctagaaaaccccattgtctcagcccaaaatctccttaagctgataagcaacttcagcaaagtctcaggatacaaaatcaatgtacaaaaatcacaagcattcttacacaccaataacagacaaacagagagccaaatcatgagtgaactcccattcacaattgcttcaaagagaataaaatacctaggaatccaaattacaagggacgtgaaggacctcttcaaggagaactacaaaccactgctcaaggaaataaaagaggatacaaacaaatggaagaacattccatgctcatgggtaggaagaatcaatattgtgaaaatagccatactgcccaagataatttacagattaaatgccatccccatcaagctactaatgactttcttcacagaattggaaaaaactactttaaagttcatatggaaccaaaaaagagcccgcatcgccaagtcaatcctaagccaaaagaacaaagctggaggcatcacgctacctgacttcaaactatactacaagcctacagtaaccaaaacagcatggtactggcaccaaaacagagctatagagcaatggaacagaacagagccctcagaaataacgacacatatctacaactatctgacctttgacaaacctgagaaaaacaagcaatggggaaaggattccctatttaataaatggtgctgggaaaactggctagccatatgtagaaagctgaaactggatcccttccttacaccttatacaaaaatcagttcaaaatggattaaagacttaaacgttagacctaaaaccataaaaacccaagaagaaaacctaggcattaccattcaggacataggcatgggcaaggacttcatgtctaaaacacaaaaagcaatggcaacaaaagccaaaattgacaaaggggatctaattaaactaaagagcttctgcacagcaaaagaaactagcagcagtgtgaacaggcaacctacaaaatgggagaaaatttttgcaacctactcatctgacaaagggctaatatccagaatctacaatgaactcaaacaaattcacaagaaaaaaacaaacaaccccatcaaaaagtgggcaaaggatatgaacagacacttctcaaaagaagacatttatgcagccaaaaaacacatgaaaaactgttcaccatcactggccatcagagaaatgcaaatcaaaaccacaatgagataccatctcacaccacttagaatggcaatcattaaaaagtcaggaaacaacagctggtcatatcctgaagactttagaactctggccacatgttacccagaagatgacagatga

SEQ ID NO: 10425 - DNA, 2211 bp, Homo sapiens
  SIMILAR (2211)..(1345): 981254mologous to Escherichia coli Glycolate oxidase subunit GlcD,accession number D90811,Smith-Waterman Score=1451.
tcatgcagcagtttggcaattcgtttgtattcggtatggatggaggtaacggaagcagtaatcttccagttcccatttcagttgtccgattccgagacggttagccagcggtgcgtagatgttggtacactcttttgccgccagtacacgttcatcttccggcgcatcttttacttcgcgcagatgagccatacgctccgccagtttgatgactacgcagcgaaaatcatcgaccatcgccaataacatccggcgaacgttatcgacctgttcggaggaaacagaatcagtgtgcgtcgctttcagctggcggatcgccgccatatcacgcacgccgtgaataaggttaacgaccgacttaccgacgctctcacgcagcacatcttcgctgactacgttggcatctggatttgccctatgcggatgccattcgttataatgctcgaacgcctctgcaaggttctttgctgccgttaacccgtctggtttgggcatgatactgatgtagtcacgctttatcgttttcacgaagctctctgctattccgttactctccggactccgcaccgccgtgttcttcggttcaagtcccaacatccgggcgaactggcgtgtttcattagcccggtagcatgaaccattatccgtcagccactccactggagacgacggaagatcgttgccgaagcggcgttccaccgctcccagcatgacgtcctgtactgtttcactgttgaagccgccggtagtgaccgcccagtgcagtgcctcacgatcacagcagtccagcgcgaacgtgacacgcagtctctctccgttatcacagcagaactcgaacccgtcagagcaccatcgctgattgctttctttcacgggcactctgggcgttatctcttcgaaacggacgattttgccgtcgcgcattccctgataaagcggggcagggaccagcgcttccgttgacggaccatgattgataagcagggcgtagttccagccatacttgatttgatcttcggtggtagatgccccgccctggatggttaacccggcatcgccgctaatagcggttgccagtaattcagaaagaagagattttgcggtacccggttcccccaccaacatcaaaccgcggccggtagcaagagtgactaacatacgttcgacagcggaggggctaatcaccactttacggctgatattttgcgcttcgtcgccaaggataaaagcacgggccgcaggcaaacttaactgccaaccgggcgggcaaggtgcgttatcattttgttttaattttgccagttcatcggcgtataacacagcagcaggcggacgctgcaaatgattattcagacggcgcactttaggcaagcgtgtaatatccagccgcgcttcggtaataaaggccagcgtcccttctgaacccgtcagaatgcgcgtcaggtcgaactcggtcatctcatcgttaaagacatgacgcagatcgtaaccggtaagaaagcggttaagtttggggaagttgtcgataattaactggcgttgctgacggcaacgttgataaaccgtgttataaattcgcccgattgtggtattggatttacccagcgtttccgccaattcgacgggtaaaggttgcgtatcgagaatatcgccccccaacaacaccgcgcgtacgccaagtacgtgatctgacgttttgccatagaccagcgatccctgaccggatgcatcggtattgatcatcccaccgagcgttgcccggttgctggtcgaaagttccggcgcaaaaaagtagccgaacggtttcaggtactgattgagttgatcttttatcaccccgggctcaacgcgcacccagccctcttcagggttaatttcgatgatgcggttcatatggcgggacatatcaacaataatcccctggttgagcgcctgaccgttagtgccggtgccgccgccgcggggggtaaagatcagcgatgaatagcgttcctgcgcggcaagacgggcgatcagcgccacatctgcggttgaacgcggaaataccaccgcatcggggagaagttggtaaatactgttgtcggtcgacattgtcagacgatcggcataacttgtcgccgtatcgccggtaaaaccttgttgctccagctctggcaaaaaattaagcaccagttgaacgacgccgggtgcctgggaaatctgtggaatcat

SEQ ID NO: 10426 - DNA, 2026 bp, Homo sapiens
  SIMILAR (1186)..(227): 981254mologous to Homo sapiens The human homolog of mouse Cux -2,accession number AB006631,Smith-Waterman Score=1607.
tcacacagccaggtggtggtagagctgggctttgaacccagagcgcgtgtcctcagcccccagccctgatgccctggacctggcgtggtggccagcggggacgggccctcttgggcactcacctcgctgccgcacttggatggtcctgagcgccagtacattctgctcatccgacaggaactgcttcatcttgatgaagggctccttgccctattaaccgtgaagctttcgccaagggcttgggccgggctaggatctcgctgaccgagccctgcgacagccccagcacgtaatgcccaaacacccgctgcccgatgttgtgtttcagcagctgctccttcacctggaaggcgatctctgccgtgtccagctgctcctcctctgccccgggccccgccgctccgcccccaccaccatccgcgggctcaggaccgcccagtggctcagggccaggggccggggtggcaggggctgtggggggcttggcgccatagaaggctggggggaacaccagcaggccgcccgcctctcccttgaaggcggctgggggcatcatcagtctctcccctgatgccaggctggggaagggggacagcgagaaagtccgagtgccgtcaggccccaagctggggcccagcaggggctgcccggggctgggagacagggggtcttctggccctggtggaggtgggagctgctgaggggaggggtaggactgctccgtgcccagtgaatccttgatggaatcgtcctctgatgggtcttcctcagggctggccaggaggctgggcttctccagaaggaatttctgcgtggggaagaaggcctcctttgcaataagcagtgagtcttcaggcttggccatgccctgggggaggctgcaggtgctggaggccagcttcatggctttcaggatgctcagctccgttttaatttcctcatagtcagactgggcctggagcttctcttccagcttttctatggcctcggacttggccgtgagctgccgctccaggtcggcgatctggttggcggatgcctcctccagctcctgcagtgagctctggaggtgctgcacgtccttcagcagccgcaggatctccctgtccttggaggccagcgcggcctccagccgagggcccgagcacagagtgaagttcaccttatcccagtcagctccttccggtgggcgcggggcatgactatcgtcgccgcacttatgactgtcttctttatcatgcaactcgtaggacaggtgccggcagcgctctgggtcattttcggcgaggaccgctttcgctggagcgcgacgatgatcggcctgtcgcttgcggtattcggaatcttgcacgccctcgctcaagccttcgtcactggtcccgccaccaaacgtttcggcgagaagcaggccattatcgccggcatggcggccgacgcgctgggctacgtcttgctggcgttcgcgacgcgaggctggatggccttccccattatgattcttctcgcttccggcggcatcgggatgcccgcgttgcaggccatgcaacccttggcagaacatatccatcgcgtccgccatctccagcagccgcacgcggcgcatctcgggcagcgttgggtcctggccacgggtgcgcatgatcgtgctcctgtcgttgaggacccggctaggctggcggggttgccttagcgagcgaacgtgaagcgactgctgctgcaaaacgtctgcgacctgagcaacaacatgaatggtcttcggtttccgtgtttcgtaaagtctggaaacgcggaagtcagcgccctgcaccattatgttccggatctgcatcgcaggatgctgctggctaccctgtggaacacctacatctgtattaacgaagcgctggcattgaccctgagtgatttttctctggtcccgccgcatccataccgccagttgtttaccctcacaacgttccagtaaccgggcatgttcatcatcagtaacccgtatcgtgagcatcctctctcgtttcatcggtatcat

SEQ ID NO: 10427 - DNA, 3520 bp, Homo sapiens
  SIMILAR (2258)..(3289): 771254mologous to Escherichia coli 37KD protein, similar to YI22-ECOLI,accession number D85613,Smith-Waterman Score=1327.
atgccagtgacggtaacccgcaccaccatcacaaccaccacgacgtcatcttcgggcctggggtcccccatgatcgtggggtcccctcgggccctgacacagcccctgggtctccttcgcctgctgcagctggtgtctacctgcgtggccttctcgctggtggctagcgtgggcgcctggacggggtccatgggcaactggtccatgttcacctggtgcttctgcttctccgtgaccctgatcatcctcatcgtggagctgtgcgggctccaggcccgcttccccctgtcttggcgcaacttccccatcaccttcgcctgctatgcggccctcttctgcctctcggcctccatcatctaccccaccacctatgtccagttcctgtcccacggccgttcgcgggaccacgccatcgccgccaccttcttctcctgcatcgcgtgtgtggcttacgccaccgaagtggcctggacccgggcccggcccggcgagatcactggctatatggccaccgtacccgggctgctgaaggtgctggagaccttcgttgcctgcatcatcttcgcgttcatcagcgaccccaacctgtaccagcaccagccggccctggagtggtgcgtggcggtgtacgccatctgcttcatcctagcggccatcgccatcctgctgaaccttggccctgtgggttcggaaacgggcaccatcaccctggccaccctggctgcctccatcccagccctgtgggctcggaaacgggcaccatcacctggccacctggctgcctccatcccagggctgggcggacgctccgggccgcgggccccgcagccgcatgaccggccccgaggcttcccccggccgccgccgccgccaccggggtcgccgcctcctcagttgtcggccctggaaggtgcccagcggcggcagcgccagacgcgccccgttagctcagcgtcgctgagcatccgcagccgccaccaggccccgcccagcggccgcagccagccaggccgcgcccgggacgactgcagagcgcgccctccaaccccacccagccctcagacccttccagctgccgctgtcgtctttgcttcagccgcagtcagccactggctgcctgagggttgccgtaagctgcacgcggaggaccatggaacgtaccagggcggatcccagaatgagaccgcatctcgagcttcggtccggcacatcgagcatatcccgctcagagacgtacctgccggcgatctcttaagtctaaacacctctaatgtgggaagtcgggagaaaggtcgctgtgtggcctcagaatattttcttgaaccggagatcaatttggtgacggaaaacacggagaatattctgaagacagtgcgcacggccacccccttccccatggtcagcctcttcctcgtgttcacggccttcgtcatcagcaacatcggccacatccgcccgcagaggaccattctggcttttgtctctggcatcttcttcatactatcgggctggtcattggtggagttgtccccatggcctggtattgttggagttgccccagctctggtcattggtggagttgccccaggtctggtcattgttggagtttccccaggtctggtcattggtggagttgcctcaggtctggtcattggtggacttgccccaggtctggtcattggtggacttgccccaggccggtcattggtggagtcgtccccaggtctggtcattggtggagttgccccaggtctggtcattggtggagttgccccaggctggtcattggtggagttgcacccaggctggtcattggtggagttgtccccaggcctggtcattggtggagttgccccaggtctggtattggtggagttgccccaggtctggtcattggtggagttgccccaggctggtcattggtggagttgcacaccaggtctggtcattggtggacttgctccaggtctggtcattggtggagctgtcaccaggctggtcattggtggagttgccccaggtctggtcattggtggagttgccaccaggctggtcattggtgacattgccaccagactggtcattggtggatatagtccacaacctggacccccaacctctgcgagccacagggggcctgcgctctctgaccctcctcccgcagggcccagactagtcattggagaacagatgattgatgtcttagggccggagaaacgcagacggcgtaccacaacaggaaaagatcgcaattgttcagcagagctttgaaccggggatgacggtctccctcgttgcccggcaacatggtgtagcagccagccagttatttctctggcgtaagcaataccaggaaggaagtcttactgctgtcgccgccggagaacaggttgttcctgcctctgaacttgctgccgccatgaagcagattaaagaactccagcgcctgctcggcaagaaaacgatggaaaatgaactcctcaaagaagccgttgaatatggacgggcaaaaaagtggatagcgcacgcgcccttattgcccggggatggggaacgaaccgatgactggatggatggccgccgcagtcgtcacactgatgatacggatgtgcttctccgtatacaccatgttatcggagagctgccaacgtatggttatcgtcgggtatgggcgctgcttcgcagacaggcagaacttgatggtatgcctgcgatcaatgccaaacgtgtttaccggatcatgcgccagaatgcgctgttgcttgagcgaaaacctgctgtaccgccatcgaaacgggcacatacaggcagagtggccgtgaaagaaagcaatcagcgatggtgctctgacgggttcgagttctgctgtgataacggagagagactgcgtgtcacgttcgcgctggactgctgtgatcgtgaggcactgcactgggcggtcactaccggcggcttcaacagtgaaacagtacaggacgtcatgctgggagcggtggaacgccgcttcggcaacgatcttccgtcgtctccagtggagtggctgacggataatggttcatgctaccgggctaatgaaacacgccagttcgcccggatgttgggacttgaaccgaagaacacggcggtgcggagtccggagagtaacggaatagcagagagcttcgtgaaaacgataaagcgtgactacatcagtatcatgcccaaaccagacgggttaacggcagcaaagaaccttgcagaggcgttcgagcattataacgaatggcatccgcatagtgcgctgggttattggcgaacagtggatgcatgagggggcgatagccacaggaaccgtcattaatgataagggctggcaggtcgtcaagcccggtacagtggcaacggataccgttgttaataccggggcggaagggggaccggatgcagaaaacggtgataccgggcagtttgttcgcggggatgccgtacgcacaaccatcaataaaaacggaacttgctggctaatccagcgatccatctg

SEQ ID NO: 10428 - DNA, 1082 bp, Homo sapiens
  SIMILAR (748)..(365): 1001254mologous to Escherichia coli ORF_o136; orf1 of V00279,accession number U28377,Smith-Waterman Score=637.
cttgacttgcaggatgatggggatgatggtcgttgctggactgccttgttgatggactgtgcccctgggggctgtgccaccagtgaggatgcatgaaggattgggttgctggtgcaagttgaacggtgaggtctgcatgtcgggaatgtgcttgctgtgctggtgtgattgtgactgacgacatgacctgaaagccaacctggacagactgatgaatgtgtgtcaggatggccgcaagagatgatgtgtgtggcacaatgattgacatggttgcttgtgcagcccctggctgcatgatggcctggctgggtgcacctgtgctggaaaatgggagtaccctggatgctgtgttgggtgtctgtgactccccatccccgggcaataagggcgcgtgcgctatccacttttttgcccgtccatattcaacggcttctttgaggagttcattttccatcgttttcttgccgagcaggcgctggagttctttaatctgcttcatggcggcagcaagttcagaggcaggaacaacctgttctccggcggcgacagcagtaagacttccttcctggtattgcttacgccagagaaataactggctggctgctacaccatgttgccgggcaacgagggagaccgtcatccccggttcaaagctctgctgaacaattgcgatcttttcctgtgtggtacgccgtctgcgtttctccggccctaagacatcaatcatctgttctccaatgactagtctgacactgtctgagcgcgaggagatacgagctggtttgtcagccaaaatgagcattcgtgcgatacgtactggcgctgaatcgcagtccttcgacgatctcacgtgaagttcagcgtaatcggggcagacgctattacaaagctgttgatgcatgatggtggataaagcattctgtgagtccacggatggtagtctttataaaagcattgcgtacaggataggtaaacctatatctggagtaagtgtctattccagtgagggcaagctgctgccctttccttgatggaagagatccaatataatcaacctgccaccaagtagctggctgatcacc

SEQ ID NO: 10429 - DNA, 3117 bp, Homo sapiens
  SIMILAR (472)..(1146): 721254mologous to Mus musculus Pro-Pol-dUTPase polyprotein,accession number Y12713,Smith-Waterman Score=829.
atgaaaggcctgatgaattacaaatctcaagggactgccttctccctgggctgctgttttgaaaagaaaaaaacaagaaaatttgaggatactatgcctggagaggtggttgaaaataggtacaatgaacaagggctctgtcatcctgggaccctctatcctaggaaacaagtggaacaaatcaaaagatttatactaactgaagaatataaaactatcagacagaagaatttcccagaaagcagcagcaaagaaaaagaaaatgtaagagaaatctgctgggaatattgtcagcagacagccccttcaaggattgcctcaggttcagaaagcctgcttgctcatggttatgtcccttccctgggagctctaacagtggaaaccacagtcactcaactacaacatttaaatacagtgggaataattggattccgaggtggcaggggccaagtggcagcagtcaactgtcaaaagcgagatatccagccttttaccagggtaactgtgcattggggaaagagaaatgatcagacatttcaagcactagtggacactggccttgagctgacattgattcccggggacccaaaacatcattgtgatcctccagttaaagtaggggcttatggacatcaggtaattaatggagttttagctcagattcaaattacagtaggtccagtgggtccctggactcaccctgtggtcattttcacagtgcctaaatgcataattgacatagacatacttaggtggcagaactcccacactggctccctgactggtaggatgaaggctattatggtgggaagggccaaatggaagccgttagagctgcctctgcctagaaaaacagtaaaccagaaaccatatcacacccctgtagggactgcagaaattagtgccaccatgaaggacttgaaagatgcaggggtggtgattccaaccacaaccctgttcaactctcctatttggtctgtgcagaagacaggtggatcttggagaatgacagtggattattgtatgcttaaccaagttgtgtctgcagttgaagctattgtactagatgtggtttcattgcttgagcaaattaacacatctcctgccatagagtgggtcatgcacagcagcattccatcatcaaatggaagtggtacatacatgatcgggctcaagcaggtcctaaaggcacaacctgcaccaatggcctcatggggagtttcctatgatcagtggacagaggaagagaagactacggcctggttcacagacggttcttcacgatatgctagcaccacccgaaactggacagctgcagcactacagtccctttctaggatatccctgaaggacagctgtgaagggaaatcttcccaccacccgtgtcatggaggcaaggatggaggttatgcatgggctcagcaacatggactttcactcaccaaggttgacctggctatggccactgctgagtgcccaatttgccagcagcagagaccaacactgagccctcgatatggcaccattcctcagggtgatcagccagctacctggtggcaggttgattatatgggacctcttccatcatggaaagggcagagcaccataaatcttagaggaagctctaatttgtcctgctatggaccgtccctcaaccaatcacttgggaaagaagtttccgactggctgtccctgggttacacatctacggttgtggagggattagagggggagagaaggctactagtcattggagaacagatgattgatgtcttagggccggagaaacgcagacggcgtaccacacaggaaaagatcgcaattgttcagcagagctttgaaccggggatgacggtctccctcgttgcccggcaacatggtgtagcagccagccagttatttctctggcgtaagcaataccaggaaggaagtcttactgctgtcgccgccggagaacaggttgttcctgcctctgaacttgctgccgccatgaagcagattaaagaactccagcgcctgctcggcaagaaaacgatggaaaatgaactcctcaaagaagccgttgaatatggacgggcaaaaaagtggatagcgcacgcgcccttattgcccggggatggggaacgaaccgatgactggatggatggccgccgcagtcgtcacactgatgatacggatgtgcttctccgtatacaccatgttatcggagagctgccaacgtatggttatcgtcgggtatgggcgctgcttcgcagacaggcagaacttgatggtatgcctgcgatcaatgccaaacgtgtttaccggatcatgcgccagaatgcgctgttgcttgagcgaaaacctgctgtaccgccatcgaaacgggcacatacaggcagagtggccgtgaaagaaagcaatcagcgatggtgctctgacgggttcgagttctgctgtgataacggagagagactgcgtgtcacgttcgcgctggactgctgtgatcgtgaggcactgcactgggcggtcactaccggcggcttcaacagtgaaacagtacaggacgtcatgctgggagcggtggaacgccgcttcggcaacgatcttccgtcgtctccagtggagtggctgacggataatggttcatgctaccgggctaatgaaacacgccagttcgcccggatgttgggacttgaaccgaagaacacggcggtgcggagtccggagagtaacggaatagcagagagcttcgtgaaaacgataaagcgtgactacatcagtatcatgcccaaaccagacgggttaacggcagcaaagaaccttgcagaggcgttcgagcattataacgaatggcatccgcatagtgcgctgggttatcgctcgccacgggaatatctgcggcagcgggcttgtaatgggggcaaatccagttgtgcaccacgcgatgaccgtaaagttcgcgtgatggcagccgattatgaaaatcagctcgacgagttttccctcgatgcgcccattgtcgcacatgaaaactatcaatgggctaactacgttcgtggcgtggtgaaacatctgcaactgcgtaacaacagcttcggcggcgtggacatgagatcagcggcaatgtgccgcagg

SEQ ID NO: 10430 - DNA, 1227 bp, Homo sapiens
  SIMILAR (337)..(996): 991254mologous to Escherichia coli 37KD protein, similar to YI22-ECOLI,accession number D85613,Smith-Waterman Score=1181.
atggaggctgcccagacactggaagttaagtccaatgaacctctgtgtgtgcccgtgcttgctctggtttctgaagagctgtccttgcgttgtccataccttggtgcacatattgtggcttcctggcttctgcaagtggactcctcctttgagccctggctgatgcgcgtgacgccagccactgacgtaattgttttttatcgactttcccgaccgccgtcagcggaagtgaatccacacactccacgcgatccgagcgtggcgctgggatcggccgccagaacaaccgttcctccggcaagaaagacgcccagcaatcctgatccatgtgcttctcgtatacaccatgttatcggagagctgccaacgtatggttatcgtcgggtatgggcgctgcttcgcagacaggcagaacttgatggtatgcctgcgatcaatgccaaacgtgtttaccggatcatgcgccagaatgcgctgttgcttgagcgaaaacctgctgtaccgccatcgaaacgggcacatacaggcagagtggccgtgaaagaaagcaatcagcgatggtgctctgacgggttcgagttctgctgtgataacggagagagactgcgtgtcacgttcgcgctggactgctgtgatcgtgaggcactgcactgggcggtcactaccggcggcttcaacagtgaaacagtacaggacgtcatgctgggagcggtggaacgccgcttcggcaacgatcttccgtcgtctccagtggagtggctgacggataatggttcatgctaccgggctaatgaaacacgccagttcgcccggatgttgggacttgaaccgaagaacacggcggtgcggagtccggagagtaacggaatagcagagagcttcgtgaaaacgataaagcgtgactacatcagtatcatgcccaaaccagacgggttaacggcagcaaagaaccttgcagaggcgttcgagcattataacgaatggcatccgcataacccgactctcgaatggttcttgtctcattgccacattcataagtacccatccaagagcacgcttattcaccagggtgaaaaagcggaaacgctgtactacatcggtaaaggctctgtggcagtgctgatcaaagacgaagagggtaaagaaatgatcctctcctatctgaatcagggtgatacaattggcgacctgggcctgtttgaagagggccaggaacgtagcgcatgg

SEQ ID NO: 10431 - DNA, 2128 bp, Homo sapiens
  SIMILAR (1)..(954): 951254mologous to Escherichia coli IS5 39.3kDa protein,accession number U70214,Smith-Waterman Score=1554.
atgagtcatcaacttaccttcgccgacagtgaattcagcagtaagcgccgtcagaccagaaaagagattttcttgtcccgcatggagcagattctgccatggcaaaacatggtggaagtcatcgagccgttttaccccaaggctggtaatggccggcgaccttatccgctggaaaccatgctacgcattcactgcatgcagcattggtacaacctgagcgatggcgcgatggaagatgctctgtacgaaatcgcctccatgcgtctgtttgcccggttatccctggatagcgccttgccggaccgcaccaccatcatgaatttccgccacctgctggagcagcatcaactggcccgccaattgttcaagaccatcaatcgctggctggccctaggcgtcatgatgactcaaggcaccttgttcgatgccaccatcattgaggcacccagctctaccaagaacaaagagcagcaacgcgatccggagatgcatcagaccaagaaaggcaatcagtggcactttggcatgaaggcccacattggtgtcgatgccaagagtggcctgacccacagcctggtcaccaccgcggccaacgagcatgacctcaatcagctgggtaatctgcttcatggagagaagcaatttgtctcagcgatgccggctaccaaggagccacagcgcgaggagctggccgaggtggatgtggacctgctgatcgccgagcgtcccggcaaggtaaaaaccttgaagcagaatccgcgcaagaacaaaacggccatcaacatcgaatacatgaaagccagcatccgtgccagggtggagcacccgtttcgcatcatcaagcggcagttcggcttcgtgaaagccagatacaaggggctgctgaaaaacgataaccaactggcgatgttattcaccctggccaacctgtttcgggtggaccaaatgatacagctgccaacgtatgagttatcgtcgggtataggcgctgttcgcagacaggcagaacttgatggtacgcctgcgatcaattccaaacgtgtttaccggatcatgcgccagaatgcgctgttgcttgagcgaaaacctgctgtaccgcccatcgaaacgggcacatacaggcagagtggccgtgaaagaaagcaatcagcgatggtgctcctgacgggttcgagttctgctgtgataacggagagagactgcgtgtcacgttcgcgctggactgctgtgatcgtgaggcactgcactgggcggtcactaccggcggcttcaacagtgaaacagtacaggacgtcatgctgggagcggtggaacgccgcttcggcaacgatcttccgtcgtctccagtggagtggctgacggataatggttcatgctaccgggctaatgaaacacgccagttcgcccggatgttgggacttgaaccgaagaacacggcggtgcggagtccggagagtaacggaatagcagagagcttcgtgaaaacgataaagcgtgactacatcagtatcatgcccaaaccagacgggttaacggcagcaaagaaccttgcagaggcgttcgagcattataacgaatggcatccgcatagtattcgatctgttcgttaacctcgacgcgaccgacgagcagctggacttcccgatcgtttacgcttctgcgctgaacggtatcgcgggtctggaccacgaagatatggcggaagacatgaccccgctgtaccaggcgattgttgaccacgttcctgcgccggacgttgaccttgacggtccgttccagatgcagatttctcagctcgattacaacagctatgttggcgttatcggcattggccgcatcaagcgcggtaaagtgaagccgaaccagcaggtcactatcatcgatagcgaaggcaaaacccgcaacgcgaaagtcggtaaagtgctgggccacctcggtctggaacgtatcgaaaccgatctggcggaagctggcgatatcgttgcgatcacgggccttggcgaactgaacatttctgacaccgtttgcgacacgcaaaacgttgaagcgctgccggcactctccgttgatgagccgaccgtttctatgttcttctgcgttaacacctcgccgttctgcggtaaagaag

SEQ ID NO: 10432 - DNA, 3156 bp, Homo sapiens
atgcccttgagagccttcaacccagtcagctccttccggtgggcgcggggcatgactatcgtcgccgcacttatgactgtcttctttatcatgcaactcgtaggacaggtgccggcagcgctctgggtcattttcggcgaggaccgctttcgctggagcgcgacgatgatcggcctgtcgcttgcggtattcggaatcttgcacgccctcgctcaagccttcgtcactggtcccgccaccaaacgtttcggcgagaagcaggccattatcgccggcatggcggccgacgcgctgggctacgtcttgctggcgttcgcgacgcgaggctggatggccttccccattatgattcttctcgcttccggcggcatcgggatgcccgcgttgcaggccatgctgtccaggcaggtagatgacgaccatcagggacagcttcaaggatcgctcgcggctcttaccagcctaacttcgatcattggaccgctgatcgtcacggcgatttatgccgcctcggcgagcacatggaacgggttggcatggattgtaggcgccgccctataccttgtctgcctccccgcgtttgcgtcgcggtgcatggagccgggccacctcgacctgaatggaagccggcggcacctcgctaacggattcaccactccaagaattggagccaatcaattcttgcggagaactgtgaatgcgcaaaccaacccttggcagaacatatccatcgcgtccgccatctccaacaaccgcacgcggcgcatctcgggcagcgttgggtcctggccacgggtgcgcatgatcgtgctcctgtcgttgaggacccggctaggctggcggggttgccttactgcgaacgtgaagcgactgctgctgcaaaacgtctgcgacctgagcaacaacatgaatggtcttcggtttccgtgtttcgtaaagtctggaaacgcggaagtcagcgccctgcaccattatgttccggatctgcatcgcaggatgctgctggctaccctgtggaacacctacatctgtattaacgaagcgctggcattgaccctgagtgatttttctctggtcccgccgcatccataccgccagttgtttaccctcacaacgttccataaccgggcatgttcatcatcagtaacccgtatcgtgagcatcctctctcgtttcatcggtatcattacccccatgaacagaaatcccccttacacggaggcatcagtgaccaaacaggaaaaaaccgcccttaacatggcccgctttatcagaagccaaaaattaacgcttctgaagaaactcaacgagctggaggcgaatgaacaggcagacatctgtgaatcgcttcacgaccacgctgatgagctttaccgcagctgcctcgcgcgtttcggtgatgacggtgaaaactctgacacatgcagctcccggagacggtcacagcttgtctgtaagcggatgccgggagcagacaagcccgtcaggctgttcacgggatgttggcgggtgtcggggcgcagcatgacccagtcacattacaacctgctattccgcagagtctccctgaagctctccgtttggctgccgacctggcagagcaaaagcaacggctggagcaaaaaatgcttatggatgcacctaaagtcgaattcgctgaacgcgttgctaccgccagcgggggttctaatcggcaactatgccaaagtgctcggcctgggccaaaactatctcttcacctggttgcgtgataacggaattctgatcgcaaccggtgcacgcaggaacgtccccaaacaagaatacatatctcgtgggtatttcacccttaaagaaaccgtgatcgatacaagcaatggaagcaggatttctttcacgactcgtataaccggcaaaggtcagcagtggctgatgaagcgattgcttgatgctggtgtgctggtacctgtcgcggcaacgctaacagacgtagtaagaaccaccagcattgtaatgctggctaaagtcactttcctgagctgtataacgatgagcgattttactttttctggctatgaattggcctgctttgtaacacaactccgcgccgggcatatcctgtcgcaatgtgcaaatctcgcggcaacaaccagtgaatacttcattcacaagcctcaccgcctgatcgcggcagaaactggttatagccaatcaaccgtcgttcgtgcattccgtgaagctgtaaacaaaggaattctgtctgtagagattgttatcggcgatcaccgtgaacgtcgcgctaacctgtaccggtttacaccatcctttttggccttcgcacaacaagccaaaaatgcgctgatagaaagcaaattaaagatctcttcagcggcaaccaaggatgacgtggcaataaagaataagaagtcacaagttaaaaaaacaaaaagatcagtttccggcggtgccggaacaaccagcctcaaaaaattgacttcatggatcgctaaggcaaaagcaaaggctgacaatctgcggttatccaaaaaacgcactcaaaaacatgagttcaagcagaaagtagaggcggctgcgcggaaatatgcttacctgaagaacaagcgttcgcctgatattggcgggatatcaaacttcgataacctaccgcattgcatgacgatcctctacgccggacgcatcgtggccggcatcaccggcgccacaggtgcggttgctggcgcctatatcgccgacatcaccgatggggaagatcgggctcgccacttcgggctcatgagcgcttgtttcggcgtgggtatggtggcaggccccgtggccgggggactgttgggcgccatctccttgcatgcaccattccttgcggcggcggtgctcaacggcctcaacctactactgggctgcttcctaatgcaagagtcgcataagggagagcgtcgaggagaacttctaaagatcgtcgttttgccaggtgaccacgttggtcaagaaatcacagccgaagccattaaggttcttaaagctatttctgatgttcgttccaatgtcaagttcgatttcgaaaatcatttaattggtggtgctgctatcgacctgcaggggggggggggaaagccacgttgtgtctcaaaatctctgatgttacattgcacaagataa

SEQ ID NO: 10433 - DNA, 2866 bp, Homo sapiens
  SIMILAR (1075)..(1410): 831254mologous to Mus musculus VAMP-associated protein 33b,accession number AF115504,Smith-Waterman Score=521.
atggtaaagggatcaattcaacaagaggagctaactatcctaaatatttatgcacccaatacaggagcacccagattcataaagcaagtcctgagtgacctacaaagagacttagactcccacacattaataatggaagactttaacaccccactgtcaacattagacagatcaacgagacagaaagtcaacaagaatacccaggaattgaactcagctctgcaccaagcagacctaatagacatctacagaactctccaccccaaatcaacagaatatacatttttttcagcaccacaccacacctattccaaaattgaccacatagttggaagtaaagctctcctcagcaaatgtaaaagaacagaaattataacaaactatctctcagaccacagtgcaatcaaactagaactcaggattaagaatctcactcaaagccgctcaactacatggaaactgaacaacctgctcctgaatgactactgggtacataacgaaatgaaggcagaaataaagatgttctttgaaaccaacgagaacaaagacaccacataccagaatctctgggacgcattcaaagcagtgtgtagagggaaatttatagcactaaatgcctacaagagaaagcaggaaagatccaaaattgacaccctaacatcacaattaaaagaactagaaaagcaagagcaaacacattcaaaagctagcagaaggcaagaaataactaaaatcagagcagaactgaaggaaatagagacacaaaaaacccttcaaaaaatcaatgaatccaggagctggttttttgaaaggatcaacaaaattgatagaccgctagcaagactaataaagaaaaaaagagagaagaatcaaatagacacaataaaaaatgataaaggggatatcaccaccgatcccacagaaatacaaactaccatcagagaatcctacaaacacctctacgcaaataaactagaaaatctagaagaaatggatacattcctggacacatacactctcccaagactaaaccaggaagaagttgaatctctgaatagaccaataacaggctctgaaattgtggcaataatcaatagtttaccaaccaaaaagagtccaggaccagatggattcacagccgaattctaccagagagctatctatgacaaacccacagacaatatcatactgaatgggcaaaaactgcaagcattccctttgaaaactggcacaagacagggatgccctctctcaccactcctattcaacatagtgttggaagttctggccagggcaatcagccaggagaaggaaataaagggtattcaattaggaaaagaggaagtcaaattgtccctgtttgcagacgacatgattgtttatctagaaaaccccatcgtctcagcccaaaatctccttaagctgataagcaacttcagcaaagtctcaggatacaaaatcaatgtacaaaaatcacaagcattcttatacaccaacaacagacaaacagagagccaaatcatgagtgaactcccattcacaattgcttcaaagagaataaaatacctaggaatccaacttacaagggatgtgaaggacctcttcaaggagaactacaaaccactgctcaaggaaataaaagaggacacaaacaaatggaagaacattccatgctcatgggtaggaagaatcaatatcgtgaaaatggccatacttgcccaaggtaatttacagattcaatgccatccccatcaagctaccaatgactttcttcacagaattggaaaaaactactttaaagttcatatggaaccaaaaaagagcccgcatcgccaagtcaatcctaagccaaaagaacaaagctggaggcatcacactacctgacttcaaactatactacaaggctacagtaaccaaaacagcatcggtactggtaccaaaacagagatatagatcaatggaacagaacagagccctcagaaataatgccgcatatctacactattctgatcctttggacaaacctgagaaaaacaagcatgggggaaaggcatccctaatttataaaatggctgctggggaaaactggctagcccatatgtaggaagctgaaactggatcccttccttacaccttatacaaaaatcaattcaagatggattaaagatttaaacgttagacctaaaaccataaaaaccctagaagaaaacctaggcattaccattcaggacataggcgtgggcaaggacttcatgtccaaaacaccaaaagcaatggcaacaaaagccaaaattgacaaatgggatctaattaaactaaagagcttctgcacagcaaaagaaactaccatcagagtgaacaggcaacctacaacatgggagaaaatttttgcaacctactcatctgacaaagggctaatatccagaatctacaatgaactcaaacaaatttacaagaaaaaaacaaacaaccccatcaaaaagtgggcgaaggacatgaacagacacttctcaaaagaagacatttatgcagccaaaaaacacatgaagaaatgctcatcatcactggccatcagagaaatgcaaatcaaaaccactatgagatatcatctcacaccagttagaatggcaatcattaaaaagtcaggaaacaacagaatcagaaggcatttccagccaagatcagccatgttcttctgctgctgccctgggggcgagggctcagggctgcagtgggagctgctgctggcagcatggactgtgctcccctacccctgccctgcagccacagttgggagattcctcaagcaggcacagactgctgaccattccttcctgggccatgtttggagggtgcccagcagcag

SEQ ID NO: 10434 - DNA, 2454 bp, Homo sapiens
  SIMILAR (153)..(395): 651254mologous to Homo sapiens neuronal thread protein AD7c- NTP,accession number AF010144,Smith-Waterman Score=261.
atggatgaagctggaaacaatcattctcatcaaactaacacaggaacagaaaatcaagcaccgcatgttctcactcataagtgggagttgtacaatgagaacacatggacacagggaggggaaaatcacactgaggactgtcgggggatgcggggaggaatagcattagtagaaatacctaatgtagatgacgggttgatgcatgcagcaaactaccatggcacggcatgtgatgggggtgtggctcacttatgtggtgccctgctgctccagcccctaggacaagccacagttctgacttttacgactgcacttctggcaggaggagcgactcaagccttcgcgaaagaaaataaccaaaaagcatacaaagaaacgtacggcgtctctcatattacacgccatgatatgctgcagatccctaaacagcagcaaaacgaaaaataccaagtgcctcaattcgatcaatcaacgattaaaaatattgagtctgcaaaaggacttgatgtgtgggacagctggccgctgcaaaacgctgacggaacagtagctgaatacaacggctatcacgttgtgtttgctcttgcgggaagcccgaaagacgctgatgacacatcaatctacatgttttatcaaaaggtcgaaggccgtggcggcggcacttttgcccatgaattgctcgctgtggagtacgcaggctggatttctcccgcgtttcggctgaaggtaaaccagacatttatcgactatcgaaccggaagattacaacctgctattccgcagagtctccctgaagctctccgtttggctgccgacctggcagagcaaaagcaacggctggagcaaaaaatgcttatggatgcacctaaagtcgaattcgctgaacgcgttgctaccgccagcggggttctaatcggcaactatgccaaagtgctcggcctgggccaaaactatctcttcacctggttgcgtgataacggaattctgatcgcaaccggtgaacgcaggaacgtccccaaacaagaatacatatctcgtgggtatttcacccttaaagaaaccgtgatcgatacaagcaatggaagcaggatttctttcacgactcgtataaccggcaaaggtcagcagtggctgatgaagcgattgcttgatgctgacgtagtaagaaccaccagcattgtaatgctggctaaagtcactttcctgagctgtataacgatgagcgattttactttttctggctatgaattggcctgctttgtaacacactccggtctatcccgtagcgccgggcatatcctgtcgcaatgtgcaaatctcgcggcaacaaccagtgaatacttcattcacaagcctcaccgcctgatcgcggcagaaactggttatagccaatcaaccgtcgttcgtgcattccgtgaagctgtaaacaaaggaattctgtctgtagagattgttatcggcgatcaccgtgaacgtcgcgctaacctgtaccggtttacaccatcctttttggccttcgcacaacaagccaaaaatgcgctgatagaaagcaaattaaagatctcttcagcggcaaccaaggttaaagctgttctcgctaagacattggctttatttaattttttatccacacccccatgtcaaaatgataccccctccccctgtcaggatgacgtggcaataaagaataagaagtcacaagttaaaaaaacaaaaagatcagtttccggcggtgccggaacaaccagcctcaaaaaattgacttcatggatcgctaaggcaaaagcaaaggctgacaatctgcggttatccaaaaaacgcactcaaaaacatgagttcaagcagaaagtagaggcggctgcgcggaaatatgcttacctgaagaacaagcgttcgcctgatattggcgggatatcaaacttcgataacctaccgcattgcatgacggtaaacgaagctcttaatgcggttttagccaaaaataaagataacgaacaatggggtgcggttgctggcgcctatatcgccgacatcaccgatggggaagatcgggctcgccacttcgggctcatgagcgcttgtttcggcgtgggtatggtggcaggccccgtggccgggggactgttgggcgccatctccttgcatgcaccattccttgcggcggcggtgctcaacggcctcaacctactactgggctgcttcctaatgcaggagtcgcataagggagagcgtcgaggagaacttctaaagatcgtcgttttgccaggtgaccacgttggtcaagaaatcacagccgaagccattaaggttcttaaagctatttctgatgttcgttccaatgtcaagttcgatttcgaaaatcatttaattggtggtgctgctatcgacctgcaggggggggggggaaagccacgttgtgtctcaaaatctctgatgttacattgcacaagataa

SEQ ID NO: 10435 - DNA, 9896 bp, Homo sapiens
  SIMILAR (49)..(1566): 951254mologous to Homo sapiens propionyl-CoA carboxylase,accession number X14608,Smith-Waterman Score=2401.
gcgtgtgcacaggcagctccactcggcacatcgtgacctttgatgggcagaatttcaagctgactggcagctgttcttatgtcctatttcaaaacaaggagcaggacctggaggtgattctccataatggtgcctgcagccctggagcaaggcagggctgcatgaaatccatcgaggtgaagcacagtgccctctccgtcgagctgcacagtgacatggaggcttttaggttcttggtgcatggccacccgtacagtattacaacagcctgttttctggtcaagctctgtaaagtcaagctctgttttctagtcaagctcttctttatcttagaagagctgccgacaaatatcaaggtgacggtgaatgggagactggtctctgttccttacgtgggtgggaacatggaagtcaacgtttatggtgccatcatgcatgaggtcagattcaatcaccttggtcacatcttcacattcactccacaaaacaatgagttccaactgcagctcagccccaagacttttgcttcaaagacgtatggtctgtgtgggatctgtgatgagaacggagccaatgacttcatgctgagggatggcacagtcaccacagactggaaaacacttgttcaggaatggactgtgcagcggccagggcagacgtgccagcccatcctggaggagcagtgtcttgtccccgacagctcccactgccaggtcctcctcttaccactgtttgctgaatgccacaaggtcctggctccagccacattctatgccatctgccagcaggacagttgccaccaggagcaagtgtgtgaggtgatcgcctcttatgcccacctctgtcggaccaacggggtctgcgttgactggaggacacctgatttctgtgctatgtcatgcccaccatctctggtctacaaccactgtgagcatggctgtccccggcactgtgatggcaacgtgagctcctgtggggaccatccctccgaaggctgtttctgccctccagataaagtcatgttggaaggcagctgtgtccctgaagaggcctgcactcagtgcattggtgaggatggagtccagcaccagttcctggaagcctgggtcccggaccaccagccctgtcagatctgcacatgcctcagcgggcggaaggtcaactgcacaacgcagccctgccccacggccaaagctcccacgtgtggcctgtgtgaagtagcccgcctccgccagaatgcagaccagtgctgccccgagtatgagtgtgtgtgtgacccagtgagctgtgacctgcccccagtgcctcactgtgaacgtggcctccagcccacactgaccaaccctggcgagtgcagacccaacttcacctgcgcctgcaggaaggaggagtgcaaaagagtgtccccaccctcctgccccccgcaccgtttgcccacccttcggaagacccagtgctgtgatgagtatgagtgtgcctgcaactgtgtcaactccacagtgagctgtccccttgggtacttggcctcaactgccaccaatgactgtggctgtaccacaaccacctgccttcccgacaaggtgtgtgtccaccgaagcaccatctaccctgtgggccagttctgggaggagggctgcgatgtgtgcacctgcaccgacatggaggatgccgtgatgggcctccgcgtggcccagtgctcccagaagccctgtgaggacagctgtcggtcgaacaccgtaccctataaattactaggtaaatgtcaagtaacctcttggggaagcccaaatctgcacgttggtgagcagtattgggatcgagtgttcgtcttgtatgggaggctagccctgcgagagtggagactggatcccagtcatcctgagtgtgcctcccgggcttcacttacgttctgcatgaaggcgagtgctgtggaaggtgcctgccatctgcctgtcggctcccagtgggcctccccggagaacccctgcctcatcaatgagtgtgtccgagtgaaggaggaggtctttatacaacaaaggaacgtctcctgcccccagctggaggtccctgtctgcccctcgggctttcagctgagctgtaagacctcagcgtgctgcccaagctgtcgctgtgagcgcatggaggcctgcatgctcaatggcactgtcattgggcccgggaagactgtgatgatcgatgtgtgcacgacctgccgctgcatggtgcaggtgggggtcatctctggattcaagctggagtgcaggaagaccacctgcaacccctgccccctgggttacaaggaagaaaataacacaggtgaatgttgtgggagatgtttgcctacggcttgcaccattcagctaagaggaggacagatcatgacactgaagcgtgatgagacgctccaggatggctgtgatactcacttctgcaaggtcaatgagagaggagagtacttctgggagaagagggtcacaggctgcccaccctttgatgaacacaagtgtctggctgagggaggtaaaattatgaaaattccaggcacctgctgtgacacatgtgaggagcctgagtgcaacgacatcactgccaggctgcagtatgtcaaggtgggaagctgtaagtctgaagtagaggtggatatccactactgccagggcaaatgtgccagcaaagccatgtactccattgacatcaacgatgtgcaggaccagtgctcctgctgctctccgacacggacggagcccatgcaggtggccctgcactgcaccaatggctctgttgtgtaccatgaggttctcaatgccatggagtgcaaatgctcccccaggaagtgcagcaagggagacactggaatttttctgaagtggtcctgcattcctgccgagaaggggctgcagacctctggggcctgggtagaggcagcagatatacccctgctccctggctccccacgccggctgagccctcaggcagggtccagagggggccagggccccaaacatggacagcagtgtctcaagatgccaggtccccgggccccaggtctgcagggcggttccaacagagatcctggccagccctgcggtggagagagcacccgcagcagctctgtcatcaacaactatctggatgccaatgagcctgtgtccttggaggcccgtcttagccgcatgcacttccatgacagtcagaggaaggtcgactatgtacttgcctaccactaccggaaacgcggggtgcacctggcccaaggcttccctggccactcgctggctatcgtctccaatggggagacaggcaaggagcctcatgctgggggcccaggtgacattgagctgggaccgctcgatgccctggaggaggagaggaaggagcagcgggaggaatttgagcacaatctgatggaggctggactggagcttgagaaggacttggaggtctggcagagcctggatgtctggcatctcaacctgaattgcagcactgagtcaaagggggatatcttgggacaggtgccggcagcgctctgggtcattttcggcgaggaccgctttcgctggagcgcgacgatgatcggcctgtcgcttgcggtattcggaatcttgcacgccctcgctcaagccttcgtcactggtcccgccaccaaacgtttcggcgagaagcaggccattatcgccggcatggcggccgacgcgctgggctacgtcttgctggcgttcgcgacgcgaggctggatggccttccccattatgattcttctcgcttccggcggcatcgggatgcccgcgttgcaggccatgctgtccaggcagcctaacttcgatcattggaccgctgatcgtcacggcgatttatgccgcctcggcgagcacatggaacgggttggcatggattgtaggcgccgccctataccttgtctgcctccccgcgttgcgtcgcggtgcatggagccgggccacctcgacctgaatggaagccggcggcacctcgctaacggattcaccactccaagaattggagccaatcaattcttgcggagaactgtgaatgcgcaaaccaacccttggcagaacatatccatcgcgtccgccatctccagcagccgcacgcggcgcatctcgggcagcgttgggtcctggccacggtctggaaacgcggaagtcagcgccctgcaccattatgttccggatctgcatcgcaggatgctgctggctaccctgtggaacacctacatctgtattaacgaagcgctggcattgaccctgagtgatttttctctggtcccgccgcatccataccgccagttgtttaccctcacaacgttccataaccgggcatgttcatcatcagtaacccgtatcgtgagcatcctctctcgtttcatcggtatcattacccccatgaacagaaatcccccttacacggaggcatcagtgaccaaacaggaaaaaaccgcccttaacatggcccgctttatcagaagccagacattaacgcttctggagaaactcaacgagctggacgcggatgaacaggcagacatctgtgaatcgcttcacgaccacgctgatgagctttaccgcagctgcctcgcgcgtttcggtgatgacgaacagtggttccgggaggtccggcatgagaacagatgtgtggccctggaaaggtgtccctgcttccatcagggcaaggagtatgcccctggagaaacagtgaagattggctgcaacacttgtgtctgtcgggaccggaagtggaactgcacagaccatgtgtgtgatgccacgtgctccacgatcggcatggcccactacctcaccttcgacgggctcaaatacctgttccccggggagtgccagtacgttctggtgcaggattactgcggcagtaaccctgggacctttcggatcctagtggggaataagggatgcagccacccctcagtgaaatgcaagaaacgggtcaccatcctggtggagggaggagagattgagctgtttgacggggaggtgaatgtgaagaggcccatgaaggatgagactcactttgaggtggtggagtctggccggtacatcattctgctgctgggcaaagccctctccgtggtctgggaccgccacctgagcatctccgtggtcctgaagcagacataccaggagaaagtgtgtggcctgtgtgggaattttgatggcatccagaacaatgacctcaccagcagcaacctccaagtggaggaagaccctgtggactttgggaactcctggaaagtgagctcgcagtgtgctgacaccagaaaagtgcctctggactcatcccctgccacctgccataacaacatcatgaagcagacgatggtggattcctcctgtagaatccttaccagtgacgtcttccaggactgcaacaagctggtggaccccgagccatatctggatgtctgcatttacgacacctgctcctgtgagtccattggggactgcgcctgcttctgcgacaccattgctgcctatgcccacgtgtgtgcccagcatggcaaggtggtgacctggaggacggccacattgtgcccccagagctgcgaggagaggaatctccgggagaacgggtatgagtgtgagtggcgctataacagctgtgcacctgcctgtcaagtcacgtgtcagcaccctgagccactggcctgccctgtgcagtgtgtggagggctgccatgcccactgccctccagggaaaatcctggatgagcttttgcagacctgcgttgaccctgaagactgtccagtgtgtgaggtggctggccggcgttttgcctcaggaaagaaagtcaccttgaatcccagtgaccctgagcactgccagatttgccactgtgatgttgtcaacctcacctgtgaagcctgccaggagccgggaggcctggtggtgcctcccacagatgccccggtgagccccaccactctgtatgtggaggacatctcggaaccgccgttgcacgatttctactgcagcaggctactggacctggtcttcctgctggatggctcctccaggctgtccgaggctgagtttgaagtgctgaaggcctttgtggtggacatgatggagcggctgcgcatctcccagaagtgggtccgcgtggccgtggtggagtaccacgacggctcccacgcctacatcgggctcaaggaccggaagcgaccgtcagagctgcggcgcattgccagccaggtgaagtatgcgggcagccaggtggcctccaccagcgaggtcttgaaatacacactgttccaaatcttcagcaagatcgaccgccctgaagcctcccgcatcgccctgctcctgatggccagccaggagccccaacggatgtcccggaactttgtccgctacgtccagggcctgaagaagaagaaggtcattgtgatcccggtgggcattgggccccatgccaacctcaagcagatccgcctcatcgagaagcaggcccctgagaacaaggccttcgtgctgagcagtgtggatgagctggagcagcaaagggacgagatcgttagctacctctgtgaccttgcccctgaagcccctcctcctactctgccccccgacatggcacaagtcactgtgggcccggggctcttgggggtttcgaccctggggcccaagaggaactccatggttctggatgtggcgttcgtcctggaaggatcggacaaaattggtgaagccgacttcaacaggagcaaggagttcatggaggaggtgattcagcggatggatgtgggccaggacagcatccacgtcacggtgctgcagtactcctacatggtgaccgtggagtaccccttcagcgaggcacagtccaaaggggacatcctgcagcgggtgcgagagatccgctaccagggcggcaacaggaccaacactgggctggccctgcggtacctctctgaccacagcttcttggtcagccagggtgaccgggagcaggcgcccaacctggtctacatggtcaccggaaatcctgcctctgatgagatcaagaggctgcctggagacatccaggtggtgcccattggagtgggccctaatgccaacgtgcaggagctggagaggattggctggcccaatgcccctatcctcatccaggactttgagacgctcccccgagaggctcctgacctggtgctgcagaggtgctgctccggagaggggctgcagatccccaccctctcccctgcacctgatcctattggatgtcaggttgtaggcctggtggccattgtccctgctggcacctgtgtgctcaccttcctggttgtctttgcagactgcagccagcccctggacgtgatccttctcctggatggctcctccagtttcccagcttcttattttgatgaaatgaagagtttcgccaaggctttcatttcaaaagccaatatagggcctcgtctcactcaggtgtcagtgctgcagtatggaagcatcaccaccattgacgtgccatggaacgtggtcccggagaaagcccatttgctgagccttgtggacgtcatgcagcgggagggaggccccagccaaatcggggatgccttgggctttgctgtgcgatacttgacttcagaaatgcatggtgccaggccgggagcctcaaaggcggtggtcatcctggtcacggacgtctctgtggattcagtggatgcagcagctgatgccgccaggtccaacagagtgacagtgttccctattggaattggagatcgctacgatgcagcccagctacggatcttggcaggcccagcaggcgactccaacgtggtgaagctccagcgaatcgaagacctccctaccatggtcaccttgggcaattccttcctccacaaactgtgctctggatttgttaggatttgcatggatgaggatgggaatgagaagaggcccggggacgtctggaccttgccagaccagtgccacaccgtgacttgccagccagatggccagaccttgctgaagagtcatcgggtcaactgtgaccgggggctgaggccttcgtgccctaacagccagtcccctgttaaagtggaagagacctgtggctgccgctggacctgcccctgtcagaaggccgtgagcggcggcacttttgcccatgaattgctcgctgtggagtacgcaggctggatttctcccgcgtttcggctgaaggtaaaccagacatttatcgactatcgaaccggaagattacaacctgctattccgcagagtctccctgaagctctccgtttggctgccgacctggcagagcaaaagcaacggctggagcaaaaaatgcttatggatgcacctaaagtcgaattcgctgaacgcgttgctaccgccagcggggttctaatcggcaactatgccaaagtgctcggcctgggccaaaactatctcttcacctggttgcgtgataacggaattctgatcgcaaccggtgaacgcaggaacgtccccaaacaagaatacatatctcgtgggtatttcacccttaaagaaaccgtgatcgatacaagcaatggaagcaggatttctttcacgactcgtataaccggcaaagacgtagtaagaaccaccagcattgtaatgctggctaaagtcactttcctgagctgtataacgatgagcgattttactttttctggctatgaattggcctgctttgtaacacactccggtctatcccgtagcgccgggcatatcctgtcgcaatgtgcaaatctcgcggcaacaaccagtgaatacttcattcacaagcctcaccgcctgatcgcggcagaaactggttatagccaatcaaccgtcgttcgtgcattccgtgaagctgtaaacaaaggaattctgtctgtagagattgttatcggcgatcaccgtgaacgtcgcgctaacctgtaccggtttacaccatcctttttggccttcgcacaacaagccaaaaatgcgctgatagaaagcaaattaaagatctcttcagcggcaaccaaggttaaagctgttctcgctaagacattggctttatttaattttttatccacacccccatgtcaaaatgataccccctccccctgtcaggatgacgtggcaataaagaataagaagtcacaagttaaaaaaacaaaaagatcagtttccggcggtgccggaacaaccagcctcaaaaaattgacttcatggatcgctaaggcaaaagcaaaggctgacaatctgcggttatccaaaaaacgcactcaaaaacatgagttcaagcagaaagtagaggcggctgcgcggaaatatgcttacctgaagaacaagcgttcgcctgatattggcgggatatcaaacttcgataacctaccgcattgcatgacggtaaacgaagctcttaatgcggttttagccaaaaataaagataacgaacaatggggtgcggttgctggcgcctatatcgccgacatcaccgatggggaagatcgggctcgccacttcgggctcatgagcgcttgtttcggcgtgggtatggtggcaggccccgtggccgggggactgttgggcgccatctccttgcatgcaccattccttgcggcggcggtgctcaacggcctcaacctactactgggctgcttcctaatgcaggagtcgcataagggagagcgtcgaggagaacttctaaagatcgtcgttttgccaggtgaccacgttggtcaagaaatcacagccgaagccattaaggttcttaaagctatttctgatgttcgttccaatgtcaagttcgatttcgaaaatcatttaattggtggtgctgctatcgacctgcaggggggggggggaaagccacgttgtgtctcaaaatctctgatgttacattgcacaagataa

SEQ ID NO: 10436 - DNA, 3031 bp, Homo sapiens
ttatcttgtgcaatgtaacatcagagattttgagacacaacgtggctttcccccccccccctgcaggtcgatagcagcaccaccaattaaatgattttcgaaatcgaacttgacattggaacgaacatcagaaatagctttaagaaccttaatggcttcggctgtgatttcttgaccaacgtggtcacctggcaaaacgacgatctttagaagttctcctcgacgctctcccttatgcgactcctgcattaggaagcagcccagtagtaggttgaggccgttgagcaccgccgccgcaaggaatggtgcatgcaaggagatggcgcccaacagtcccccggccacggggcctgccaccatacccacgccgaaacaagcgctcatgagcccgaagtggcgagcccgatcttccccatcggtgatgtcggcgatataggcgccagcaaccgcaccccattgttcgttatctttatttttggctaaaaccgcattaagagcttcgtttaccgtcatgcaatgcggtaggttatcgaagtttgatatcccgccaatatcaggcgaacgcttgttcttcaggtaagcatatttccgcgcagccgcctctactttctgcttgaactcatgtttttgagtgcgttttttggataaccgcagattgtcagcctttgcttttgccttagcgatccatgaagtcaattttttgaggctggttgttccggcaccgccggaaactgatctttttgtttttttaacttgtgacttcttattctttattgccacgtcatcctgacagggggagggggtatcattttgacatgggggtgtggataaaaaattaaataaagccaatgtcttagcgagaacagctttaaccttggttgccgctgaagagatctttaatttgctttctatcagcgcatttttggcttgttgtgcgaaggccaaaaaggatggtgtaaaccggtacaggttagcgcgacgttcacggtgatcgccgataacaatctctacagacagaattcctttgtttacagcttcacggaatgcacgaacgacggttgattggctataaccagtttctgccgcgatcaggcggtgaggcttgtgaatgaagtattcactggttgttgccgcgagatttgcacattgcgacaggatatgcccggcgctacgggatagaccggagtgtgttacaaagcaggccaattcatagccagaaaaagtaaaatcgctcatcgttatacagctcaggaaagtgactttagccagcattacaatgctggtggttcttactacgtctttgccggttatacgagtcgtgaaagaaatcctgcttccattgcttgtatcgatcacggtttctttaagggtgaaatacccacgagatatgtattcttgtttggggacgttcctgcgttcaccggttgcgatcagaattccgttatcacgcaaccaggtgaagagatagttttggcccaggccgagcactttggcatagttgccgattagaaccccgctggcggtagcaacgcgttcagcgaattcgactttaggtgcatccataagcattttttgctccagccgttgcttttgctctgccaggtcggcagccaaacggagagcttcagggagactctgcggaatagcaggttgtaatcttccggttcgatagtcgataaatgtctggtttaccttcagccgaaacgcgggagaaatccagcctgcgtactccacagcgagcaattcatgggcaaaagtagccgccgccacggccttcgacctgcaggcatgcaagcttggcgtaatcatggtcatagctgtttccgtcatcaccgaaacgcgcgaggcagctgcggtaaagctcatcagcgtggtcgtgaagcgattcacagatgtctgcctgttcatccgcgtccagctcgttgagtttctccagaagcgttaatgtctggcttctgataaagcgggccatgttaagggcggttttttcctgtttggtcactgatgcctccgtgtaagggggatttctgttcatgggggtaatgataccgatgaaacgagagaggatgctcacgatacgggttactgatgatgaacatgcccggttatggaacgttgtgagggtaaacaactggcggtatggatgcggcgggaccagagaaaaatcactcagggtcaatgccagcgcttcgttaatacagatgtaggtgttccacagggtagccagcagcatcctgcgatgcagatccggaacataatggtgcagggcgctgacttccgcgtttccagaccgtggccaggacccaacgctgcccgagatgcgccgcgtgcggctgctggagatggcggacgcgatggatatgttctgccaagggttggtttgcgcattcacagttctccgcaagaattgattggctccaattcttggagtggtgaatccgttagcgaggtgccgccggcttccattcaggtcgaggtggcccggctccatgcaccgcgacgcaacgcggggaggcagacaaggtatagggcggcgcctacaatccatgccaacccgttccatgtgctcgccgaggcggcataaatcgccgtgacgatcagcggtccaatgatcgaagttaggctgcctggacagcatggcctgcaacgcgggcatcccgatgccgccggaagcgagaagaatcataatggggaaggccatccagcctcgcgtcgcgaacgccagcaagacgtagcccagcgcgtcggccgccatgccggcgataatggcctgcttctcgccgaaacgtttggtggcgggaccagtgacgaaggcttgagcgagggcgtgcaagattccgaataccgcaagcgacaggccgatcatcgtcgcgctccagcgaaagcggtcctcgccgaaaatgacccagagcgctgccggcacctgtcctacgagttgcatgataaagaagacagtcataagtgcggcgacgatagtcatgccccgcgcccaccggaaggagctgactgggttgaaggctctcaagggcat

SEQ ID NO: 10437 - DNA, 3477 bp, Homo sapiens
  SIMILAR (1)..(834): 871254mologous to Homo sapiens putative p150,accession number U93574,Smith-Waterman Score=1314.
atgagtcatcaacttaccttcgccgacagtgaattcagcagtaagcgccgtcagaccagaaaagagattttcttgtcccgcatggagcagattctgccatggcaaaacatggtggaagtcatcgagccgttttaccccaaggctggtaatggccggcgaccttatccgctggaaaccatgctacgcattcactgcatgcagcattggtacaacctgagcgatggcgcgatggaagatgctctgtacgaaatcgcctccatgcgtctgtttgcccggttatccctggatagcgccttgccggaccgcaccaccatcatgaatttccgccacctgctggagcagcatcaactggcccgccaattgttcaagaccatcaatcgctggctggccgaagcaggcgtcatgatgactcaaggcaccttggtcgatgccaccatcattgaggcacccagctcgaccaagaacaaagagcagcaacgcgatccggagatgcatcagaccaagaaaggcaatcagtggcactttggcatgaaggcccacattggtgtcgatgccaagagtggcctgacccacagcctggtcaccaccgcggccaacgagcatgacctcaatcagctgggtaatctgctgcatggagaggagcaatttgtctcagccgatgccggctaccaaggggcgccacagcgcgaggagctggccgaggtggatgtggactggctgatcgccgagcgccccggcaaggtaagaaccttgaaacagcatccacgcaagaacaaaacggccatcaacatcgaatacatgaaagccagcatccgggccagggtggagcacccatttcgcatcatcaagcgacagttcggcttcgtgaaagccagatacaaggggttgctgaaaaacgataaccaactggcgatgttattcacgctggccaacctgtttcgggcggaccaaatgatactcccatctgtggaaaaattgccttccatgaaactggtccgtgatgccaaaaaggttggggaccactggtctaggacttacccggaaaattctgcaaagtggaattactgggtcaaagggaatgtaaacctgagcaaagtagatggtagtgtgaatgaaaaagcaaatcagctggagtgcagtggtgcacacgcctcacactgtgacacagcgggagagcccagagcgacagctgttggaatgactgcactcttcctgctcaagtctgacctttccaagaaacatagcagcagcagagatgtcgctattgtgatcagaattactttgaagcacaaggactttaatttgaaacctgattacatatttgaaattgctggtgttcctgactttagcttcttggcagaaatgccagctgagtgtgcacatagcacaggtggtcgatggcaaacaagacacctcacagctgcaggcaaggagctgcttctaagggcatacagtctggacagtgccaaggcagataggcatcatacaaagagagaggacaggctgcaatttgggggttttgtcattattagatggatggaggctggcagggattcgccttcatcctgtgattcagcaatgcaggctcctccacccgtggtagcgccgtgtcaatacgtagcttctcaggtcgaaggccgtggcggcggcacttttgcccatgaattgctcgctgtggagtacgcaggctggatttctcccgcgtttcggctgaaggtaaaccagccatttatcgactatcgaaccggaagattacaacctgctattccgcagagtctccctgaagctctccgtttggctgccgacctggcagagcaaaagcaacggctggagcaaaaaatgcttatggatgcacctaaagtcgaattcgctgaacgcgttgctaccgccagcggggttctaatcggcaactatgccaaagtgctcggcctgggccaaaactatctcttcacctggttgcgtgataacggaattctgatcgcaaccggtgaacgcaggaacgtccccaaacaagaatacatatctcgtgggtatttcacccttaaagaaaccgtgatcgatacaagcaatggaagcaggatttctttcacgactcgtataaccggcaaaggtcagcagtggctgatgaagcgattgcttgatgctggtgtgctggtacctgtcgcggcaacgctaacagacgtagtaagaaccaccagcattgtaatgctggctaaagtcactttcctgagctgtataacgatgagcgattttactttttctggctatgaattggcctgctttgtaacacactccggtctatcccgtagcgccgggcatatcctgtcgcaatgtgcaaatctcgcggcaacaaccagtgaatacttcattcacaagcctcaccgcctgatcgcggcagaaactggttatagccaatcaaccgtcgttcgtgcattccgtgaagctgtaaacaaaggaattctgtctgtagagattgttatcggcgatcaccgtgaacgtcgcgctaacctgtaccggtttacaccatcctttttggccttcgcacaacaagccaaaaatgcgctgatagaaagcaaattaaagatctcttcagcggcaaccaaggttaaagctgttctcgctaagacattggctttatttaattttttatccacacccccatgtcaaaatgataccccctccccctgtcaggatgacgtggcaataaagaataagaagtcacaagttaaaaaaacaaaaagatcagtttccggcggtgccggaacaaccagcctcaaaaaattgacttcatggatcgctaaggcaaaagcaaaggctgacaatctgcggttatccaaaaaacgcactcaaaaacatgagttcaagcagaaagtagaggcggctgcgcggaaatatgcttacctgaagaacaagcgttcgcctgatattggcgggatatcaaacttcgataacctaccgcattgcatgacggtaaacgaagctcttaatgcggttttagccaaaaataaagataacgaacaatggggtgcggttgctggcgcctatatcgccgacatcaccgatggggaagatcgggctcgccacttcgggctcatgagcgcttgtttcggcgtgggtatggtggcaggccccgtggccgggggactgttgggcgccatctccttgcatgcaccattccttgcggcggcggtgctcaacggcctcaacctactactgggctgcttcctaatgcaggagtcgcataagggagagcgtcgaggagaacttctaaagatcgtcgttttgccaggtgaccacgttggtcaagaaatcacagccgaagccattaaggttcttaaagctatttctgatgttcgttccaatgtcaagttcgatttcgaaaatcatttaattggtggtgctgctatcgacctgcaggggggggggggaaagccacgttgtgtctcaaaatctctgatgttacattgcacaagataa

SEQ ID NO: 10438 - DNA, 1694 bp, Homo sapiens
  SIMILAR (396)..(506): 911254mologous to Homo sapiens PRO1546,accession number AF116638,Smith-Waterman Score=191.
atgattaatatgttaaaggatttagtggaaaatgtggaccacatgcacgaacatatacagaatttcagcagagatggaaatgattcaaaaaagaataaattggatacactagacatgaaaaacatgttattatggatgaggaattccttcaattgccttatcagcagactagagatagaagaaagaattagtaaacttgactacagactagtcattggagaacagatgattgatgtcttagggccggagaaacgcagacggcgtaccacacaggaaaagatcgcaattgttcagcagagctttgaaccggggatgacggtctccctcgttgcccggcaacatggtgtagcagccagccagttatttctctggcgtaagcaataccaggaaggaagtcttactgctgtcgccgccggagaacaggttgttcctgcctctgaacttgctgccgccatgaagcagattaaagaactccagcgcctgctcggcaagaaaacgatggaaaatgaactcctcaaagaagccgttgaatatggacgggcaaaaaagtggatagcgcacgcgcccttattgcccggggaatggggattgcacgtcattctcagacgaaccgatgactggatggatggccgccgcagtcgtcacactgatgatacggatgtgcttctccgtatacaaccatgtttatcggagagctgccaacgtatggttatcgtcgaggtatggtgacgcttcgcagaacaggcagaacgtgaatgatatggcctgcgaatcaatgccaaacgctgtttaccggatcatgcgccagaatgcgctgttgcttgagcgaaaacctgctgtaccgccatcgaaacgggcacatacaggcagagtggccgtgaaagaaagcaatcagcgatggtgctctgacgggttcgagttctgctgtgataacggagagagactgcgtgtcacgttcgcgctggactgctgtgatcgtgaggcactgcactgggcggtcactaccggcggcttcaacagtgaaacagtacaggacgtcatgctgggagcggtggaacgccgcttcggcaacgatcttccgtcgtctccagtggagtggctgacggataatggttcatgctaccgggctaatgaaacacgccagttcgcccggatgttgggacttgaaccgaagaacacggcggtgcggagtccggagagtaacggaatagcagagagcttcgtgaaaacgataaagcgtgactacatcagtatcatgcccaaaccagacgggttaacggcagcaaagaaccttgcagctcgttttggtgcgtacgattacaggaactgcaaggagagccagtacagcccgccggaaagcagtaccgcagccggaagggtaaacacccaggccatcagaatgctggtcacggttttacgatgtaagccgccaccatctaccaccatcgtccccgcgacagaagaggagatcgttgccacacggcgccagccaatcatcgtaccgatacctaacgccagcgcgaccgccatgatgatccacaccggtgcatactcgatggtgctatgccagacccggcaagcctaccggcatagtgcgattaagataacgttgatgcaggcagtaaaccgtcagcaccagggaaataatcgggaatacagaaaatggcacaatggagctaaacagcgctgcgaaa

SEQ ID NO: 10439 - DNA, 7457 bp, Homo sapiens
  SIMILAR (316)..(666): 891254mologous to Homo sapiens p40,accession number U93570,Smith-Waterman Score=531.
atgtaccaagcaaatggaaaacaaaaaaaggcaggggttgcaatcctagtctctgataaaacagactttaaaccaacaaagatcaaaagagacaaagaaggccattacataatggtaaagggatcaattcaacaagaagagctaactatcctaaatatatatgcacccaatacaggagcacccacattcatacagcaagtcctgagtgatctacaaagagacttagactcccacacattaataataggagactttaacaccccactgtcaacatcagacagatcaacgagacagaaagtcaacaaggatacccaggaattgaactcagctctgcaccaagcagacctaatagacatctacagaaccctccaccccaaatcaacagaatatacatttttttcagcaccacaccacacctattccaaaattgaccacatacttggaagtaaagcactcctcagcaaatgtaaaagaacagaaattataacaaactatctctcagaccacagtgcaatcaaactagaactcatgattaagaatctcactcaaaaccactcaaccatatggaaactgaacaacctgctcctgaatgactactgggtacataaggaaatgaaggcagaaataaagatgttctttgaaaccaacgagaacaaagacacaacataccagaatctctgggacacattcaaagcagtgtgtagagggaaatttatagcactaaatgcccacaagagaaagcaggaaagatccaaaattgacaccctaacatcacaattaaaagaactagaaaagcaagagcaaacactttcaaaagctagcagaaggcaagaaataactaaaatcagagcagaactgaaggaaatagagacacaaaaaacccttcaaaaaattaacgaatccaggagcaggttttttgaaaggatcaacaaaattgatagcctgctagcaagactaataaagaaaaaaagagagaagaatcaaatagatgcaataaaaaatgataaaggggatatcaccaccaatcccacagaaatacaaactaccatcagagaatactacaaacacctctacgcaaataaactagaaaatctagaagaaatggataaattcctcgacacatacactctcccaagactaaaccaggaagaagttgaatctctgaatagaccaataacgggagctgaaattgtggcaataatcaatagcttaccaaccaaaaagagtccaggaccagatggattcacagccgaattctaccagaggtacaaggaggaacaggtaccattccttctgaaactattccaatcaatagaaaaagagggaatcctccctaactcattttatgtgtccagcatcatcctgataccaaagccgggcagagacacaaccaaaagagagaattttagaccaatatccttgatgaacattgatgcaaaaatcctcaataaaatactggcaaaccgaatccagcagcacatcaaaaagcttatccaccatgatcaagtgggcttcatccctgggatgcaaggctggttcaatatatgcaaatcaataaatgtaatccagcatataaacagaaccaaagacaaaaaccacatgattatctcaatagatgcagaaaaggcctttgacaaaattcaacaacctttcatgctaaaaactctcaataaattagtgttggaagttctggccagggcaattaggcaggagaaggaaataaagggtattcaattaggaaaagaggaagtcaaattgtccctgtttgcagacgacatgattgtatatctagaaaaccccattgtctcagcccaaaatctccttaagctgataagcaacttcagcaaagtctcaggatacaaaatcaatgtacaaaaatcacaagcattcttatacaccaacaacagacaaacagagagccaaatcatgagtgaactcccattcacaattgcttcaaagagaataaaatacctaggaatccaacttacaagggatgtgaaggacctcttcaagggagaactacaaaccactgctcaaggaaataaaagaggatacaaacaaatggaagaacattccatgctcatgggtaggaagaatcaatatcgtgaaaatggccatactgcccaaggtaatttatagattcaatgccatccccatcaagctaccaatgactttcttcacagaattggaaaaaactacttttaagttcatatggaaccaaaaaagagcccacatcgccaagtcaaacctaagccaaaagaacaaagctggaggcatcacactacctgacttcaaactatactacaaggctacagtaaccaaaacaacatgatactggtaccaaaacagagataatagatcaatggaacagaacagagccctcagaaataacgccgcatatctacaactatctgatctttgacaaacctgagaaaaagaagcaatggggaaaggattccctatttaataaatggtgctgggaaaactggctagccatatgtagaaagctgaaactggatcccttccttacaccttatacaaaaattaattcaagatggattaaagacttaaacgttagacctaaaaccataaaaaccctagaagaaaacctaggcaataccattcagaacataggcatgggcaaggacttcatgtctaaaacaccaaaagcaatggcaacaaaagacaaaattgacaaatgggatctaattaaactaaagagcttctgtacagcaaaagaaactacaatcagagtgaacaggcaacctacaaaatgggagaaaatttttgcaacctactcatctgacaaagggctaatatccagaatctacaatgaactcaaacaaatttacaagaaaaaaacaaacaaccccatcaaaaagtggacaaaggacatgaacagatacttctcaaaagaagacatttatgcagccaaaaagcacatgaaaaaatgctcatcatcactagccatcagagaaatgcaaatcaaaaccacaatgagataccatctcacaccagttagaatggcaatcattaaaaagtcaggaaacaacagtcttgctagtggtctatcaattgacaaaattcaacaacccttcatgctaaaaactctcaataaattaggtattgatgggacgtatttcaaaataataagagctatctatgacaaacccacagccaatatcatactgaatgggcaaaaactggaagcattccctttgaaaactggcacaagacagggatgccctctctcaccgctcctattcaacatagtgttggaagttctggccagggcaatcaggcaggagaaggaaataaagggtattcaattaggaaaagaggaagtcaaattgtccctctttgcagacgacatgattgtttatctagaaaaccccatcgtctcagcccaaaatctccttaagctgataagcaacttcagcaaagtctcaggatacaaaatcaatgtacaaaaatcacaagcattcttatacaccaacaacagacaaacagagagccaaatcatgagtgaactcccattcacaattgcttcaaagagaataaaatacctaggaatccaacttacaagggatgtgaaggacctcttcaaggagaactacaaaccactgctcaaggaaataaaagaggatacaaacaaatggaagaacattccatgctcatgggtaggaagaatcaatatcgtgaaaatggccatactgcccaaggtaatttatagattcaatgccatccccatcaagctaccaatgactttcttcacagaattggaaaaaactactttaaagttcatatggaaccaaaaaagagcccgcattgccaagtcaatcctaagccaaaagaacaaagccggaggcatcacactacctgacttcaaactatactacaaggctacagtaaccaaaacagcatggtactggtaccaaaacagagatatagatcaatggaacagaacagagccctcagaaataacgccgcttacctacaactatctgatctttgacaaacctgagaaaaacaagcaatggggaaaggattccctatttaataaatggtgctgggaaaactggctagccatatgtagaaagctgaaactggatcccttccttacaccttatacaaaaatcaattcaagatggattaaagatttaaacgttagacctaaaaccataaaaaccctagaagaaaacctacgcattaccattcaggacatagggatgggcgaggacttcatgtccaaaacaccaaaagcaatggcaacaaaagccaaaattgacaaatgggatctaattaaactaaagagcttctgcacagcaaaagaaactaccatcagagtgaacaggcaacctacaaaatgggagaaaattttcgcaacctactcatctgacaaagggctaatatccagaatctacaatgaactcaaaccaatttacaagaaaaaaacaaacaaccccatcaaaaagtgggcgaaggacatgaacagacacttctcaaaagaagacatttatgcagccaaaaaacacatgaaaaaatgctcatcatcactggccatcagagaaatgcaaatcaaaaccacaatgagatatcatctcacaccagttagaatggcaatcattaaaaagtcaggaaacaacagtacgtttgactttggacaacatgagtttgaactacacaggtccacttatacgcggattgttttcagtaaaattacaccaatattggaagttctggccagggcaattaggcaggagaaggaaataaagggtattcaattaggaaaagaggaagtcaaattgtccctgtttgcagatgacatgattgtatatctagaaaaccccattgtctcagcccaaaatctcctcaagctgataggcaacttcagcaaagtctcaggatacaaaatcaatgtacaaaaatcacaagcattcttatacaccaataacagacaaacagagagccaaatcatgagtgaactcccattcacaattgcttcaaagagaataaaatacctaggaatccaacttacaagggacgtgaaggacctcttcaaggagaactacaaaccactgctcaatgaaataaaagaggatacaaacaaatggaagaacattccatgctcatgggtaggaagaatcaatattgtgaaaatggccatactgcccaaggtaatttatagattcaatgccatccccatcaagctacccatgactttcttcacagaattggaaaaaactactttaaagttcatatggaaccaagaaagagcccgcatcgccaagtcaatcctaagccaaaagaacaaagctggaggcatcatgctacctgacttcaaactatactacaaggctacagtaaccaaaacagcatgtcttgctagcggtctatcaattttgtccagggcaatcaggcaggagaaagaaacaaaaggtactcaattaggaaaagaggaagtcaaattgtccctgtttgcagacgacatgattgtgtatctaaaaaacccaatcgtctcagcgcaaaatctcctcaagctgataagcaacttcagcaaagtctcaggatacaaaatcaatgtagaaaaatcacaagcattcttatacaccaataacagacaaacagagagccaaatcatgagtgaactcccattcacacttgcttcaaagagaataaaatacctaggaatccaacttacgagtgacgtgaaggacctcttcaaggagaactacaaaccactgctcaaggaaataaaagaggatacaaacaaatggaagaacattccatgctcatgggtaggaagaatcaatatcgtgaaaatggccatactgcccaagcccccagacaaccacttgcatcagtatcacccaaaagaagcagattcctgggccccaacttctaccactgaatcagaacctctatggaagataaaccctgcgctgcctgaggaaacagtgatggcctcccctgaggcagttgccaggaaagataatgtagagtctcctcaggacccatctccaacacccctgtttgcttctagacctataactggactaaagtcccagtgggcccctagagtgccagaatgcataattagcacagacatacttagcaactggcagaacccccacattggctccccaactggtggggtgagggctgttatggtgggaaaggccaaatggaagccattagaggtgcctctacctagaaaaatagtaaatcaaaaacaatgtcacatccctggagggattgcagagattagtgctgccattaaggccttaaaagatgcaggggcaatgattcctacaatatccctgttcgactctactcagcctgtgcagaagacaggtggattttggagaatgacagtggattattgtaagcttaaccaagtggtgtctccaattgcagctgctgtaccagatgtggtttcattgcttgagcaaattaacacaccttcgggagtatatcaactctccagcttggtgtttaatcttcagagagaccttgatcgcctttcccttccacaagatatcacactggtccattacattgataacactatactgattggatccagtgacagagaagtagcaaacacactggacttattgcgcatttatcgagtgactggaaaggctgccagttttgagtggggtctacaacaggagaaggctctgcagcaggtccaggctgctctgccgcttgcgccatatgatccagcagatccaatggtgcttgaggtgtcagtggcagacagggatgctgtttggagcctttggcagcccgccataggtgaatcacagtggaggcctccaggattttggagcaaggccctattttctgcagataactgctctccttttgagaaacagctcttggcctgttactgggctttggtagaaactgaacgtttgattatgggtcaagtcacaaggggaccagaactgcctatcatgaactgggtgctttctgacccattagccataaagtgggtcatgaacagcaatattccatcatcaagtggaaatggtatatatgtggtcaggcaccagcaggtcctgagggcacaaggtgatcagccagctacttggtggcaggttgattatattggatctcttccatcaaggaaagggcagcagcttgccctcactggaatagacacttactccagatataggtttacctatcctgtacgcaatgcttttataaagactaccatccgtggactcacagaatgctttatccaccatcatggtattccacatagcattgcctctgaccaaggcactcactttatggctaaagtagtgtggcagtgggctcacactcatggaattcactggtcttaccatgttccccatcatcctgaagccgctagattgatagaacagtggaatggtctcctgaagtcacaattacaatgccatctaggcgacaatactttgtag

SEQ ID NO: 10440 - DNA, 7783 bp, Homo sapiens
  SIMILAR (3306)..(1774): 951254mologous to Homo sapiens The human homolog of mouse Cux -2,accession number AB006631,Smith-Waterman Score=2537.
ttatcttgtgcaatgtaacatcagagattttgagacacaacgtggctttcccccccccccctgcaggtcgatagcagcaccaccaattaaatgattttcgaaatcgaacttgacattggaacgaacatcagaaatagctttaagaaccttaatggcttcggctgtgatttcttgaccaacgtggtcacctggcaaaacgacgatctttagaagttctcctcgacgctctcccttatgcgactcctgcattaggaagcagcccagtagtaggttgaggccgttgagcaccgccgccgcaaggaatggtgcatgcaaggagatggcgcccaacagtcccccggccacggggcctgccaccatacccacgccgaaacaagcgctcatgagcccgaagtggcgagcccgatcttccccatcggtgatgtcggcgatataggcgccagcaaccgcaccccattgttcgttatctttatttttggctaaaaccgcattaagagcttcgtttaccgtcatgcaatgcggtaggttatcgaagtttgatatcccgccaatatcaggcgaacgcttgttcttcaggtaagcatatttccgcgcagccgcctctactttctgcttgaactcatgtttttgagtgcgttttttggataaccgcagattgtcagcctttgcttttgccttagcgatccatgaagtcaattttttgaggctggttgttccggcaccgccggaaactgatctttttgtttttttaacttgtgacttcttattctttattgccacgtcatcctgacagggggagggggtatcattttgacatgggggtgtggataaaaaattaaataaagccaatgtcttagcgagaacagctttaaccttggttgccgctgaagagatctttaatttgctttctatcagcgcatttttggcttgttgtgcgaaggccaaaaaggatggtgtaaaccggtacaggttagcgcgacgttcacggtgatcgccgataacaatctctacagacagaattcctttgtttacagcttcacggaatgcacgaacgacggttgattggctataaccagtttctgccgcgatcaggcggtgaggcttgtgaatgaagtattcactggttgttgccgcgagatttgcacattgcgacaggatatgcccggcgctacgggatagaccggagtgtgttacaaagcaggccaattcatagccagaaaaagtaaaatcgctcatcgttatacagctcaggaaagtgactttagccagcattacaatgctggtggttcttactacgtctttgccggttatacgagtcgtgaaagaaatcctgcttccattgcttgtatcgatcacggtttctttaagggtgaaatacccacgagatatgtattcttgtttggggacgttcctgcgttcaccggttgcgatcagaattccgttatcacgcaaccaggtgaagagatagttttggcccaggccgagcactttggcatagttgccgattagaaccccgctggcggtagcaacgcgttcagcgaattcgactttaggtgcatccataagcattttttgctccagccgttgcttttgctctgccaggtcggcagccaaacggagagcttcagggagactctgcggaatagcaggttgtaatcttccggttcgatagtcgataaatgtctggtttaccttcagccgaaacgcgggagaaatccagcctgcgtactccacagcgagcaattcatgggcaaaagtgccgccgccacggccctgggaggcaccaggctgctggcccactgcctggccgagctggtcagagagccacagctgcatgcggatgaagggctcccgccccttctgcgtcagcttgctccatggcttcggccgggacagcatgtcgctcacgctgccctgtgacaggcccagcaccttctccccgaagatcctctggcagatgccgttcttggccagcttctccttgacctggcgggtgagctccagcgtgtctacctcacggtacatgtacagctcgtactgctcgggggtcagcggcggcacggtgggcttcagggtgcgcggcacgtaggccgggtagtagggcagccgcgcgcccgcctcggccgtcgcgccctcagccttgagctcgcccgtcctggggggttcgtcctccgcccctgccgccgcctcgtcctcggggggcacaggggcctcgtccccgcggggccaggcgcggccgttgggctggccagagtagccagaggaggaggaggaggacagcgagggcgacacggaggcgtaggggcggctgagcaggccgcggtcggaggcccagtggtggtcgaagtagccggcgtcgccgatctcggacttgacttgcggatgatgcgggagcggcgcctgcgcggggcccccgctgccctcctcctgcttcaccaaggccggggccccgttctggctcgcggtggccagtgatggccgctccgggggcgaggggggcaccgagcggcccctgggcgccacctccatctccagcagcgcctgctgttgcgcctgcatctcacggcgtgcctgctccaggatgctcttgatggcgtcctccgaggtgctggcgggggtcgtgccgttggcgatgctcagcggggccaccgaggtcttgggctcgccgcccttctgcgactcgatctccttcttggcctgctctagaatgctcttgatggcgtcgtctgagcctgtctcaggcgtgcggattctcggggtgatgctgcctcgctgccgcacttggatggtcctgagcgccagtacattctgctcatccgacaggaactgcttcatcttgatgaagggctccttgcccttcaccgtgagcttgcgccagggcttgggccgggctaggatctcgctgaccgagccctgcgacagccccagcacgtaatgcccaaacacccgctgcccgatgttgtgtttcagcagctgctccttcacctggaaggcgatctctgccgtgtccagctgctcctcctctgccccgggccccgccgctccgcccccaccaccatccgcgggctcaggaccgcccagtggctcagggccaggggccggggtggcaggggctgtggggggcttggcgccatagaaggctggggggaacaccagcaggccgcccgcctctcccttgaaggcggctgggggcatcatcagtctctcccctgatgccaggctggggaagggggacagcgagaaagtccgagtgccgtcagccccaagctggggcccagcaggggctgcccggggctgggagacagggggtcttctggccccattacaacgcccgctcccgcagatattcccgtggcgagcgataacccagcgcactatgcggatgccattcgttataatgctcgaacgcctctgcaaggttctttgctgccgttaacccgtctggtttgggcatgatactgatgtagtcacgctttatcgttttcacgaagctctctgctattccgttactcgtccggactccgcaaccgcccgtgttctttcggtttcaagtccccaacatcccgggcgaactggcgtgtttcattagcccggtagcatgaaccattatccgtcagccactccactggagacgacggaagatcgttgccgaagcggcgttccaccgctcccagcatgacgtcctgtactgtttcactgttgaagccgccggtagtggcccgcccagtgcagtgcctcacgatcacagcagtccagcgcgaacgtgacacgcagtctctctccgttatcacagcagaactcgaacccgtcagagcaccatcgctgattgctttctttcacggccactctgcctgtatgtgcccgtttcgatggcggtacagcaggttttcgctcaagcaacagcgcattctgggcgcatgatccggtaaacacgtttggcattgatcgcaggcataccatcaagttctgcctgtctgcgaagcagcgcccatacccgacgataaccatacgtttgggcagctctccgataacatggtgtatacggagaagcacatccgtatcatcagtgtgacgactgcgggcggccatcccatccagtcatcggttcgttccccatccccgggcaataagggcgcgtgcgctatccacttttttgcccgtccatattcaacggcttctttgaggagttcattttccatcgttttcttgccgagcaggcgctggagttctttaatctgcttcatggcggcagcaagttcagaggcaggaacaacctgttctccggcggcgacagcagtaagacttccttcctggtattgcttacgccagagaaataactggctggctgctacaccatggttgccgggcaacgagggagaccgtcatccccggttcaaagctctgctgaacaatttgcgatcttttccttgatgccatcaacattctcaatccacacgccgaagtggatgtgatgagccgctatccggtcagttcttcctggctgctcaaccgcccggtaatgggcgatccgctgttcgacgccattatccaggtcggcggatcgttttttgtcgatctctatggcgtgccgcagtttgaacatgcactttgcacgtttatggcgaaaaagccgctgtttatgattggtcacagtgttggcccgttccaggatgagcaatttaaccaactggcgaactacgtttttggtcactgcgacgcgctgatcctgcgcgaatcggtcctctttgaacgcctgagacatgcagtaccgccagcattgcccccccacccccaacatggcacatgtatacatatgtaacaaacctgcatgttgtgctttgaatttgatcaggatggagttagcgatacctttttcgataccttctttcaggatcttggtgttggttacgaacaggtcgtcaccaaccagctggattttgtcgcccagaactttggtctggtatgcgaaaccgtcccagtcagattcgtccagaccgtcttcgatagaaacgatcgggtactgtttggtcagttcttccaggaagtgagtgaattcttcagaggtgaacgctttgttgccttcgccagccagaacgtatttaccatctttgtagaattcagaagctgcgcagtccatcgccaaagtgatgtctttgcccagttcataaccagcagctttaacagcttcagcgataacagccagagcttcagcgttggaacccaggttcggcgcatagccaccttcgtcaccaacagcagtgttcatgcctttcgctttcagaacttttgccaggtgatggaaaacttcagaacccatgcggatggcttctttcacagttttcgcgccaaccggctgaatcatgaattcctggatatcaacgttgttgtcagcgttctcaccaccgttcatgatgttgatcatcggaacagagttgagaggcaagggattgagctgattcaggggtacgatgccagccagctcgagccgcagccggatctggtgattattggcaacgccatgacccgtggaaatccgtgtgtggaagcggtactggagaaaaatatccttttttttatcgaatcggatgagtatgactgcgcctttttcgacaaacgctctaaatttgttcattactgcccgcgtacgctgatcctcaacaaccttgagttcgatcacgccgatatctttgacgacctgaaagcgatccagaaacagttccaccatctggtgcgtatcgttccggggcagggccgtattatctggccggaaaatgacatcaacctgaaacagaccatggcgatgggctgctggagcgagcaggagctggtgggtgagcagggtcactggcaggcgaaaaagctgaccaccgatgcttccgaatgggaagttttgctggatggcgaaaaagtgggcgaagtgaaatggtcgctggtaggcgaacataatatgcacaatggcctgatggcgattgcagcggctcgccatgttggtgtagcgccggcagatgccgctaacgcgctgggttcgtttattaatgctcgtcgccgtctggagttgcgtggtgaagcgaatggcgtcacggtatatgacgattttgcccatcacccgacggcgattctggcaacgctggcggctctgcgtggcaaggccggtggtacggcgcttttggaaattgagagcaatgtgtgtatcacgggctgtaactactactccggtggtaatattcagttcacccgtgcctaattggatttgcccatatatttccagacatctgttatcacttaacccattacaagcccgctgccgcagatattcccgtggcgagcgataacccagcgcactatgcggatgccattcgttataatgctcgaacgcctctgcaaggttctttgctgccgttaacccgtctggtttgggcatgatactgatgtagtcacgctttatcgttttcacgaagctctctgctattccgttactctccggactccgcaccgccgtgttcttcggttcaagtcccaacatccgggcgaactggcgtgtttcattagcccggtagcatgaaccattatccgtcagccactccactggagacgacggaagatcgttgccgaagcggcgttccaccgctcccagcatgacgtcctgtactgtttcactgttgaagccgccggtagtgaccgcccagtgcagtgcctcacgatcacagcagtccagcgcgaacgtgacacgcagtctctctccgttatcacagcagaactcgaacccgtcagagcaccatcgctgattgctttctttcacggccactctgcctgtatgtgcccgtttcgatggcggtacagcaggttttcgctcaagcaacagcgcattctggcgcatgatccggtaaacacgtttggcattgatcgcaggcataccatcaagttctgcctgtctgcgaagcagcgcccatacccgacgataaccatacgttggcagctctccgataacatggtgtatacggagaagcacatccgtatcatcagtgtgacgactgcggcggccatccatccagtcatcggttcgttccccatccccgggcaataagggcgcgtgcgctatccacttttttgcccgtccatattcaacggcttctttgaggagttcattttccatcgttttcttgccgagcaggcgctggagttctttaatctgcttcatggcggcagcaagttcagaggcaggaacaacctgttctccggcggcgacagcagtaagacttccttcctggtattgcttacgccagagaaataactggctggctgctacaccatgttgccgggcaacgagggagaccgtcatccccggttcaaagctctgctgaacaattgcgatcttttcctgtgtggtacgccgtctgcgtttctccggccctaagacatcaatcatctgttctccaatgactagtccactggaagtcttgaaacgtatttcctgagggtaagggaggactgctctacttggatttcccacagcattgttccatttcccctcttcctctttctcctcctcttcctcctctttcccccctcctcctcctccttctccttctttgatggagctccacaccatagccagcatggagacactggcttctttgggcagagatggcagagccaacattctctgaggctcttgggaaatacattgctgtcttcgcagcacttgcaacaagccagaattatagaggatggttggagcagccaatgtccgcagaaatgcgggcctggacaacattgcctccat

SEQ ID NO: 10441 - DNA, 11087 bp, Homo sapiens
  SIMILAR (9221)..(10939): 931254mologous to Homo sapiens putative p150,accession number U93563,Smith-Waterman Score=2810.
acacagactggcaaattggataaagagtcaagacccatcagtgtgctatattccggaaacccatctcacgtgcagagacacacataggctcaaaataaaaggatggaggaagatctaccaagccaatggaaaacaaaaacaggcaggggttgcaatccacatctctgataaaacagactttaaaccaacaaagatcaaaagagacaaagaaggccattacataatggtaaagggatcaattcaacaagaaaagctaactatcctaaatgtatatgcacccaacacaggagcacccagattcataatgcaagtcctgagtgacctacaaagagacttagactcccacacattaataatgggagactttaacaccccactgtcaacattagacagattaacgagacagaaagtcaacaaggatacccaggaattgaactcagctctgcaccaagtggacctaatagacatctatagaactctccaacccaaatcaacagaatatacattgttttcagcaccacaccacacctattccaaaattgaccacatacttggaagtaaagctctcctcagcaaatgtaaaagaacagaaattataacaaactatctctcagaccacagtgcaatcaaactagaactcaggattaagaaactcactcaaatccgctcaactgcatggaaactgaacaacctgctcctgaatgactactgggtacataacgaaatgaaggcagaaataaagatgttctttaaaaacaatgagaataaagacgcaacatgccagaatctctgggacacattcaaagcagtgtgtagagggaaattcttagcactaaatgcccacaagagaaagcaggaaagatccaaaatcaacaccctaacatcacaattaaaagaactagaaaagcaagagcaaacacattccaaagctagtagaaggcaagaaataactaaaatcagagcagaactgaaggaaatagagacacaaaaaacccttcaaaaaattaatgaatccaggagctggttttttgaaaggatcaacaaaattgatagaccactagcaagactaataaagaaaaaaagagagaagaatcaaatagacacaataaaaaatgataaaggggatatcaccaccgatcccacagaaatacaaactaccgtcagagaatactacaaacacctctacgcaaataaactagaaaatctagaagaaatggataaattcctcgacacatacacactcccaagactaaaccaggaagaatttgaatctctgaatagaccagtaacaggatctgaaattgtggcaataatcaatagcttaccaacgaaaaagagtccaggaccagatggattcacagccgaattctaccggaggtacaaggaggaactgcatataaacagagccaaagacaaaaaccacatgattatctcaatagatgcagaaaaagcctttgacaaaattcaacaacccttcatgctaaaaactctcaataaattaggtactgctgggacgtatttcaaaataataagagctatctatgacaaacccacagccaatatcatactgaatggggccaaaaactggaagcattcccctttgaaaaactggcacaagaacagggatgcccctctctcacccactccctattcaacatagtgttggaagttctggcccgggcaattaggcaggataaggaaataaagggtattcaattaggaaaagaggaagtcaaattgtccctgtttgcagacgacatgactgtatgtatagaaaaccccattgtctcagcccaaaatctccttaagctgataagcaacttcagcaaagtctcaggatacaaaatcaatgtacaaaaatcacaagcattcttatacaccgataacagacaaacagagagccaaatcatgagtcaactcccattcacaattgcttcaaagagaataaaatacctaggaatccaacttacaagggatgtgaaggacctcttcaaggagaactacaaaccactgctcaaggaaataaaagaggatacaaacaaatggaagaacattccatgctcatgggtaggaagaatcaatatcgtgaaaatggccatactgcccaaggtaatttacagattcaatgccatccccatcaagctaccaatgactttcttcacagaattggaaaaaactactttaaagttcatatggaaccaaaaaagagcccgcatcgccaagtcaatcctaagccaaaagaacaaagctggaggcatcacactacctgacttcaaactatactacaaggctacagtaaccaaaacagcatggtactggtaccaaaacagagatatagatcaatggaacaaaacagagccctcagaaataacgccacatatctacaactatctgatctttgacaaacctgaggaaaacaagcaatggggaaaggattccctatttaataaatggtgctgggaaaactggctagccatatgtagaaagctgaaactggatcccttccttacaccttatacaaaaatcaattcaagatggattaaagacttaaacgttagacctaaaaccataaaaaccctagaagaaaagctaggcattaccattcaggacataggcattggcaaggacttcatgtctaaaacaccaaaagcaatggcaacaaaagacaaaattgacaaatgggatctaattaaactaaagagcttctgcacagcgaaagaaactaccatcagagtgaacaggcaacctacaaaatgggaggaaattttcgcaacctactcatctgacaaagggctaatatccagaatctacaatgggctcaaacaaatttacaagaaaaaaacaaacaaccccatcaaaaagtgggcgaaggacatgaacagacacttctcaaaagaagacatttatgcagctaaaaaacacgtgaaaaaatgctcatcatcactggccatcagagaaatgcaaatcaaaaccacaatgagataccatctcacaccagttagaatggcaatcattaaaaagtcaggaagcaacagatgctggagaggatgtggagaaataggaacacttttacactgttggtgggactgtaaactagttcaaccattgtggaagtcagtgtggcgattcctcagggatctagaactagaaataccatttgacccagccatcccattactgggtatatacccaaacgactataaatcatgctgctataaagacacatgcacattgagtctaccagaaatccgcaactgcccaacgaaaagtgtcccagtccccttctctgttgatgaaactcagtatcatgttgaagatactagtcctgtaagctggcaagtaaaagttctaggcaagcatatacatcagggaagcagctatgaagatgtttggctgcctcagcgcatgcaaggaaaactaacaaacagaaaggacatccacaccaaaaacccatctgtacatcaccatcatcaaagaccaaaagtagataaaaccacaaagatggggaaaaaacagaacagaaaaactggaaactctaaaaagcagagcgcctctcctcctccaaaggaacgcagttcctcaccagcaatgcaacaaagctggacggagaatgactttgacgagctgagagaagaaggcttcagacgatcaaattactctgagctacgggaggacattcaaaccaaaggcaaagaagttgaaaactttgaaaaaaatttagaagaatgtataactagaataaccaatacagagaagtgcttaaaggagctgatggagctgaaaaccaaggctcgagaactacgtgaagaatgcagaagcctcaggagccaatgcgatcaactggaagaaagggtatcagcaatggaagatgaaatgaatgaaatgaagcaagaagggaagtttagagaaaaaagaataaaaagaaacgagcaaagcctccaagaaatatgggactatgtgaaaagaccaaatctacgtctgattggtgtacctgaaagtgatgcggagaatggaaccaagttggaaaacactctgcaggatattatccaggagactttccccaatctagcaaggcaggccaacgttcagattcaggaaatacagagaacgccacaaagatactcctcgagaagagcaactccaagacacataattgtcagattcaccaaagttgaaatgaaggaaaaaatgttaagggcagccagagagaaaggtcgagttaccctcaaagggaagcccatcagactaacagcggatctctcggcagaaaccctacaagccagaagagagtgggggccaatattgaacattcttaaagaaaagaattttcaacccagaatttcatatccagccaaactaagcttcataagtgaaggagaaataaaatactttacagacaagcaaatgctgaccgattttgtcaccagcaggcctgccctaaaagagctcctgaaggaagcgctaaacatggaaaggaacaaccggtaccagccactgcaaaatcatgccaaaatgtaaagaccatcgagactaggaagaaactgcatcaactaacgagcaaaatcaccagctaacatcataatgacaggatcaaattcacacataacaatattaactttaaatgtaaatggactaaattctccaattaaaagacacagactggcaagttggataaagagtcaagacccatcagtgtgctgtattcaggaaacccatctcatgtgcagagacacacataggctcaaaataaaaggatggaggaagatctaccaagcaaatggaaaacaaaaaaaggcaggggttgcaatcctagtctctgataaaacagactttaaaccaacaaagatcaaaagagacaaagaaggccattacatgatggtaaagggatcaattcaacaagaggagctaactatcctaaatatgtatgcacccaatacaggagcacccagattcataaagcaagtcctgagtgacctacaaagagacttagactcccacacattaataatgggagactttaacaccccactgtcaacattagacagatcaacgagacagaaagtcaacaaggatacccaggaattgaactcagctctgcaccaagcagacctaatagacatctacagaactctccaccccaaatcaacagaatatacatttttttcagcaccacaccacagctattccaaaattgaccacatacttggaagtgaagctctcctcagcaaatgtaaaagaacagaaattataacaaactatctctcagaccacagtgcaatcaaactagaactcaggattaagaatctcactcaaagccgctcaactacatggaaactgaacaacctgctcctgaatgactactgggtacataacgaaatgaaggcagaaataaagatgttctttgaaaccaacgagaacaaagacacaacataccagaatctctaggacgcattcaaagcagtgtgtagagggaaatttatagcactaaatgcccacaagagaaagcaggaaagatccaaaattgacaccctaacatcacaattaaaagaactagaaaagcaagagcaaacaacattcaaaagctagcagaaggcaagaaataactaaaatcagagcagaactgaaggaaatagagatacaaaaaacccttcaaaaaattaatgaatccaggagctggtttttttgaaaggatcaacaaaattgatagaccgctagcaagactaacaaagagaaaaagagagaagaatcaaatacacgcaataaaaaatgataaaggggatatcaccaaccgatcccacagaaatacacactaccatcagagaatactataaaaacctctacgcaaagaaactagaaaatctagaagaaatggataaattcctggagacatacaccctcccaagaccaaaccaggaagaagttgaatctctgaatagaccaataacaggatctgaaattgtggcaataatcaatagcttaccaactaaaaaagagtccaggatcagaaggcttcacagccgaattctaccagaggtacaaggaggaactggtaccattccttctgaaactattccaatcaatagaaaaagagggaatcctccctaactcattttatgaggccagcatcattctgataccaaagccgggcagagacacaaccaaaaaagagaattttagaccaataaccttgacgaacattgatgcaaaaatcctcaataaaatactggcaaaccgaatccagcagcacatcaaaaagcttatccaccatgatcaagtgggcttcatccctgggaatgcaaggctggttcaatatatgcaaatcaataaatgtaatccagcatataaacagaaccaaaggcaaaaaccacatgattatctcaatagatgcagaaaaggcctttgacaaaattcaacaacccttcctgctaaaaactctcaataaattaggtattgatgggacgtatctcaaaataataagagctatctatgacaaacccatagccaatatcatactgaatgggcaaaaactggaagcattccctttgaaaactggcacaagacagggatgccctctctcaccactcctattcaacatagtgttggaagttctggctagggcaattaggcaggagaaggaaataaagggtattcagttacaaaaagaggaagtcaaattgtcccctctttgcagatgacatgattgtatatgtagaaaaccccttcgtctcagcccccatatctccctcaagctgataagcaacttcagcaaactctcaggatacaaaatcaatgtacaaaaatcaccaagcattcctatacaccaacaacagacaaacagagagccaaatcatgagtgaactcccattctgttattgcttcaaagagaataaaatacctaggaatccaacttacaagggatgtgaaggacctccttcaaggagacctacaaaccactgctcaacgaaataaaaagaggacacaaacaaatggaagaacattccatgctcatgggtaggaggaagaatcaatctcgtgaaaatggccatactgcccaaggtaaatttatagattcaatgccatccccatcaagctaccaatgactgttttcacagaattggaaaaaaactactttaaagttcatatggaaccaaaaaaagagccctggcaaaaaattgccaagtcaatcctaagccaaaagaacaaagctggaggaggcatcatgctacctgacttcaaactatactacaaggctacagtaaccaaaacagcatggtactggtaccaaaacagcatggtactggtaccaaaacagagatatagatcaatggaacagaacagagccctcagaaataacgccgcatatctacaactatctgacatctttgacaaacctttgcttgagaaaaacaagcaatgggggaaaggattccctatttaataaatggtgctgtgaaaactggctagccatatgtagaaagctgaaactggatcccttccttgcaccttatacaaaaatcaattcaagatggattaaagatttaaacgttagacctaaaaccataaaaaccctagaagaaaacctagacattaccattcaggacataggcgtgggcaaggacttcatgtccaaaacaccaaaagcaatggcaacaaaagccaaaattgacaaatgggatctaattaaactaaagagcttctgcacatctgcacagcaaaagaaactaccatcagagtgaacaggcaacctacaacatgggggaaaattttcgcaacctactcatctgacaaagggctaatatccagaatctacaatgaactcaaacaaatttacaagaaaaaaaaaaaaacaaccccatcaaaaagtggacgaaggcacatgaacagacacttctcaaaagaagacatttatgcagccaaaaaacacatgaaaaaatgctcaccatcactggccatcagagaaatgccaatcaaagcctcaatgagataccgtctcacaccagttagaatggcaatcattaaaaagtcaggaaacaacagagacgttggcaatgtggttgaagccatgtatggggaccttcctcctccaattatgctgattggacatagcatgggtggtgctattgcagtccacacagcatcatccaacctggtaccaagcctcttgggtctgtgcatgattgatgttgtagaaggtacagctatggatgcacttaatagcatgcagaatttcttacggggtcgtcctaaaaccttcaagtctctggagaatgctattgaatggagaaatatcaaagatctatcttgggcagatagcatcaagaatgtagctgctgccagcttggcttgtatctcaggtgccctgcctgcttccgcagtaacaacaagcccagataataagaggatggccaggaatgtcttgaaatatgaaaggctcttggcagagagccccaaccacgtggtagctgaggctgtcatccagaggcccaatataccccacctgcagaccagagacacctacgaggggctatgtcagaccctgggttcccagcccactctctaccagatccctagcctctactgttcctatgagaccaattccaacgcctacctgctgctccagcccatccggaaggaggtcatccacctggagccctacattgctctctaccatgacttcgtcagtgactcagaggctcagaaaattagagaacttgcagaaccatgggaacagagctcctcaccagcaacggaacaaagctggatggagaatgactttgatgagttgagagaagaaggcttcagacgatcaaactactccgagctacaggaggaaattcgaaccaatggcaaagaagttaaaagctttgaaaaaaaattagacgaatggataactagaataaccaatgcagagaagtccttaaaggacctgatggagctgaaaaccaaggcacgagagctacgtgacgaatgcagaagcctcagtagccgatgcaatcaactggaagaaagggtatcagtgatggaagacgaaatgaatgaaacgaagcgaggagagaagtttagagaaaaaagaataaaaagaaatgagcaaagcctccaagaaatatgggactatgtgaaaagaccaaatctacgtctgattggtgtacctgaaagtgatggggagaatggaaccaagttggaaaacactctgcaggatattatccaggagaacttccccaatctagcaaggcaggccaaccatataaacagagccaaagacaaaacccacatgattatctcaatagatgcagaaaaagcctttgacaaaattcaacaactcttcatgctaaaaactctcaataaattaggtattgatgggacgtatttcaaaataataagagctatctatgacaaacccacagccaatatcatactgaatgggcaaaaactggaagcattccctttgaaaactggcacaagacagggatgccctctctcaccgctcctattcaacatagtgttggaagttctggccagggcaatcaggcaggagaaggaaataaagggtattcaattagcaaaagaggaagtcaaattgtccctgtttgcagacgacatgattgtttatctagaaaaccccatcgtctcagcccaaaatctccttaagctgataagcaacttcggcaaagtctcaggatacaaaatcaatgtacaaaaatcacaagcattcttatacaccaacaccagacaaacagagagccaaatcatgagtgaactcccattcacaattgcttcaaagagaataaaatacctaggaatccaacttacaagggatgtgaaggacctcttcaaggagaactacaaaccactgctcaaggaaataaaagaggacacaaacaaatggaagaacattccatgctcatgggtaggaagaatcaatatcgtgaaaatggccatactgcccaaggtaatttacagattcaatgccatccccatcaagctaccaatgactttcttcacagaattggaaaaaactactttaaagttcaaatggaaccaaaaaagagcctgcattgccaagtcaatcctaagccaaaagaacaaagctggaggcatcatgctacccgacttcaaactatactacaaggctacagtaatcaaaacagcatggtactggtaccaaaacagagatatagaccaatggaacagaacagagccctcagaaataatgccgcatatctacaactatctgatcttcgacaaacctgaccaaaacaagcaatggggaaaggattccctatttaataaatggtactgggaaaactgcctagccatatgtagaaagctgaaactagatcccttccttacaccttatacaaaaattaattcaagatggattaaagacttaaatgttagacttaaaaccataaaagccctagaagaaaacctaggcaataccattcaggacataggcatgggcaaggacttcatgtctaaaacaccaaaagcaatggcaacaaaagacaaaattgacaaatgggatctaattaaaccaaagagcttctgcacagcaaaagaaactaccatcagagtgaacaggcaacctacaaaatgggagaaaattttcgcaacctactcatctgacaaagggctaatatccagaaactacaatgaactcaaacaaatttacaagaaaaaaacaatcggccccatcaaaaagtgggcagaggatatgaacaggcacttctcaaaagaagacacttatgcagccaaaaaacacatgaaaaaatgctcatcatcactggccatcagagaaatgcaaatcaaaaccacaatgagataccatctcacaccagttagaatggtgatcattaaaaagtcaggaaacaacaggtgctggagaggatgtggagaaacaggaacactttcacactgttggtgggactgtaaactaatcaaccattgtggaatttttgagagattaaggaccgaagactggtggggactcataaatgatacaagtaaagtattagccacaacagaagaaaaaggggtgcccaaacgcataatcttgaaatttgatgtctgtgctgtcattaatagca

SEQ ID NO: 10442 - DNA, 501 bp, Homo sapiens
  SIMILAR (70)..(441): 861254mologous to Plasmid F resolvase,accession number AP001918,Smith-Waterman Score=522.
atgttcgccaaaaggaggcccagggcttcccggcatcaacagggacaccaggatttatttattctgcgaagtgatcttccgtcacaggtatttattcgctttatttttttggagcggcgtaaccggcgcacacgaaggacagagaaagcgcggatctgggaagggacggacagaacggtcaagacctggattggggaggcggttgccgccgctgctgctgacggtgtgacgttctctgttccggtcacaccacatacgttccgccattcctatgcgatgcacatgctggatgccggtataccgctgaaagttctgccaagcctgatgggacataaatccatcagctcaacgggagtgtacacgaaggtttttgcgcttgaggtggctgcccggcaccgggtgcaatttgcgatgccggaatctgatgccgttgccatgctgaacaattatcctgagaataaatgccttggcccttatatggaaatgccgcaactgagttga

SEQ ID NO: 10443 - DNA, 3678 bp, Homo sapiens
atgtgggcgttattcatgataagaaatgtgaaaaaacaaagacctgttaatctggacctacagaccatccggttccccatcacggcgatagcgtccattctccatcgcgtttccggtgtgatcacctttgttgcagtgggcatcctgctgtggcttctggagtacagactctcttacctgaagggttcgagcaagcttcgcgattatgggcagctcttgactctagagatcccggctgctctcttgcctatccataccggcattgttaaccagaatatcaactgtaccgaaacgctcacagcaagcagcgataatcttctgcggcgcgccttctgcggtgatacccacctgcatgaagtccacctcaacaccctgtttttcaatcatttcctttgtttcgccgttatctttgacgaaactaggaataaagatatttgcgccacgtctggccagcacgctcactttgtcgataagaaacgcaaacgcgaattgctgtcgcacatgattgggaaagggaactggcagcaggtgctggtgtttacccgtaccaaacacggcgctaaccatctggctgaacagctcaataaagatggcatccgtagtgcggcgatccacggcaataaatcgcaaggtgcgcgtactcgtgcgctggctgattttaaatcgggcgatattcgtgtactggtggcaactgacatcgctgcggcggcctggatattgaagagctgccgcacgtcgtcaactatgaactgccaaacgtacctgaagattatgtccaccgtatcgggcgtaccggtcgtgcggctgctaccggtgaagcgttgtcgctggtccgtagtttcttcgattggtgcgatgattgcgccgccgctggtggtatgggcaatcgtaatgcacagctggcagatggcatttatcatctccggtgcattgagctttatctgggcgatggcatggctgattttctataaacatccgcgcgaccagaagcatctgaccgatgaagaacgcgactatactattaatggtcaggaagcccagcaccaggtgagcacggcgaagaaaatgtccgttggtcagatcctgcgtaaccgtcagttctggggtatcgcgctgccggtgttcctggcagaaccggcctggggtacttttgacgcgtggatcccgctgttcatgtttaaagtttacggctttaacctgatagagatcgcgatgttcgcctggatgccgatgctgtttgctgacctcggttgtatcctcggtggttacctgccgccgctgttccagcgttggtttgatggtcgtaacgctgggtacagtgctgatgattgccccggtatgatcggcctgttcacaacccgtatgtcgccattatgccgcctttatcggtggtttttcccacaggcactgtctggctccctgaataccgtcttcccaatctggctgcgggtatttaccgtcgcgaagcatctccagagggcgggttattgtcatggcatctgtaccggcgaagggctggaaattgtcggacagggtgactgtgtcattgtgcagtgggatgcgaacagtaacggtatctgggatcgcgaaccggtaaaagagtccgaccagattggatttcgtctgaaggagcatgtgctggaaacgctacgcggtgcgacatcctgtgaaggtaagggctgggataaagtcactaatccggatgccatcattatcgacacttttcaggtcgtacgtcaggatgtcagcggcttctcgccggtgttgacggttaatatgcgtgctgccagaatgagccaacaggatcgcagttttgcctctcgcgtgagcatggaaagtcagtcattgcgccgccaggccatcgttcagtcggcgctggcgtggggaaaaatgcactgctggcagacgcagccagcagttcagtgctcgcagtacgctgaaaccgatgcccagtccgcgttcttgcgccagtatcgggctttatcacaactacccgcatgcattgcaccgaagccgcatttatatctccgtgactggatggtagtcgactatctgcccggcgcggtaataacgtatttgccggataccaacgaactggcaggcttgctgtattatctacatcaacaaccacgttttggctggcgaataacgcctgtttccgttactggaactgtactggcagcaaagcaatccggcgcggcggacatgggttggctgcgaatgtttagacgtctgcgcaaatcgggcaagccacggcctttacccttaagtccattgcatatggatgtccacgccggaaatttagtgcatagcgcgtcagggctaaaactcatcgactgggagtatgccggagatggggatatcgcgctggaatctggcggcggtggtggtttgagtaccgctggcgacaaaccggcgatcgacaatttatcaggctggccgatgacagctggcggcagctacaataggagcaataaggagagcagtgtgggtccagtaatgttggatgtcgaaggttacgaactggacgcggaagcgcgtgaaatactggcgcatccgctggtgggagggctgagtctctttacgcgtaaccatcatgatcctgccccaggtccgtggttaattcctgatgatgcaaagttacatcgcaaactgttgcgctggtacagctcggtgcaaacaggtatggcggaactcattcctgtcgctcaacagtggcaaacggaagaaccagaaagcgaagatgcccgggcggtgatggctatcgccggagccacaacggctgcgatgacggtcgcgggattcagcctgccgattgttttgttaagcgccctgggcaccggcatcctggcgggattgtggaacggcatactgatcgtcacgtttaactcgccggatctctcatggttcggcagtggatcgctgttgttcctgccaacgccggtcattatcgcggtgctgacgcttatcctgttctggctgttgacccgcaaaacggcgctggggatgtttatcgaagccgttggtatcaacattcgggcggcaaaaaatgccggggtaaacacgcgaatcatcgtcatgctcacttatgtgttgagcgggctgtgtgcggcgattgcgggcattatcgtggcggcggatattcgcggtgccgatgccaacaacgctgggttatggctggagctggacgccattctcgcggtggtgattggcggcggatcgctgatgggcgggcgctttaacctgctactttcggtggtgggggcgctgattattcaggggatgaacaccggaattttgctttcgggctttccgccagagatgaaccaggtggtgaaagcggtggtggtgctttgcgtgctgattgttcagtcgcaacgctttatcagtctgattaaaggagtacgtagccgtgataaaacgcctggtttctggtgcttatatcgctttgatccgcgtcgtgccgatgaaggcaaactgccgctggccttggattcacgcccgccgtcagaagcaccggaagaaacgttacttcacgagcaacgtttccgtcggctgaattcgcagcagccagaagtggcagaacagttatggaaagatgctgcagctgatttgcaaaaacgctatgacttcctggcacaaatggccggaaaagcggaaaaaagcaacaccgattaa

SEQ ID NO: 10444 - DNA, 2862 bp, Homo sapiens
  SIMILAR (187)..(684): 371254mologous to Rattus norvegicus D-beta-hydroxybutyrate dehydrogenase,accession number M89902,Smith-Waterman Score=191.
atgtctttcgattctttgggtttaagccctgatatcctgcgcgccgttgccgagcagggttaccgtgaacccacccctattcagcagcaggcgatccctgcggtgctggaaggccgcgacctgatggctagcgcccagaccggcaccggcaaaacagcgggctttacgctgccgctgttgcaacacctgatcactcgccagccgcacgccaaagggcgtcgtccggtacgtgcgctcattcttaccccgacccgtgaactggcggcgcagattggcgaaaacgtccgtgattacagcaaatacctgaacattcgttcgctggtggtgtttggtggtgtgagtattaacccgcagatgatgaaactggcgtggcggcgttgatgtgctggtggcaaccccgggacgtttgctggacctggaacatcagaatgcagtgaagctggatcaggttgaaatcctcgtcctcgatgaagctgaccgcatgctcgacatgggctttatccacgatatccgtcgcgtgttaacaaaactacctgcgaagcgccagaacctgttattctccgcgaccttctctgacgatattaaagccctggcggaaaaactgttgcacaacccgctggaaatcgaagtggcacgccgcaataccgcgtctgatcaggtgacccagcacgttcactttgtcgataagaaacgcaaacgcgaattgctgtcgcacatgattgggaaagggatactggcagcaggtgctggtgtttacccgtaccaaacacggcgctaaccatctggctgaacagctcaataaagatggcatccgtagagcggcgaaacacggaaataaatgcaagtgcgcgtactccaagttccagaaaccgtcaccccacattttcaccatgctgatcggcgtttgtggtgttaaccaaagcgcgatcacgaatgttagcaatgtcagcaacatggcaaagatcagtggatcgggaagccaccggctgacaaaacgcgtcataaaacgcgatatgcgaccaatcataaatcaccccgttgcgtattcagatcggcggcgacttcaaaccgagcttctgttttggcacgcacggtggctaaatcacacccgtcggcaatttcgaattaaagagggcgataacggcggccagtgcttcctcttcctgtggaccggtcgcttcaacttcaatctgccgtcctttggcagaatccaacatcagcagcgcaataacgctgttggcttcagcctcggtgccttcgtcattaccttcattgcaggccgggcatgcatgcccagcttgtttgtgatttcaacagtttgcttgacggtcatggtttacgtttttccagcgtacgatggcgtgactggacgtttttaccgcgcgagcggaagtagtctgccagttgctctgcaatatacaccgaacggtgcttcccgccggtacaaccaatggcgaccgtcaaggatgttgtcgtccctgaaaaagcaaaaatggagaaaaggaatgagtgaatcattacatctgacccgcaatggatcaattctggaaattacccttgatcgtccaaaagcgaatgctattgatgcaaaaaccagctttgaaatgggcgaagtatttctaaatttccgtgacgatccgcaattacgtgtcgccattattaccggtgccggagagaagttcttttccgcgggctgggatttaaaagcggcagcagaaggcgaagcaccggatgctgactttggtccgggtggttttgcgggattaaccgaaattttcaatctcgacaaaccggttatcgcagctgtgaacggctatgcctttggcggcggctttgaactggcgctggcggcagattttattgtttgtgccgataacgccagcttcgccctgccggaagccaaactgggcatcgttcctgacagcggcggtgtgctgcgtctgccgaagatcctgccgcctgccatcgtcaatgaaatggtgatgaccggcagacgaatgggcgcagaagaggcgctgcgttgggggatagtcaaccgcgtggttagccaggcggaactgatggataacgcccgcgaactggctcagcagctggttaacagcgccccgctggcgattgcggcgctgaaagagatctaccggactagccaacgacctgccggtagacagaagcgtatcgctatattcgcagcggcgtgttgaaacactatccatcggttctgcattcggaagatgccattgaagggccgctggcgtttgccgagaagcgcgatccggtgtggaaaggacgttaacaaccgtgagctattacgcctttgaggggttaattccggtggttcacccgacggcgtttgtccatcccagtgccgtcttgattggcgatgtgattgtgggagccggtgtttacatcggcccactcgcctcactgcgtggtgaatacgggcggttgatcgtgcaagcgggagccaatattcaggatggctgcactacgcatggctactgcgacactgacactatcgttggggaaaacggccatatcgggcacggagcgatcctgcatggttgtttgattggtcgcgatgcattggtcgggatgaacagcgtgattatggatggcgcggtcattggcgaagagagcattgttgccgccatgagctttgtcaaagcgggctttcgcggcgagaaacgccagttgttgatgggtacgccagcccgcgctgtacgcaatgttagtgacgacgagttacactggaaacggttgaataccaaagagtatcaaggatcttgtcgggcgcttgcatgtatcggttacatgaaaaggaagcactgaggcaattggaggaaaaatcgccccccgtttgcc

SEQ ID NO: 10445 - DNA, 290 bp, Homo sapiens
atgtgcgagaaaaatcttgcctacgcgcacaaggtgaaggccgcactggaaaaaggcgcatcgccgggcgacttcccgcgcgaggactatgaaacaaactgggaaggkacgctttacgcttgccgacctcaacattcacggtaagcgagcgttgggcatggatgtttgagaattaatggaagtgaattgatgtgggattaagaaaatcgattcgacgttactcagattgctgacaaatgcgctttgttaatgcctgatgcggcgttaacgccttatccggcctacaaagt

SEQ ID NO: 10446 - DNA, 3861 bp, Homo sapiens
  SIMILAR (90)..(365): 721254mologous to Homo sapiens Human thyrotropin GPR N- terminal sequence,accession number W03626,Smith-Waterman Score=321.
atgatgaccccggtcacttttgaacccgctaccctgcggcgcgccttgacgaccgttatttgcgaccctcatgaaatcgtcaacgtgatgggcgaagccggattcgcctggtttgcccgctgtgccgaacaggcaaggcaaaaccagtacttacaggtcagctcttgcgtacccgccctggaaggctgcgatgttaacggtgccagttttacccttgaacagatgctcgcctggcgggaccatccgcaggttaccggccttgcagaaatgatggactaccctggcgtaattagcgggcagaatgcgctgctcgataaactggatgcatttcgccacctgacgctggacggtcactgcccgggtttgggtggtaaagaacttaacgcctatattactgcgggtattgaaaactgccacgaaagttatcagctggaagaaggacgccggaaattacaactcggcatgtcgttgatgatccgcgaagggtccgctgcccgcaatctcaacgcgctggcaccgttgatcaacgaatttaacagcccgcaatgcatgctctgtaccgatgaccgtaacccgtgggagatcgcccatgaaggacacatcgatgccttaattcgccgcctgatcgaacaacacaatgtgccgctgcatgtggcatatcgcgtcgccagctggtcgacggcgcgccactttggtctgaatcacctcggcttactggcacccggcaagcaggccgatatcgtcctgttgagcgatgcgcgtaaggtcacggtgcagcaggtactggtgaaaggcgagccgattgatgcgcaaaccttacaggcggaagagtcggcgagactggcacaatccgctccgccatatggcaacaccattgcccgccagccagtttccgccagcgactttgccctgcaatttacgcccggaaaacgctatcgggtcattgacgtcatccataacgaattgattacgcactcccactccagcgtctacagcgaaaatggttttgatcgcgatgatgtgagctttattgccgtacttgagcgttacgggccacggctggctccggcttgtggtttgcttggcggctttggactgaatgaagtccccggcagctgctgccagaactgctccgtgctaaataaaagttgcgaccaggaccgttcatcactggcattaagcgccgcccgggttagcggtattcccattgccatcacccagcgaacctgcgttcagcagttctgccaggctggcagatgcgtcttctgcagtcacctgcggtgcagccggagcttcacccgcagcacggcgacgcatacgatcctggtggtacgcgtaaccggtacctgccgggatcagacgacccacgataacgttctctttcaggccgcgcagttcgtcgcgtttgcccgcaacggctgcttcggtcagcacgcgagtggtctcctggaacgatgccgcggagatgaaggactcggttgccagagacgctttggtgatacccagcagatcgcgggagtaagttgcacccactttgccgttcgcttccagttcgcggtttgcgatcttgacgcgagagtattcaacctgttcgccttccaggaagtcggagctacccgcgttaacgatggtagctttacgcagcatctgacgaacgataacttcgatgtgtttatcgttaatcttaacgccctgcagacggtatacgtcctgtacttcgttaacgatgtaacgagtaacagcatgaacaccacgcagacgcagaatgtcgtgcggcgcttccggaccgtcggaaattacgtcaccacgttctacacgttcaccttcgaacacgttgagctgacgccatttcggaatcatctcttcgtacggatcgctaccgtctaccggggtgataaccagacgacgtttacctttggtttctttaccgaaggaaacgataccgctgatttcagccaggattgccggctctttcggacgacgtgcttcgaacaggtccgcaacgcgcggcagaccaccggtgatgtccttggtaccgccggattcctgcggaaacgcgccagggtgtcaccagacattgcttcacccgacgtggtggagttctctgctttttaccactgtcccctgtgctgcttgttttgtgtgagtgtgctaacgtttatcttctttaagcccctggtagaagcaatgaagacgtttttcagaacagtgttattcggcagcctgatggccgtctgcgcaaacagttacgcgctcagcgagtctgaagccgaagatatggccgatttaacggcagtttttgtctttctgaagaacgattgtggttaccagaacttacctaacgggcaaattcgtcgcgcactggtctttttcgctcagcaaaaccagtgggacctcagtaattacgacaccttcgacatgaaagccctcgaaatattgaccgtgcatccgcggtcaatgttagctattatgttgcgccctttttttacgggtgttaacaaaggaggtatcaacccatggccgaaaaaaaacagtggcatgaaacgctacacgaccagtttgggcagtactttgcgtagatacgttcggtccaggctactctatgtgtatgggagaacagccagaataggccgattaacgtggtggggcaaagacgcctgttatcggggaacggccggtaaggtgtgtgccgggaacaaaatcccagggcttaaattcccgcatggtcaaaagaactgcgcgcaatgctgccggattgctgaaagcgatccttttggtcatgagcttggggctttacacggtgccagcgcccagcgtatcggtcgttttgaactggcggataaaagctccctgttcctcgacgaagtgggcgatatgccactggagttacagccgaagttgctgcgtgtattgcaggaacaggagtttgaacgtctcggcagcaacaaaatcattcagacggacgtgcgtctaatcgccgcgactaaccgcgatctgaaaaaaatggtcgccgaccgtgagttccgtagcgatctctattaccgcctgaacgtattcccgattcacctgccgccactacgcgagcgtccggaagatattccgctgctggcgaaagcctttaccttcaaaattgcccgtcgtctggggcgcaatatcgacagcattcctgccgagacgctgcgcaccttgagcaacatggagtggccgggtaacgtacgcgaactggaaaacgtcattgagcgcgcggtattgctaacacgcggtaacgtgctgcagctgtcattgccagatattgttttaccggaacctgaaacgccgcctgccgcaacggttgtcgccctggagggcgaagatgaatatcagttgattgtgcgcgtgctgaaagaaaccaacggcgtggctggtaacagtgcaccggacactgcttacaggctggtttctcttcgccgaacacacatttatccagccgcttttgcgcgtaaacaaacaacgcctcgtaatgctccgctccgctacgcctgcggtaccgacttgacgtgcgcgtatgttatcggcgggatgaagcgccgtttaatgattgcccgtgcgttaatgcatgaacctaaactactgattctcgacgaaccgaccgcaggcgtggatattgaacttcgccgctcaatgtggggctttttgaaggatttaaacgacaaaggcaccaccatcattctcaccacacactacctggaagaagcagaaatgctgtgccgcaatatcggcattattcaacacggtgagctggtggaaaatacctcgatgaaggcgctgctggcgaagctgaaatcggaaacctttattctcgatctcgcacgcggaatatag

SEQ ID NO: 10447 - DNA, 7410 bp, Homo sapiens
  SIMILAR (1)..(684): 981254mologous to Mus musculus reverse transcriptase,accession number D84391,Smith-Waterman Score=1238.
atgccgcatccgggctgcaaaaccaatgggctgacgacttaccccaactgcttacgcgcattgcggaaaatgcgcatccatgggccatcctcgccccagttttccggatgccaggagttgctgacagtacggaaaacacgttccgggtgcggcatcataatggtgactcgaccactttcagtcgtgactgccgtaataccgttcggtgaaccgttcgggttagccggtgactttgccgaagttatcgacatagcgcagtgccaccagccctttgctttccagtgccgccagatgcgccgcatcacgcacttccacgcgcccttcaccatgagagacagcaatcggcatttgcgagcccaacatcccctgcaacagcagagacgggctttgggttacttcaaccaggctgaaacgcgcttcaaagcgatcggaggtattgcgcacaaaacgtggccacaactcactacctgggatcagttcacgcagattagacatcatctggcaaccgttacatacccccagcgccagcgtttgcggacggtggaagaaggttgcaaactcatcgcgtacacgcacatcaccgtaggagaaaccaccgcacgcgaccagggcgtggaaatcttccaggcccgtgcgtccggtcagcaggtcactcatatgcacgtcgatagcatcaaagcctgcacggtggaaagctgccgccatttcaacatgcgagttcacgccctgctcacgcagtacggcaactttcggacgtgcgccagtggcaatatacggtgctgccacatcttcgttgatatcgaacgacagttttacattcaggcccggatcggcgtcgttagatttcgcctgatgctcctgatcggcacactccgggttgtcacgcaggcgctgcatctgccaggtagtttctgcccaccagacacgcaacgtggtgcggctttcgctgaatacagtctgcccgttggcggtaatcacaaaacggtcaccggaaaccgcctgccctacataatggacacaatcagcaagcccatgctgtgccagtacggactcgaccgcttcacggtcagcggcacgaacctgaatcaccgcacccagttcttcgttaaacaacgccgccaggcgatcgtcacccagagtggcgatatccgcgtcaatgccacaatgaccagcaaaggccatttccgccagcgttaccagcaggccgccatcagagcggtcgtgatacgccagcagcttacgctgtgcaaccagcgcctgaatcgcgtcatagaagcctttcagttgcgcgacatcgcgtacatctgccggtttgtcgccaagctgacgataaacctgcgccagcgccgttgcgcccagcgcgttattgcctttgcccaaatcaatcagcagcagtgcgtatcttcggtagaaagctgcggcgtgatggcgtcagcggagccggagcattacgaggcgttgtttgtttacgcgcaaaagcggctggataaatgtgtgttcggcgaagagaaaccagcctacgctcggtaccgagctgatctgaccggggagaagatacgccccaacacatcgtccacttccgccagcggctggcagagattttcccaggtgtacggtgccccttgcgctactacgcgctccacgttttcgcggcagtcgttcaatgccttagtcacggctggaacgacatgttccgggagaattttagaaaacggaggcaattcaaagggagtcagtaacggattcgtcattcgcgcagtcctggttaaagagagcctgatcatcgagtcgctgaaagagaaagataaaccgtttctctatctcgacacccacgcaggggccgggcgttatcagttaggcagcgaacatgccgagcgtaccggcgaatatctcgaaggcatcgcccgtatctggcagcaggacgatttgcccgcagaactggaggcgtacatcaatgtggtaaaacacttcaaccgtagcggtcagttgcgttactaccccggttcgccgttgattgctcgcctgctactgcgtgaacaggacagcctgcaactgaccgaactgcacccgagcgattacccgttgttgcgttctgaatttcagaaagatagccgtgcgcgtgtcgaaaaagccgacggtttccagcagcttaaggccaaactgccgccggtttcccgccgtggtttaatccttatcgacccgccgtatgacatgaaaactgactatcaagcggtggtcagcgggatagcagaaggttacaaacgtttcgccactggtatttacgcactgtggtatccggtggtgctgcgtcagcaaattaagcgcatgatccacgatctggaagcgaccggtattcgcaaaattctgcaaattgaactggcggtactgccagacagcgatcgccgtggcatgaccgcttccggcatgattgtgattaacccgccgtggaaactggaacaacagatgaataacgtgctgccgtggctgcacagcaaactggttccggcaggcaccgggcacgccaccctggatcgtgccggagtaattgcagccattgctggcacctattacgtctcgcgctacaatcgcggacactttgtcatgactaaacactatgattacatcgccatcggcggcggcagcggcggtatcgcctccatcaaccgcgcggctatgtacggccagaaatgtgcgctgattgaagccaaagagctgggcggcacctgcgtaaatgttggctgtgtgccgaaaaaagtgatgtggcacgcggcgcaaatccgtgaagcgatccatatgtacggcccggattatggttttgataccactatcaataaattcaactgggaaacgttgatcgccagccgtaccgcctatatcgaccgtattcatacttcctatgaaaacgtgctcggtaaaaataacgttgatgtaatcaaaggctttgcccgcttcgttgatgccaaaacgctggagtgcgatcccttttatatattttctgcattgttattctttattccattcgccttaatgatggctgaaatgggagctgcttatcgcaaagaagaaggcggtatctattcctggatgaataatagtgtcggaccacgttttgccttcattggtacgtttatgtggttttcctcttatatcatctggatggtgagtacctccgcgaaagtttgggtaccgttctcaacattcctctatggtagcgacatgacccagcactggcgtattgccggactggagcctacgcaggtggttggtctgctggctgtggcatggatgattctggtcaccgtcgttgcttctaaggggattaataaaattgcccgcattactgcggtgggcggtattgcagtaatgtgtctgaatttagtattgctgttagtaagcattactattttgttattaaatggtgggcatttcgcgcaggatattaatttccttgcatcaccgaacccgggttatcagtccggtctggcaatgctatcgtttgtggtatttgccatttttgcctatggcggaattgaagcggttggtggtctggtcgataaaacggaaaatccagaaaagaactttgccaaaggtattgtttttgccgctattgttatttcaatcggttattcgctggcaatatttttatggggcgtcagcacaaactggcagcaggtattaagtaatggttccgttaacctcggcaatattacctatgtgctgatgaagagccttgggatgacgctgggtaatgcactgcatttgtcacctgaagcgtcattgtcgctgggcgtatggtttgcgcgtattactggactttcgatgttcctcgcctataccggtgcgttctttacgctttgctattcaccgttgaaagccatcatccaggggacgccgaaagcattgtggccggaaccgatgacgcgcctgaatgcgatggggatgccgtctatcgccatgtggatgcagtgcgggttggttactgtcttcatcctgctggtttcgtttggtggcggtaccgcatcggcgttctttaacaagctgacgctgatggcgaacgtgtctatgacgcttccttacctgttcctcgcgctggctttcccgttctttaaagcacgtcaggatctcgacagaccgtttgtgattttcaaaacgcatttgtcggcaatgattgcgacagtggttgtcgtactggtggtgacatttgcgaacgtcttcaccatcattcaacctgtggttgaagccggagactgggatatggtatcagctcggtacctgcaacatatcgtcgtgcggcacttctcctttcaacgcgtgagagttgaaatcgcagtacgggcatttctgcacgcaccacgggatgtgaatgtagagactcagcggagcgtccagcagcagtttcaacgcctgaccacggtgggaaatggcgctcttttcttcgcgggtcagttcggcggcggttttcccttcggaaggtacgaagaagattggatcataaccaaagccaccagtgcccgctggttcacgagtaatcacgcccggccagctaccgtggcataccagcggagtgggatcttccgcgtgacgcagatataccagcacgcagtggaaacgcgcctgacgttggtcgtccggtacgtctttcattgtttccagcagtttttgcagattcttttgatcggtcgcgtcttcaccggaataacgcgcggagtaaatgcccggcgcgccgccaagcacatctaccgccagaccagagtcgtcggcaattgccggactggtgaaggcgtggacgtgctgcgtaaccatctcaaacagagcatgggctttgacaccaacatggaaggcggcttcctggcgcgtcgtcgccacctacaggcgctggaacaggcagcggaacatctacaacagggcaaagcgcaactgttgggagcctgggcaggtgaactgctggcggaagagttgcgtctggcacagcagaacttaagcgaaatcaccggggaatttacttcagacgacctgctggggcggattttctccagcttctgtattgaggcaattattaaatccggtatgaacccgttcctgctggatagcgaagatgtttttatcgatttactgaccgacagcggcaccggggcggtgacgcagagcatgcaggctgcgatgatgcgcggcgacgaagcctacagcggcagtcagacgaacaatgacaacgcggcgcatgagctggaaagtcaggccgctacttcagttactaatggcgcacatatttatcctttcaaaacttctcacataggcgagctggctaccgtgaatcctggaaccgatctcaccgtcgttgatgccagtggcaaacagccgatcgttctgttgcagggttatcaaatgcagggcagtgaaaacacgctctacctggcggcaggtcaacggctggcgctagccacattaagtgaagaaggtatcaaggcgctcactgtaaacggggaatggcaggctgacgaatacggcaatcaatggcgtcaggcgtctttacagggtgcgcttaccgatcccgcattagcggaccgtaaaccgctatggcaatacgctgaaaaacttgacgatacctattgcgctggttgtcatgcccctattgccgccgaccattacaccgtcaatgcgtggccgtccattgccaaaggaatgggggcacgaaccagcatgagcgaaaacgaactggacattttaacgcggtatttccagtacaacgccaaagatattaccgagaaacacggtattgccgctggagcgctggtggtgacatcggcagcaccgctccccgcatgggcagaagagaagggcggtaaaatcctcaccgcgggacgttggggagcgatgaacgtagaagtgaaggacggcaagattgtttcttcaacaggcgcgctggcgaaaaccataccgaattccttacagtctacggcggcggatcaggtacacaccacggcgcgtattcagcatccgatggtgagaaaaagctatctcgataatccactgcaaccggcgaaaggtcgtggcgaagatacctatgtacaggtgagctgggaacaggcattaaaactgattcatgagcaacatgatcgtattcgtaaagctaacggaccatcggccatttttgccggatcttacggctggcgctcttctggcgtgttgcataaagcgcaaaccttactgcaacgttatatgaacctggcgggcggttattccgggcatagcggcgattattcaaccggggcagcacaggtgatcatgccgcatgtggtcggttctgtagaggtgtatgaacagcagacctcctggccgctgattctggaaaacagccaggttgtggtgctgtggggaatgaacccgctgaataccttaaaaattgcctggagcagtaccgatgagcaagggctggaatacttccatcagctgaaaaaatctggcaaaccagtgattgccattgatcctatccgctccgaaaccatcgaattctttgacgataatgccacctggatcgcgccgaatatgggcaccgacgtggcactgatgttagggattgcgcataccctgatgacacaaggcaaacacgataaagtgttccttgaaaaatacactaccgggtatccgcagtttgaagagtatctgacaggtaagagcgataatacgccgaagagcgcggtctgggcggcggaaattactggcgtaccggaagcgcagatagtcaaactcgctgaactgatggcggcgaatcgcacaatgctgatggcaggctggggaattcagcgccagcaatatggtgaacagaaacacgcgggattcatacagcggccagccatccgtcatccatatcaccacgtcaaaggtgcgttcaccgaatacgtgcgcaacaaccgtcttccggagactgtcatacgcgtaaaacagccagcgctggcgcgatttagccccgacatagccccactgttcgtccatttccgcgcagacgatgacgtcactgcccggctcccggatgtttcacgtacctatgtcgaatatctggccgataaggttgcggatcgagaagaggatgcagaggaatatctggaagcaatcatggaggctcgtgttaccgttgctggcatggggctggtgatggaggtgcaggattacttcgatggcgaggccgatagactggcgaaggcgtggctggccgagtacacaccgcaaatcaagtcgttgaaagatgagcgtaaagaggcctatcgtcaaatcgtcgaaatgagtaccgaaccgcaggatgtggatctgcgctttatcgagacggggataaataacaaaatggcgataatcgctcagccccagctcttctgcgctggtgccgatattgtctgcgagtgcgctggtactcaataa

SEQ ID NO: 10448 - DNA, 1136 bp, Homo sapiens
  SIMILAR (483)..(659): 891254mologous to Escherichia coli f772,accession number L10328,Smith-Waterman Score=262.
ctagtgtggtcctgctccttgtgactgctgtgtctgtgtggtgctgtgtgttcgccccgtgtagtgccctgtggtgtaccgcttctgccctgtcaagccatgtgtcgtaagctgcgtttgttgttgctgcgccactgtgtatatgctaccgctgatgactgaacctataggaggtggttcgtacaactcacatttgaggcaggcaccagtccatgtcttggtgttcatccacaacttcttctcgctcatgaatatggttccaaccaaccacccgtaaacataaatatgacagccactgccggaaggtcgctggcacacctgtggcacaacgatgaactcgacggtagtcgctggcataaacacagcacggcttcctgagtctgcccgtttatgtgcgtgataacactctacgggcgctgggcaacaacgatcaacgtcccgattacgtgtggcacgaaggacggcattccacctcttcaattttaaaagcagcacgtactggcaacacgattactgcgattgatgcgagcgaggccaacaactggacactgtgcctgcgcaatggtgtgaaagtaaatggtctgcaagacggttcgcaggctgaaagtgagcaggggctggtggtgaagcctcaagggaatgcgctgacaattacgttgtaatctattgatggaatgccgggtacgtctgagtcgtacccggcgagattgatgtttaccgcaccggctgcgtcgatgtaacttcaccttacaaccatcgtatagcgccgattttattgacgggacgggaggtagcaatgctaactggtataggtggttctgtggagtaatattaaagcgggtagtaccgaaacccagacagcggcactgccatcgtatagcgccgattttggagcggttggaatagaacattaaggaatagaaagggacgagaaggaggaaaagaggggacccacgtgataatgacatgcggattgcgggggacaaccccagaacactatgagcgggcttggacgaacttaggcctgaggatattctcaatgcccgcgaagttttgttactggtgactggcgaaggaagcaggatgcgacagatcgttttctcacggctaaagtctctaccgctatccggcttcat

SEQ ID NO: 10449 - DNA, 510 bp, Homo sapiens
  SIMILAR (3)..(509): 971254mologous to Homo sapiens dJ616B8.1 (RNA helicase),accession number AL023803,Smith-Waterman Score=848.
tcaagttccacttcatgtcgccttttccagcacattctatggttcaagccttggagtgactgtatgctctgggaggtctggacaaagactgtcgcctaactgaaccgcttggcatgagaatagcagagtttcctttgaatcccatgtttgccaaaatgctgcttgaatcaggaaacttcggctgttctcaggaaattctaagcatcgctgccatgatgcagatccagaatatctttgtggtccccccaaaccataagtctcacgcaattcgagtgcaccgtaaatttgctgtggaggagggcgaccacctcactatgctcaatatatatgaagcatttatcaaacacaataaggactctaaatggtgtcaggaacatttcctgaattacaagggtcttgtcagagctgcgactgtaagagaacaattgaaaaagcttcttgtcaagtttcaagtgcccaggaagtctagtgaaggtgacccggatctggttctgaggtgcattgtctccc

SEQ ID NO: 10450 - DNA, 2901 bp, Homo sapiens
  SIMILAR (707)..(576): 361254mologous to Homo sapiens Human secreted protein, SEQ ID NO: 5993,accession number G01912,Smith-Waterman Score=67.
  misc_feature (1)...(2901): n = a,t,c or g
atgatctggggccgggcgtggtggctcacacctgtaatcccagcactttgggcggccaaagttgcagggagagtagctgaagaaaggggtgcagtgctgggccacgaggtgggctactgcatccgctttgatgactgcaccgaccagctggccacgagaattaagaggctcactgagagcttctctttgattcttagtgtcatcatgctggatgaagcccacgagaggaccttgtacactgacattgccattggcttgctaaaaaagattcagaaaaagcgaggggatcttcgattgattgtagcttcagccactctggatgcagacgaagaggtagaaactgttgtgtcgatgctcatcgagcaggctcgagcactagctcgcactgggatgaagagacacctccgagttctccccatgtatgcaggactgccttcctttgagcaaatgaaagtgtttgaaagggtgtcacgcagtgtcagaaaggtgatagtggccaccaatgtggcagaaacctctatcacaatcagcggcattgtgtatgtgatcgactgtggctttgtgaaactccgagcctacaatcccaggacagctattgaatgcttggtggtggtgccagtctcccaggcatcagctaatcagcgagcaggacgtggtggtcgtagtcgctcgggaaaatgttatcgcctttatacagaggaagcctttgacaagttgcctcagtctacggttcctgagatgcagcgtagtaatttggcacctgtcatcctgcagctgaaagcactaggaattgacaatgtcctcaggttccacttcatgtcgccccctccagcacagtcgatggttcaagccttggagttactgtatgctcttgggaggtctggacaaagactgtcgcctaactgaaccgcttggcatgagaattgcagagtttcctttgaatcccatgtttgccaaaatgctgcttgaatcaggaaacttcggctgttctcaggaaattctaagcatcgctgccatgatgcagatccagaatatctttgtggtccccccaaaccagaagtctcacgcaattcgagtgcaccgtaaatttgctgtggaggagggcgaccacctcactatgctcaatatatatgaagcatttatcaaagtaagcacaactactgctcgaagtgccgcctcaacacaccaccctctggagcacaataaggactctaaatggtgtcaggaacatttcctgaattacaagggtcttgtcagagctgcgactgtaagagaacaattgaaaaagcttcttgtcaagtttcaagtgcccaggaagtctagtgaaggtgacccggatctggttctgaggtgcattgtctccggcttcgttcgccaatgcagcgaggtttcattctactggagcttataggaccatccgtgatgaccatgagctgcacatacaccctgcgtcagtcctctatgcagagaagccgcctcgctgggtcatctataacgaagttattacagacctccaagtactacatgagagatgtgactgccattgaatcggcctgggctgttgggagctggctccacactttttattcaacaagggaacgcacctgttctctggaaagccaaaaggggccaaggtccagggacccgttgaggagggagcccacagtttacagttgcagggactgctggcgtcctctcctccatgctgctgcccctggtcccaggtggggtgagctggcaccagctcctgtggaatgtttggttgctctgaagtgggctgcggcctgttcattagtcctttcttcccgctgcccacagcatttgcatccttgctgggatcctggaggactttgtgcatgggcaggcatccttctgtgctgcagcgggcagagtgggagttggctcactcagcacgctcactaacccagcatgccacttccagcaggcatgcagtcctggcccagctctatgggaaacaaggaggaaagttagccactgaaggccaaaacaccatgtggggtggacagagggtttgctgggctggctttgctttccctgctggggccacagctgtgttaaccaatgaggtcttgctgccaggtgtgaacaagcatgtctctacgaatttgaacgaaacattggggatttctcctgccgaaaccaccaaagggcactgtctgaattgggcacaaggtgtctcccaaacccagtgnagcttctgtctggtcctcagcccctcgctccctgtttatctgcaagccgaggagacttgcaagggattggtgattgacagagaggactcgtgcgctgttttgtgttagcagaggatttgtgtttcacaggtaggcttagcgtcctctcagagtgtagtgccaggtcctgggtgccacgcctagctgagcacttcaggagagttcatcaagctcagatcccacaagggcctcctcttttagcaggaattcacaaacagtttggaagccccctaaacttctgtaagccccaggaaacatccactggtgtaaattgtttttttgtttgtttgccttgggttccttgccaaagaagccgccgtggggacagttccttcccagcaggccactggttttgtntgcccccagggcctgctttgcctgtgatgatgattgcatttcaacacatgcccagatgcagattttttccccccttactgtttccaatgacctttattttaaaaacacatagcttgaaaatttatttttatactgatattagtttggatgtgcccacttttggcaccaaacgtgtatgcccgtttttatttccattttataaacatgtaaataatagtgataacttgttaataatagtaaacctttatacctaaagtaaatgtcttccctcccacaaaaaaaacaaaaaaaa

SEQ ID NO: 10451 - DNA, 414 bp, Homo sapiens
  SIMILAR (74)..(166): 481254mologous to Homo sapiens Human secreted protein, SEQ ID NO: 6834,accession number G02753,Smith-Waterman Score=94.
caggaacttgtcccttctacctctgcccaccagaaacctgggtatctagacccttcctcctaacctccaaccgaggcaatgacctcctgctgaagctcctgcagcatcggtatccccgggtgatggcagaggagggtcttcgagtggtgaggcagtggttggaggcctcctcacagctggaggaagcctcaatttatagccgatgggaggtggaagaggactggtgtctgtctgtcctccgctcctaccaggcagaacacgggcccgacttcccctggagcgtgggggaggacatgagtgcagatggacggcggcagctggctttgtttctggctcggaagcatctgcacaactttgaaggcacttactggaacccaattcccaagcccaaaactttcaaaaggccctggcacc

SEQ ID NO: 10452 - DNA, 1445 bp, Homo sapiens
  SIMILAR (1)..(669): 1001254mologous to Homo sapiens BAT5,accession number AF129756,Smith-Waterman Score=1183.
gggggcccttcccgccggggtgtggccctgcttcgcccagagcccctgcaccgggggacagcagacaccctcctcaaccgggttaagaagctgccttgtcagatcaccagctacctggtggcgcacaccctagggcgccggatgctgtatccaggctctgtgtacctgctgcagaaggccctcatgcctgtgctgctgcagggccaggcccgactggtggaagagtgtaatgggcgccgggcaaagctgctggcctgtgatggcaatgagattgacaccatgtttgtggaccggcgggggacagctgagccccagggacagaagctggtgatctgctgtgaggggaatgctgggttttatgaggtgggctgcgtctccacgcccctggaagctggatattcagtcctgggctggaatcatccaggctttgctggaagcacgggggtgccattcccgcagaatgaggctaatgccatggatgtggtggtccagtttgccatccaccgcctgggcttccagccccaggacatcatcatctacgcctggtccatcggcggcttcactgccacgtgggcagccatgtcctacccagatgttagtgccatgatcctggatgcctcctttgatgacctggtgcccttggccttgaaggtcatgccagacagctggagtgagtgcagctcccaggcctgcccttcctgggaaggggtgggctggaactgggaactgttctgagatggctcccttttcttgggtggggagtaagtcgccccattgttggaagcaggaggactcctttgtctgggggcctcagttttctttctccgtgaatagtgaggacctttatgttgggcaagggctttgtctctgccatcccttcacctttatcccactctagggggcctggtgaccaggaccgtgaggcagcatctcaatctaaacaacgcggaagcttgtgcagataccagggtcctgtactgctgatccggagaaccaaggatgagatcatcaccaccacgtgagtgcgtgcgtgggaatctcggccctcaggaaccccagagatggccaggaacttgtcccttctacctctgcccaccagaaacctgggtatctagacccttcctcctaacctccagcccctccagggtacattcttcttcacccccagggttcctgaggacatcatgtccaaccgaggcaatgacctcctgctgaagctcctgccagcatcggtgagagccagggtgtgtgcgcgctgggggcagtgtacacacacagatactgataccagcacagggaaggagggaggaaggttcagggatggtgaatgaaaaaaaatcagccctgacctgtcctggcacttcctccgtagtatccccgggtgatggcagaggagggtcttcgagtggtgaggcagtggttggaggcctctcacagctggagga

SEQ ID NO: 10453 - DNA, 1598 bp, Homo sapiens
  SIMILAR (555)..(148): 831254mologous to Homo sapiens geranylgeranyltransferase type I beta-subunit,accession number L25441,Smith-Waterman Score=562.
atgggcacctccagcatcttcctctgcgtgctgttcctctgtggggcactgggtctcaccatgtcccctgcccggggaaggctccgctgctacatctgtggcttcaccaaaccctgccaccctgttcccaccgagtgtcgggacgatgaagcttgtggcatcagtattggcacttcaggttgtcgaggaatcttccaggtgccagatggccagcgagacagcaggtcacacttcccagcagatgtcaccaaaatcacctgggcttgtgggcagtcccctccaggatttaagcctctgttccctagctgttcctcacccaagacgggccaaatggatgttctcatagacctggatttcgggtttgaactgaggaatcgaggcatctggggagaaggagccatcagggatacagaagagaagtcagcagacaacttagagccgtgttcctcgccccctcccctagaggaggtgatctgctgtgaggggaatgctgggttttatgaggtgggctgcgtctccacgcccctggaagctggatattcagtcctgggctggaatcatccaggctttgctggaagcacgggggtgccattcccgcagaatgaggctaatgccatggatgtggtggtccagtttgccatccaccgcctgttcttccatccccaggacatcatcatctacgcgcgtggccatcggaggcttcactgccacgtgggcagccatgtcctacccagatgttagtgccatgatcctggatgcctcctttgatgacctggtgcccttggccttgaaggtcatgccagacagctggaggggcctggtgaccaggaccgtgaggcagcatctcaatctaaacaacgcggagcagctgtgcagataccagggtcctgtactgctgatccggaagacccaggatggaaatcttacccccacggttccttaaggacatatgttcaaaccgagccaattgcctcctggttaaagctctgcaagcatcggtatcccgggggtgatggcagaggagggtcttctagtggcgaggcagtggttggaggcctcctcacagctggaggaagcctcaatttatagccgatggggaggtggaagaggactggtgtctggtctgtcctccggctcctacccaggcagaacacggggccgactttccctgggagcgtgggggaggacatgagtgccagatggacggctggcagctgggctttgtttctggctcggaagcatctgcacaactttgaggccactcactgcaccccactcccagcccagaacttccccagatgcccctggcaccctctagggacccaactgggactcattatggaagaatggggtgagaggagacatgaggaaagaccctcttatttgtgattcttctgtgtttcatgtttgctgtttataagttttgtgggaaagttgggggaccatccccccttctcaccactgttcctcttgcacgtttcccctcattcatgtggctgtacttaaccttctccaacatacatcctgcattacatgaaatgggttaattcctaataattaataaaaaggtattttttctacaaaaaaaaaaaaaaaaa

SEQ ID NO: 10454 - DNA, 1527 bp, Homo sapiens
  SIMILAR (1)..(105): 851254mologous to Homo sapiens PRO1546,accession number AF116638,Smith-Waterman Score=157.
atgggcttcttgcccaagcttctcctcctggcctcattcttcccagcaggccaggcctcatggggcgtctccagtccccaggacgtgcagggtgtgaaggggtcttgcctgcttatcccctgcatcttcagcttccctgccgacgtggaggtgcccgacggcatcacggccatctggtactacgactactcgggccagcggagagtgttcatggggaaccccgagcacagggtgtgcaacctgctgctgaaggacctgcagcccgaggactctggttcctacaacttccgcttcgagatcagtgaggtcaaccgctggtcagatgtgaaaggcaccttggtcacagtaacagccagaagtttgagcccaccgggtcggcacctggagaccctccacatggccatgtcctggcaggaccacggccggatcctgcgctgccagctctccgtggccaatcacagggctcagagcgagattcacctccaagtgaagtatgcccccaggggtgtgaagatcctcctcagcccctcggggaggaacatccttccaggtgagctggtcacactcacctgccaggtgaacagcagctaccctgcagtcagttccattaagtggctcaaggatggggtacgcctccaaaccaagactggtgtgctgcacctgccccaggcagcctggagcgatgctggcgtctacacctgccaagctgagaacggcgtgggctctttggtctcaccccccatcagcctccacatcttcatggctgaggtccaggtgagcccagcaggtcccatcctggagaaccagacagtgacactagtctgcaacacacccaacgaggcacccagtgatctccgctacagctggtacaagaaccatgtcctgctggaggatgcccactcccataccctccggctgcacttggccactagggctgatactggcttctacttctgtgaggtgcagaacgtccatggcagcgagcgctcgggccctgtcagcgtggtagtcaaccaccctcccaagacgcccaccatgatggtcttcgtggagcctgagggtggcctccggggcatcctggattgccgagtggacagcgagccgctcgccagcctgactctccaccttggcagtcgactggtggcctccagtcagccccagggtgctcctgcagagccacacatccatgtcctggcttcccccaatgccctgagggtggacatcgaggcgctgaggcccagcgaccaaggggaatacatctgttctgcctcaaatgtcctgggctctgcctctacctccacctactttggggtcagagccctgcaccgcctgcatcagttccagcagctgctctgggtcctgggactgctggtgggcctcctgctcctgctgttgggcctgggggcctgctacacctggagggactgggtactaccttactggcacttacaagagtggagggcagacacagatgttgtcagcatccttattcctgctccagatgcatctctgttcatgactgtgtga

SEQ ID NO: 10455 - DNA, 615 bp, Homo sapiens
  SIMILAR (171)..(614): 781254mologous to Homo sapiens FLJ00055 protein,accession number AK024462,Smith-Waterman Score=566.
atcccccggaccgtccaaagctgtcagccctcctagacatgggccagggccacatggctctgttcatctgcactgtggacagccgccccctggccttgctggccttgttccatggggagcacctcctggccaccagcctgggtccccaggtcccatcccatggtcggttccaggctaaggctgaggccaactccctgaagttagaggtccgagaactgggccttggggactctggcagctaccgctgtgaggccacaaatgttcttggatcatccaacacctcactcttcttccaggtccgagatgccccacgccacgtcacactcactaccctgatggacacaggtcctggacgactgggcctcctcctgtgccgtgtggacagtgaccctccggcccagctgcggctgctccacggggatcgccttgtggcctccaccctacaaggtgtggggggacccgaaggcagctctcccaggctgcatgtggctgtggcccccaacacactgcgtctggagatccacggggctatgctggaggatgagggtgtctatatctgtgaggcctccaacaccctgggccaggcctcggcctcagctgacttcgacgctcaag

SEQ ID NO: 10456 - DNA, 832 bp, Homo sapiens
  SIMILAR (904)..(1158): 1001254mologous to Homo sapiens protein kinase,accession number Y15801,Smith-Waterman Score=461.
gtccagaggacatttggaattggacttccaaaggactcccaactgtgagctcatccctgagacttttgacattgttgggaatgccaccagcaggccatgttttgtctcagtgcccatctactgagggccagggtgtgcccctggcattctggttgtgggcttcctggaagaggtgatcactctcacactaagactgaggaaataaaaaaggtttggtgttttcctagggagagagcatgccaggcagtggagttgcctaagcagacatccttgtgccagatttggcccctgaaagaagagatgcgcctcattcccaccaccaccccccccttacccccagggactgggtactaccttactggcccttactagagtggagggccagacacagatgttgtcagcatcccttattcctgctccagaatgcatctctgttcatgactgtgtgagctcctgtccttttcctgggagaccctgtgtcgggctgttaaagagaatgagttaccaaagaaggaatgacgtgcccctgcgaatcagggaccaacaggagagagctctttgagtgggcttagtgactcccccttgcagcctggtggagatggtgttgaggagcgaagagcccttttgttttagggttttgggtttgaaaaacagagagagaagtggggagttgccacaggagctaacacgctgggaggcagttgggggccgggtgaactttgtgtagccgaggccgcaccctccctcattccaggctcattcattttcatgctccattgccagactcttgctgggagcccgtccagaatgtcctcccaataaaactccatcc

SEQ ID NO: 10457 - DNA, 5522 bp, Homo sapiens
  SIMILAR (1)..(531): 981254mologous to Escherichia coli K12 putative oxidoreductase,accession number AE000459,Smith-Waterman Score=931.
atggccaacagattcagaagtggggaggactctggaggagcaatctggcaagactgtgtggaggagggagcatctgaactgggctttctggagagtttgctgtatactcaaggaaatgacaggaagcagtgctccctgactaatcaaggtagacaagtctttgctctcctcatgctaaggaaaggtcatctgcatgtgttcgtcatcctctttggaccagcaggtccagcaccgccgcagccacttccttctgtggagcaggtacccctgtccctggtccctgggcccaaaggggtcgctgtgtccagaaccccaccattcttccatcaggttcacgattgcccttttcaggaccccaaatgggaggaacaggggagctgggacaagatagctgccctggccatagcagagctgaccctgacatcccctgtggccagggacacatctgacccccagtgtgcccagcaggctgcttttcttcacggccaggcctcatggggcgtctccagtccccaggacgtgcagggtgtgaaggggtcttgcctgcttatcccctgcatcttcagcttccctgccgacgtggaggtgcccgacggcatcacggccatctggtactacgactactcgggccagcggcaggtggtgagccactcggcggaccccaagctggtggaggcccgcttccgcggccgcaccgagttcatggggaaccccgagcacagggtgtgcaacctgctgctgaaggacctgcagcccgaggactctggttcctacaacttccgcttcgagatcagtgaggtcaaccgctggtcagatgtgaaaggcaccttggtcacagtaacagaggagcccagggtgcccaccattgcctccccggtggagcttctcgagggcacagaggtggacttcaactgctccactccctacgtatgcctgcaggagcaggtcagactgcagtggcaaggccaggaccctgctcgctctgtcaccttcaacagccagaagtttgagcccaccggcgtcggccacctggagaccctccacatggccatgtcctggcaggaccacggccggatcctgcgctgccagctctccgtggccaatcacagggctcagagcgagattcacctccaagtgaagtatgcccccaagggtgtgaagatcctcctcagcccctcggggaggaacatccttccaggtgagctggtcacactcacctgccaggtgaacagcagctaccctgcagtcagttccattaagtggctcaaggatggggtacgcctccaaaccaagactggtgtgctgcacctgccccaggcagcctggagcgatgctggcgtctacacctgccaagctgagaacggcgtgggctctttggtctcaccccccatcagcctccacatcttcatggctgaggtccaggtgagcccagcaggtcccatcctggagaaccagacagtgacactagtctgcaacacacccaatgaggcacccagtgatctccgctacagctggtacaagaaccatgtcctgctggaggatgcccactcccataccctccggctgcacttggccactagggctgatactggcttctacttctgtgaggtgcagaacgtccatggcagcgagcgctcgggccctgtcagcgtggtagtcaacctcctgacagccttcctggagacccaggcgggacttgtgggcatccttcactgctctgtggtcagtgagcccctggccacactggtgctgtcacatgggggtcatatcctggcctccacctccggggacagtgatcacagcccacgcttcagtggtacctctggtcccaactccctgcgcctggagatccgagacctggaggaaactgacagtggggagtacaagtgctcagccaccaactcccttggaaatgcaacctccaccctggacttccatgccaatgccgcccgtctcctcatcagcccggcagccgaggtggtggaaggacaggcagtgacactgagctgcagaagcggcctaagccccacacctgatgcccgcttctcctggtacctgaatggagccctgcttcacgagggtcccggcagcagcctcctgctccccgcggcctccagcactgacgccggctcataccactgccgggcccgggacggccacagtgccagtggcccctcttcgccagctgttctcactgtgctctacccccctcgacaaccaacattcaccaccaggctggaccttgatgccgctggggccggggctggcacggcgaggcctccttttgtgccgtgtggacagcgacccccccgccaggctgcagctgctccacaaggaccgtgttgtggccacttccctgccatcagggggtggctgcagcacctgtgggggctgttccccacgcatgaaggtcaccaaagcccccaacttgctgcgtgtggagattcacaaccctttgctggaagaggagggcttgtacctctgtgaggccagcaatgccctgggcaacgcctccacctcagccaccttcaatggccaggccactgtcctggccattgcaccatcacacacacttcaggagggcacagaagccaacttgacttgcaacgtgagccgggaagctgctggcagccctgctaacttctcctggttccgaaatggggtgctgtgggcccagggtcccctggagaccgtgacactgctgcccgtggccagaactgatgctgccctttacgcctgccgcatcctgactgaggctggtgcccagctctccactcccgtgctcctgagtgtactctatcccccggaccgtccaaagctgtcagccctcctagacatgggccagggccacatggctctgttcatctgcactgtggacagccgccccctggccttgctggccttgttccatggggagcacctcctggccaccagcctgggtccccaggtcccatcccatggtcggttccaggctaaagctgaggccaactccctgaagttagaggtccgagaactgggccttggggactctggcagctaccgctgtgaggccacaaatgttcttggatcatccaacacctcactcttcttccaggtccgaggagcctgggtccaggtgtcaccatcacctgagctccaagagggccaggctgtggtcctgagctgccaggtacacacaggagtcccagaggggacctcatatcgttggtatcgggatggccagcccctccaggagtcgacctcggccacgctccgctttgcagccataactttgacacaagctggggcctatcattgccaagcccaggccccaggctcagccaccacgagcctagctgcacccatcagcctccacgtgtcctatgccccacgccacgtcacactcactaccctgatggacacaggccctggacgactgggcctcctcctgtgccgtgtggacagtgaccctccggcccagctgcggctgctccacggggatcgccttgtggcctccaccctacaaggtgtggggggacccgaaggcagctctcccaggctgcatgtggctgtggcccccaacacactgcgtctggagatccacggggctatgctggaggatgagggtgtctatatctgtgaggcctccaacaccctgggccaggcctcggcctcagctgacttcgacgctcaagctgtgaatgtgcaggtgtggcccggggctaccgtgcgggaggggcagctggtgaacctgacctgccttgtgtggaccactcacccggcccagctcacctacacatggtaccaggatgggcagcagcgcctggatgcccactccatccccctgcccaacgtcacagtcagggatgccacctcctaccgctgcggtgtgggcccccctggtcgggcaccccgcctctccagacctatcaccttggacgtcctctacgcgccccgcaacctgcgcctgacctacctcctggagagccatggcgggcagctggccctggtactgtgcactgtggacagccgcccgcccgcccagctggccctcagccacgccggtcgcctcttggcctcctcgacagcagcctctgtccccaacaccctgcgcctggagctgcgagggccacagcccagggatgagggtttctacagctgctctgcccgcagccctctgggccaggccaacacgtccctggagctgcggctggagggtgtgcgggtgatcctggctccggaggctgccgtgcctgaaggtgcccccatcacagtgacctgtgcggaccctgctgcccacgcacccacactctatacttggtaccacaacggtcgttggctgcaggagggtccagctgcctcactctcattcctggtggccacgcgggctcatgcaggcgcctactcttgccaggcccaggatgcccagggcacccgcagctcccgtcctgctgccctgcaagtcctctatgcccctcaggacgctgtcctgtcctccttccgggactccagggccagatccatggctgtgatacagtgcactgtggacagtgagccacctgctgagctggccctatctcatgatggcaaggtgctggccacgagcagcggggtccacagcttggcatcagggacaggccatgtccaggtggcccgaaacgccctacggctgcaggtgcaagatgtgcctgcaggtgatgacacctatgtttgcacagcccaaaacttgctgggctcaatcagcaccatcgggcggttgcaggtagaaggtgcacgcgtggtggcagagcctggcctggacgtgcctgagggcgctgccctgaacctcagctgccgcctcctgggtggccctgggcctgtgggcaactccacctttgcatggttctggaatgaccggcggctgcacgcggagcctgtgcccactctcgctttcaaccaacgtggctcgtgctcaagctgggatgtaccactgcctggctgagctccccactggggctgctgcctctgctccagtcatgctccgtgtgctctaccctcccaagacgcccaccatgatggtcttcgtggagcctgagggtggcctccggggcatcctggattgccgagtggacagcgagccgctcgccagcctgactctccaccttggcagtcgactggtggcctccagtcagccccagggtgctcctgcagagccacacatccatgtcctggcttcccccaatgccctgagggtggacatcgaggcgctgaggcccagcgaccaaggggaatacatctgttctgcctcaaatgtcctgggctctgcctctacctccacctactttggggtcagagccctgcaccgcctgcatcagttccagcagctgctctgggtcctgggactgctggtgggcctcctgctcctgctgttgggcctgggggcctgctacacctggagggactgggtactaccttactggcccttacaagagtggagggcagacacagatgttgtcagcatccttattcctgctccagatgcatctctgttcatgactgtgtga

SEQ ID NO: 10458 - DNA, 1887 bp, Homo sapiens
  SIMILAR (649)..(756): 1001254mologous to Homo sapiens bA12D24.4 (A novel proteinn),accession number AL135786,Smith-Waterman Score=183.
  misc_feature (1)...(1887): n = a,t,c or g
atggttcggcgctttaggcgtctgtcacagacctatctgcgggtcgccttcacccagcatctcagaaactgcgcgcgggatgaacattcggaagtttgggaagttgatgaacagatcaagaagcaacaggaaacacttggtttggaacataatttagacttacttagatatgagaaaggctgtgtaagagagaaacagagtaatgagtttgggaaaccattttaccattgtgcatcctatgttgtaaccccctttaagtgtaatcagtgtgggcaagacttcagtcataaatttgacctcattagacatgagcgaattcatgctggagagaaaccttacgaatgtaaagaatgtggaaaagccttcatatttattatacatatgagaagtcacactggtgagaaaccctatgtatgtagtgaatgtgggaaagccttctctcagagttcatccctaaccgtacatacgcgaaatcatacagctgagaaaccctatgaattatgtggaaaagcctttagtcagaaatcaaacctcactgaacatgagaaaattcatactggagagaaaccttatcattgtaatcaatgtgggaaagctttcagtcagagacaaaatcttcttgagcatgaaaaaattcatactggagagaaaccattcaaatgtaatgaatgtgattgggagtttggaagagaaaccaagaatttatctccaaaggaaaacatttatgaaattagatcaccacaacaggagaaggccagagttatcagagaaatcagatgccaggtggagagacaacagggtcaacaggagggacatttcagaccagctgtaataccatttacttccatgcagtgcacagcccatagagaatatcagtggcttcatactggagagaaatcctgtgaatgcaggaaatgtaagaatgcttttaggtaccagtcatgtcctattcaacatgaaataattcataataaggaaaaagaacctgaatgtggagaatgtaggaaaatctttaatagtggatcagacttgattaagcatcagacgcttcatgaaagcaaaaaacatagtgaaaataacaaatgtacctttaatcatgattctggaattactcaacctcagagcattaatactggagagaaacctcatanaatctcacaaattagtcagcatcagaggatgcatcttggtgagaaaccctataagtgtagggagtgtgggaaagcctttccatccactgcacagcttaatctacatcagaggatccatactgatgagaaatactatgaatgtaaggagtgtgggaaggcctttacccgtccctcacacctttttcgacatcaaagaatccatacgggtgagaaaccccataaatgtaaggaatgtggaaaggcttttcgttatgacacacagctgagccttcatcagataatccatactggtgaaagacgctatgaatgcagggagtcagaactcacacatcatgagagaagtcacactggtgagaaaccctacgagtgtaaggagtgtgggaaggcctttggtcgtggctcagaacttagtcgacaccagaaaattcatactgggctttctgatactaagccaaatgtgatctccttattggagcagaagaaagagccctggatggttaagaggaaggagacaaaagaatggtgtccagatgttacagaaaacaaggaaaacacccttcagcctcatatacatgttcaacgaacaagagatgatgctgagaaaacctatgaatgtaaagagtgtggggaagcttttaggactagccgccaactttctgtacatcatagatttcattctggtgagaaaccctataaatgtttggaatgtgacaaggcctttagtgtgtatggatga

SEQ ID NO: 10459 - DNA, 410 bp, Homo sapiens
  SIMILAR (1)..(120): 571254mologous to Homo sapiens Human secreted protein, SEQ ID NO: 6297,accession number G02216,Smith-Waterman Score=112.
attgcagtgcttgggtgtcggggccctgaggctccggcctgacctctccagggtgtcaacaggatggtctgcggatgccaagagtggtggaggtccgaccaggatgatgaagccacaggcggagtctgggggaagcagctcggcatcccagcttcaggcctgccgggacggcgttcgagtgagtctcccagaaagtcgtgcacccccgtgacctcgaggacaggtctgcctgtgtgcccgtgggctgctctctcacccgagagtcgttcttcagactgaataaccagccccatgggacccgatttctgcccataccttccaatccggaatcgagcagaagagcagtcccgagtgcccacctcacggtctgaagcgcctcctcctccaccgggatccgaacacgaagtcgg

SEQ ID NO: 10460 - DNA, 307 bp, Homo sapiens
  SIMILAR (14)..(139): 421254mologous to Bos taurus phosphatidic acid-preferring phospholipase A1,accession number AF045022,Smith-Waterman Score=75.
gagggcacctggatccaaggtcgaggagcgggcttcgttgagagaggcgactgcgggcgccccagggctggaccaccaggagtcctgtcctcaagacctccttgtgccgacttctaccggtggaggaggagcttcagggcgcctgctagggtctcaggactcctcttcagattttggatctcaccaaccctggggctcctgcaagaagacaccgctttctagtacacgtgcaaacaggaacaggggcgagtccaaggtggagccaatgcgaccacacgtggcactggcgtcccccagaacagatggg

SEQ ID NO: 10461 - DNA, 967 bp, Homo sapiens
  SIMILAR (3)..(965): 461254mologous to Homo sapiens zinc finger protein,accession number X78933,Smith-Waterman Score=751.
  misc_feature (1)...(967): n = a,t,c or g
tatgtggaaaagcctttagtcagaaatcaaacctcactgaacatgagaaaattcatactggagagaaaccttatcattgtaatcaatgtgggaaagctttcagtcagagacaaaatcttcttgagcatgaaaaaattcatactggagagaaaccattcaaatgtaatgaatgtgattgggagtttggaagagaaaccaagaatttatctccaaaggaaaacatttatgaaattagatcaccacaacaggagaaggccagagttatcagagaaatcagatgccaggtggagagacaacagggtcaacaggagggacatttcagaccagctgtaataccatttacttccatgcagtgcacagcccatagagaatatcagtggcttcatactggagagaaatcctgtgaatgcaggaaatgtaagaatgcttttaggtaccagtcatgtcctattcaacatgaaataattcataataaggaaaaagaacctgaatgtggagaatgtaggaaaatctttaatagtggatcagacttgattaagcatcagacgcttcatgaaagcaaaaaacatagtgaaaataacaaatgtacctttaatcatgattctggaattactcaacctcagagcattaatactggagagaaacctcatanaatctcacaaattagtcagcatcagaggatgcatcttggtgagaaaccctataagtgtagggagtgtgggaaagcctttccatccactgcacagcttaatctacatcagaggatccatactgatgagaaatactatgaatgtaaggagtgtgggaaggcctttacccgtccctcacacctttttcgacatcaaagaatccatacgggtgagaaaccccataaatgtaaggaatgtggaaaggcttttcgttatgacacacagctgagccttcatcagataatccatactggtgaaagacgctatgaatgcaggga

SEQ ID NO: 10462 - DNA, 1417 bp, Homo sapiens
  SIMILAR (5)..(793): 671254mologous to Homo sapiens zinc finger protein,accession number X78933,Smith-Waterman Score=1014.
ggcctcacagctgagtctacatcaaagaattcatgctggtgagaacccccatgaatgtaaggaatgtgggaaagcctttatctctgattcacatcttattcgacatcagagtgtccatactggggagaaaccttataagtgtaaggaatgtgggaagtcctttcgtcgtggctcagaacttacccgacatcagagagctcatactggtgaaaaaccctatgagtgtaaggaatgtggaaaggcctttacttgtagcacagatcttgttcgacatcaaaaagttcgcactggggagagaccccataagtgtaaggaatgtgggaaggctttcattcgaaggtcagaactcacacatcatgagagaagtcactctggtgagaaaccctatgaatgtaaagtatgtggaaaagcctttactaaaagttcacaactttttctacatctgagaattcatactggtgagaaaccttatgaatgtaaagaatgtgggaaagcctttactcaacactcaaggcttattcagcatcagagaatgcatactggtgagaaaccttatgaatgtaagcagtgtgggaaggcctttaatagtgcctcaacacttactaaccatcacagaattcatgctggtgagaagctctatgaatgtgaagaatgtagaaaggcctttattcagagctcagaacttattcaacatcagagaatccatacagatgaaaaaccatatgaatgtaatgaatgtgggaaggcctttaataaaggctcaaatcttactcgacatcagagaattcacactgtgtggaagcgcttaatacataagccaggtgttctcaaccaggggccatttcgtttctcatacctacaccccagtaggcatttggcaatgtccagagtcatttttggttttcagtatgaagggtgggtgctgctggcgtctgggggctatggggaccttcggaagaaagccaaggaaaagcaaatcacacctgggaaccaggagagggcctatgccggagaacaagcccattcagggaggcctactggaggaggcgagaggtttctgcaaactgtttctgtgccccagcgacccccttcacacctcaccagactgaataaccagccccatgggacccgatttctgcccataccttccaatccggaatcggagcagaagagcagtcccgagtgcccacctcacggaattgaaggaaactacgtcaacataataaaagttttatgtgaaaaacccacggtggacagcacactcggtgaaagactgaaagctttttctccaagatcaggaacaaaggaagaaggcctgctgtcaccatgttcattcagcagagtactaaaagtactagctacagaaatgtggcaaaaaaaacaacaaccggcatccaaattgaagacaatgaaatga

SEQ ID NO: 10463 - DNA, 1782 bp, Homo sapiens
  SIMILAR (49)..(255): 301254mologous to Homo sapiens zinc-finger protein (ZNFpT3),accession number X65231,Smith-Waterman Score=75.
atgtgggaaagcctttactcaacactcaaggcttattcagcatcaagaatgcatactggtgagaaaccttatgaatattgggagtttggagagaaaccaagaatttatctccaaaggaaaacatttatgaaattagataccacaacaggagaaggccagagttatcagagaaatcagatgccagagtgtccatatggggagaaaccctgtaagtgtaaggaatgtgggaagtcctttcgtcgtgctcagaacttacccgacatcagagagctcatactggtgaaaaaccctagagtgaggtcgacagaacgacaggacgtctccgaatgccaggagtcgcagagggcagagcaggatgaagaaaccacggcggagtctaggggaagcagtacggcgtccctgcctcaggcctgcccgacggtgtgcgggcacatcctggacaccattgttcgtctcgccatcgccccatatggccttggtgacacacactcaccccatctgttctgggggacgccagtgccacgtgtggtcgcattggctccaccttggactcgcccctgttcctgtttgcacgtgtactagaaagcggtgtcttcttgcaggagccccagggctttggaagcggaacaggccctgctcctcccaggggcgagggaggcagagggctcatgtgtcagtgaatttcagccgacaccacgccttgaggctcatggatctttctgtgccccagcaggccctgcccgcctcacagatgaggtgagctcatccctgcttacttgggagatccaaaatctgaagaggagtcctgagaccctagcaggcgccctgagctcctcctccaccggtagaagtcggcacaaggaggtcttgaggacaggctcctggtggtccagccctggggcgcccgcagtcgcctctctcaacgaacccgctcctcgaccttggatccagtgcttgggtgtcggggccctgaggctccggcctgactctccagggtgtcaacaggatggtctgcgatgccaagagtggtggagtgccgaccaggatgatgaagccacaggcggagtctgggggaagcagctcggatcccagcttcaggtctgccgggacggcgttcgagtgagtctcccagaagtcgtgcacccccgtgacctcgaggacaggtctgcctgtgtgcccgtggctgctctctcacccgagagtcgttcttctggagagcagagccccgcagctcaggggttgcctggggggcagccccgctcactattttttaaaggggccactacgggattacaggagccaggcgcctgtcaggcacttgccaaatgtgcaagcatcgtggcagtgtgcacggttctcaacgtccttaatgagtccccgtcagtcgttctaggggtaatgggttccactgaaggcattgcacagatcaacaatcaacttccaccaaaacggaaaatcgttcctgcctttttagacagcagtgctgagcagcaggattccctgagctttgagaccaggacgggccctgggaggcccaggtcgaagggaggcagtgagctcatgaaacagggattttcagctgactccctcccctgggatctcagctgttactgtgccccacgacccccttcacacctcaccagactgaataaccagccccatgggacccatttctgcccataccttccaatccggaatcggagcagaagagcagtcccagtgcccacctcacggtctgaagcgcctcctcctccaccgggatccgaaacgaagtcggcttaa

SEQ ID NO: 10464 - DNA, 381 bp, Homo sapiens
  SIMILAR (148)..(312): 781254mologous to Homo sapiens Human secreted protein, SEQ ID NO: 6536,accession number G02455,Smith-Waterman Score=197.
atgccactgagccgttatgctctcggggcatacagccatgaaggcaataaggagacttttctcctcagaagccgcccatggctccccatgggtgtcttacttatctggcattccagaaagtcaaagaaggaaagaaagaagaaaagaaagaaaaaaagaaaagaaagaaagaaagaaagaaagaaagaaagaaagaaagaaagaaagaaagaaagaaagaaagaaagagaaaagaaaagaaggaaagaagggaaggaaggaaggaaggaaggaaggaaggaaggaaggaaggaaggaaggaaagaaaagaaagaaatttctaaaaaagaaattgtggctcctacttctttgaatcctctgaagtgctcagtcttgccctga

SEQ ID NO: 10465 - DNA, 235 bp, Homo sapiens
  SIMILAR (9)..(137): 461254mologous to Rattus norvegicus BMK1/ERK5,accession number AJ005424,Smith-Waterman Score=110.
atgaaagaaaagaaagaaagaaggaagaaagagaaagaagagaaagaaagaaagaaagaaagaaagaaagaaagaaagaaagaaagaaagaaagaaagaaagaaagaggtagtggttattgttggaggcctcacaccttttccaaaacaaacagtggaggcagtgaccggctgggtattcactggatgcaacagtaactcccaatccgagcaacctgagccgccattggcggcag

SEQ ID NO: 10466 - DNA, 927 bp, Homo sapiens
  SIMILAR (61)..(711): 861254mologous to Homo sapiens ras GTPase-activating-like protein,accession number L33075,Smith-Waterman Score=916.
atggtagaagacaaagaggaagcagtcacgtctcacgtggcaggaacaagaggaagagagagtttgtacctgttcaagctaggcctggcccctcagattcaagacctatatggaaaggttgacttcacagaagaagaaatcaacaacatgaagactgagttggagaagtatggcatccagatgcctgcctttagcaagattgggggcatcttggctaatgaactgtcagtggatgaagccgcattacatgctgctgttattgctattaatgaagctattgaccgtagaattccagccgacacatttgcagctttgaaaaatccgaatgccatgcttgtaaatcttgaagagcccttggcatccacttaccaggatatactttaccaggctaagcaggacaaaatgacaaatgctaaaaacaggacagaaaactcagagagagaaagagatgtttatgaggagctgctcacgcaagctgaaattcaaggcaatataaacaaagtcaatacattttctgcattagcaaatatcgacctggctttagaacaaggagatgcactggccttgtacagggctctgcagtcaccagccctggggcttcaaggactgcagcttactagaatagcgactgcctgggcaacaagagcaaaactccatcgaaagaaagaaaagaaagaaagaaaagaaagaaaagaaagaaaagagaaagaaaagaaagaaaggaaagaaagaagaaagaaagaaggaaagaaaataccattttattcttctgcttggtatgcccacttcctagttcattacacatggccctatggcaccctcaatcacagggttgccatgacctcaaaagtcctgcacacttgggtaggagtctccgaaatcccacgtccatattcctgggaaagagaatctgactgtggccactga

SEQ ID NO: 10467 - DNA, 400 bp, Homo sapiens
  SIMILAR (226)..(300): 1001254mologous to Homo sapiens initation factor 4B,accession number X55733,Smith-Waterman Score=133.
aatacacttggttctcagagcactgccagatcgctcattgtgagcaaactaaagtcagccaacgtagacagttaagattctgaaaatctagaagtaatacatcatccagacaacaaggactgttgactagaggtgcctgttcagtgccttgaaactgcatgcatacacatgtttgtattaggcgagtcctttcctaaagacatggttttatgcttacgtctctgcaggaaagatggcaaaaaggatcaagactccagatctgcacctgagccaaagaaacctgaggaaaatccagcttctgtaagtgttgaaggctgctcccaatttttcattctaagaaaaattcttagaattctaagtattcttactaagaattaaaaattcttagtattctaaactt

SEQ ID NO: 10468 - DNA, 882 bp, Homo sapiens
  SIMILAR (480)..(707): 801254mologous to Homo sapiens initation factor 4B,accession number X55733,Smith-Waterman Score=322.
atgaacccggcatccagagaggttgaaagttttagttatcctgagtttgaggacctggatgccctgttcagtaccctgggtctcaatgaagagtctgtagacagctttgatgactacctgcctagaagaggtgttgatagctttggagacaagtatcaagatcatgcaattcagaccagtatcatgatgggtgtcaggacaggtttagagatggctcacaccaggatatgggtcaatgtgggggccgggattaagatgatgactgaggcagcagagactatgatagaggctatgattctgcaacaggcagttgcagaagagcatttggtagtgggtacctcagagatgatgactactgaggagagctcagaaacagagcagcaaccccctacaggtagtgagggaaaagtacctccagttcaaccctcagaggaaagaccagcaaagaaagatgaaaataaagtagacgggatgaatgtccaaaagtccaaagtgggaactcgggccgtggtccaggagatggagggaacaaagactgctggagggagtcagacaggaaagatggcaaaaaagatcaagtctgcagatctgcacctgagtcaaagaaacctgaggaaaatccagcctccaagttcagttctgcaagcaagtgtgctgctgtctctgttgatggtgaagatgaaaaggaaggagcagattacaccaaatagacctcctgtgctttctcctagtctctctccactctggaacattcaagagcaaagcaaacctacatccagacaagacaaaataacactcaccacctcctgggggaggaaaaaatcagggtcaagttctgataaaatagctatgtctcaacccaaaggcaagcttcctatttaa

SEQ ID NO: 10469 - DNA, 720 bp, Homo sapiens
  SIMILAR (318)..(545): 801254mologous to Homo sapiens initation factor 4B,accession number X55733,Smith-Waterman Score=322.
atgcaaaggagtgagaatgacattttaggaatggacttaagacctctaatttgtataaaggatgaaaaggaggaggtgggagagaaggaggagggagaaaaggaggaggaggagtgtgaggaacaagaggaggaaggagggaaggagtgggaagaaccagggaattaccatctgggccagtccttaagccatgactggcagagctcagaaacagagcagcaaccccctacaggtagtgagggaaaagtacctccagttcaaccctcagaggaaagaccagcaaagaaagatgaaaataaagtagacgggatgaatgtccaaaagtccaaagtgggaactcgggccgtggtccaggagatggagggaacaaagactgctggagggagtcagacaggaaagatggcaaaaaagatcaagtctgcagatctgcacctgagtcaaagaaacctgaggaaaatccagcctccaagttcagttctgcaagcaagtgtgctgctgtctctgttgatggtgaagatgaaaaggaaggagcagattacaccaaatagacctcctgtgctttctcctagtctctctccactctggaacattcaagagcaaagcaaacctacatccagacaagacaaaataacactcaccacctcctgggggaggaaaaaatcagggtcaagttctgataaaatagctatgtctcaacccaaaggcaagcttcctatttaa

SEQ ID NO: 10470 - DNA, 289 bp, Homo sapiens
  SIMILAR (1)..(198): 1001254mologous to Homo sapiens cAMP-specific phosphodiesterase 8B; PDE8B1; 3',5'-cyclic nucleotide phosphodiesterase,accession number AF079529,Smith-Waterman Score= 348.
  misc_feature (1)...(289): n = a,t,c or g
cttcctcttctccacgcaggcttcaacaggagatttatggagaatagcagcataattgcttgctataatgaactgattcaaatagaacatggggaagttcgctcccagttcaaattacgggcctgtaattcagtgtttacagcattagatcactgtcatgaagccatagaaataacaagcgatgaccacgtgattcaggagtngcagggggtttactatgccagacggaaatccggggacagcatccaacagcacgtnaagatcaccccagtgattggccaaggaggga

SEQ ID NO: 10471 - DNA, 1065 bp, Homo sapiens
  SIMILAR (1)..(237): 861254mologous to Homo sapiens Human secreted protein, SEQ ID NO: 7284,accession number G03203,Smith-Waterman Score=348.
atgagtgaactcccattcacaattgcttcaaagagaataaaatacctaggaatccaacttacaagggatgggaaggacctcttcaaggagaactacaaaccactgctcaatgaaataaaagaggatacaaacaaatggaagaacattccatgctcatgggtaggaagaatcaatatcgtgaaaatggccatactgcccaagctgctcatccaccctgaaaatgaacttcctttcagatctgaaccccataaagctgaaggtcactttgccctgttcccaattattacagagtacattatagctgttaaagagttacttgtaggtaacccggttcctaacagcagggtaccggtaccggtctgtggccttggggttggagactcctacttaaagggaacctgtgaggacgccgtccaggcagatgtacagataggctgtggctctatgtggtccagaagtaagagctatggagttgaggaaaacaagactgaaaatggaaactttgagacagcagcgatttctgcagaaaaagccttgaggaagatagccccaaagaatgccagggaagaaggaatctttaaaagaaacggaaagaggccgggcgtgactgatgaagagaagagacagggactacctgtggtgatgccagtgtttgaccggaatacctgtagcatccccaagtctcagatctctttcattgactacttcataacagacatgtttgatgcttgggatggtgttaagtgtcagcactacgtttatggtccctaccctcaagaagattctgaaaagcaaatcataattgaaacaataaagaagctcagcagcaaatctaccctgacaggaaaccactcacttagtagcctcacacaacaaggagaccagcaaccatttgattctggccataaacaaaaagaaggtaggtttatgagaaatataaaaattggtacaatgttgagcatccctaatctgaaaatccaaaatctgaaatgctccaaaatccaagaccttttaagcactgacgtgatgccacaagtggaaaatcttatacctgacatcatgtga

SEQ ID NO: 10472 - DNA, 1980 bp, Homo sapiens
  SIMILAR (1330)..(1839): 991254mologous to Homo sapiens cAMP-specific phosphodiesterase 8B; PDE8B1; 3',5'-cyclic nucleotide phosphodiesterase,accession number AF079529,Smith-Waterman Score= 895.
atgagggaatttgaactggattcactgtttttggagcagaacttgaaggggactgtcttctttccagtacgggcacagtggaggctgaagagcatgcaggtctgcaatggctgctgcactagcagcggggggaccccagagctggctgcacagtcatctggttacacggccagcagcttaggactgaaagtcatggaactgcaaaagttgggtttgggtgacttgggggaaacaccaagcctgcagaatcgtcgctatccgtccatggcgaggatccactccatgaccatcgaggctcccatcacaaaggttataaatataatcaatgcagcccaagaaaacagcccagtcacagtagcggaagccttggacagagttctagagattttacggaccacagaactgtactcccctcagctgggtaccaaagatgaagatccccacaccagtgatcttgttggaggcctgatgactgtgagtgatgaggcaaaacctgaaaagcaagagagcagttgtactgcagtggcagagggactgctgcttgcagagcggggctaccccatgggcagtgtgcccctggtagcagctcagaggcagcactgcactcatctttatacctacttttcattacatgcaaatgaaggggcagtttttgcagatatttctagaatgagggtggtaacttctgggttgttaccatggaaagggtggaaaggtctggatgttgtcatggcaacggtaaactgccgtggcatgctggacggcttgagaagactgtcaggaaacgagtatgtgtttactaagaatgtgcaccagagtcacagtcaccttgcaatgccaataaccatcaatgatgttcccccttgtatctctcaattacttgataatgaggagagttgggacttcaacatctttgaattggaagccattacgcataaaaggccattggtttatctgggcttaaaggtcttctctcggtttggagtatgtgagtttttaaactgttctgaaaccactcttcgggcctggttccaagtgatcgaagccaactaccactcttccaatgcctaccacaactccacccatgctgccgacgtcctgcacgccaccgctttctttcttggaaaggaaagagtaaagataacagacagcacagtaaagcgatgctgcatgtccgaggccgcctctccacatctaggtcagaaggctcagctggctaaaaacgttctgaaaatctcaaatcccctgacccgaccctccgcacagacaaggatggatgtgggtctccaagatccagtgggtaatgctcaaccttgcctccccatatcccagggaagcctcgatcagttggatgaggtggcagccctcattgctgccacagtccatgacgtggatcacccgggaaggaccaactctttcctctgcaatgcaggcagtgagcttgctgtgctctacaatgacactgctgttctggagagtcaccacaccgccctggccttccagctcacggtcaaggacaccaaatgcaacattttcaagaatattgacaggaaccattatcgaacgctgcgccaggctattattgacatggttttggcaacagagatgacaaaacactttgaacatgtgaataagtttgtgaacagcatcaacaagccaatggcagctgagattgaaggcagcgactgtgaatgcaaccctgctgggaagaacttccctgaaaaccaaatcctgatcaaacgcatgatgattaagtgtgctgacgtggccaacccatgccgccccttggacctgtgcattgaatgggctgggaggatctctgaggagtattttgcacagtttgctggatccagaacttgcacaaaaaccgagaaatcttccattcattcactaggttattcctgggtgtctacatggcgcgttatgggaacacaggcattagtgaagacatcgcggccacggggagttccagtccaatag

SEQ ID NO: 10473 - DNA, 2877 bp, Homo sapiens
  SIMILAR (1)..(924): 1001254mologous to Homo sapiens cAMP-specific phosphodiesterase 8B; PDE8B1; 3',5'-cyclic nucleotide phosphodiesterase,accession number AF079529,Smith-Waterman Score= 1612.
cttcctcttctccacgcaggcttcaacaggagatttatggagaatagcagcataattgcttgctataatgaactgattcaaatagaacatggggaagttcgctcccagttcaaattacgggcctgtaattcagtgtttacagcattagatcactgtcatgaagccatagaaataacaagcgatgaccacgtgattcagtatgtcaacccagccttcgaaaggatgatgggctaccacaaaggtgagctcctgggaaaagaactcgctgatctgcccaaaagcgataagaaccgggcagaccttctcgacaccatcaatacatgcatcaagaagggaaaggagtggcagggggtttactatgccagacggaaatccggggacagcatccaacagcacgtgaagatcaccccagtgattggccaaggagggaaaattaggcattttgtctcgctcaagaaactgtgttgtaccactgacaataataagcagattcacaagattcatcgtgattcaggagataattctcagacagagcctcattcattcagatataagaacaggaggaaagagtccattgacgtgaaatcgatatcatctcgaggcagtgatgcaccaagcctgcagaatcgtcgctatccgtccatggcgaggatccactccatgaccatcgaggctcccatcacaaaggttataaatataatcaatgcagcccaagaaaacagcccagtcacagtagcggaagccttggacagagttctagagattttacggaccacagaactgtactcccctcagctgggtaccaaagatgaagatccccacaccagtgatcttgttggaggcctgatgactgacggcttgagaagactgtcaggaaacgagtatgtgtttactaagaatgtgcaccagagtcacagtcaccttggcaatgccaattaaccattcaatggatgtttcccccttgtatctctcaattacttgataatgaggagagttgggacttcaacatctttgaattggaagccattacgcataaaaggccattggtttatctgggcttaaaggtcttctctcggtttggagtatgtgagtttttaaactgttctgaaaccactcttcgggcctggttccaagtgatcgaagccaactaccactcttccaatgcctaccacaactccacccatgctgccgacgtcctgcacgccaccgctttctttcttggaaaggaaagagtaaagggaagcctcgatcagttggatgaggtggcagccctcattgctgccacagtccatgacgtggatcacccgggaaggactcaactctttcctcctgcaatgcaggcagtgagcttgctgtgctctacaatgacacctgctgttcctggagagtcaccacaccgccctggccttccagcctcacggtcaaggacaccaaaatgcaacattttcaagaatattgacaagggaaccattatcgaacgctgcgccaggctattattgacatggttttggcaacagagatgacaaaacactttgaacatgtgaataagtttgtgaacagcatcaacaagccaatggcagctgagattgaaggcagcgactgtgaatgcaaccctgctgggaagaacttccctgaaaaccaaatcctgatcaaacgcatgatgattaagtgtgctgacgtggccaacccatgccgccccttggacctgtgcattgaatgggctgggaggatctctgaggagtattttgcacagactgatgaagagaagagacagggactacctgtggtgatgccagtgtttgaccggaatacctgtagcatccccaagtctcagatctctttcattgactacttcataacagacatgtttgatgcttgggatgcctttgcacatctaccagccctgatgcaacatttggctgacaactacaaacactggaagacactagatgacctaaagtgcaaaagtttgaggcttccatctgacaggctaaagccaagccacagagggggcctcttgaccgacaaaggacactgtgaatcacagtagcgtaaacaagaggccttcctttctaatgacaatgacaggtattggtgaaggagctaatgtttaatatttgaccttgaatccattccaagtcccccaaatttccattccttagaaagttatgttcccatgaagaaaaatatatgttccttttgaatacttaaatgacagaacaaatacttgggcaaactccctttgctctgcctgtcatccctgtgtacccttgtcaatcccatgggggctggttcactgtaactagcaggccacagggaaggcaaagccttgggtgcctgtgagctcatctcccgggatgggtgactaagtaggcttaggctaggtgatcagctcatcctttaccataaaagtcatcattgctgtttagcttgactgttttcctcaagaacatcgatctggaagggattcataagggagcttatctgggcagatttatctaagaaaaaaaaaaaaacgacataaaataagtgaagcaactaggaccaaattacagataaactagttagcttcacagcctctatggctacatggttcttctggccgatggtatgacacctaagttagaacacagccttggctggtgggtgccctctctagactggtatcagcagcctgtgtaacccctttcctgtaaaaggggttcatcttaacaaagtcatccatgatgagggaaaaagtggcatttcatttttggggaatccatgagcttcctttatttctggctcacagaggcagccacgaggcactaacaccaagtattatataaaagccattaaatttgaatgcccgttggacaagcttttcttaaaaaaaaa

SEQ ID NO: 10474 - DNA, 445 bp, Homo sapiens
  SIMILAR (2)..(355): 981254mologous to Homo sapiens dJ831D17.1 (novel zinc finger protein),accession number AL109984,Smith-Waterman Score=671.
agagaggacgttcaactgttgctacccaggttgccacttcaaaactgtccatggcatgaaagacttggaccgccatctcagaatccacacgggagacaaaccgcacaagtgtgagttctgtgacaagtgcttcagccggaaggacaacctgaccatgcacatgcggtgccacaccagtgtgaagccacacaagtgtcacctgtgtgactacgctgccgtggacagcagtagcctcaagaagcacctgcggatccactctgatgagcggccgtacaaatgccagctctgcccctatgccagccgcaactccagccagctcaccgtccacctgcgatctcacacggggccgggaccgggctgacctcctggagcacagccggctgcaccaggccgaccacccggagaagtgtccagagtgcagctactcctgctccagcgcggccgc

SEQ ID NO: 10475 - DNA, 960 bp, Homo sapiens
  SIMILAR (553)..(813): 811254mologous to Mus musculus Zfp64,accession number U49046,Smith-Waterman Score=410.
atgtcgcggcgcaagcaggccaagccccagcacctcaactccgaggagccgcggcctgcgcgccgggagtgtgcggaggtggccccgcaggtggcgggggagccggcttcagaacttgatgatgatgttccaaaagcaaactgcctctccactgaaagcactgacactccgaaggcccctgtcatcactcttccctcagaggcaagggaacaaatggccacccttggagagaggacgttcaactgttgctacccaggttgccacttcaaaactgtccatggcatgaaagacttggaccgccatctcagaatccacacggtccccttctgcttttccaaagtctattggaatggttttcaactaggtatgatttcaccccccaagggaacaatgtctggagacatcttcgattgttacaactggagaagaaagggttctactggcatctgtatttggacaggaggaggcggcacacccatatgcccaggctatcatcttggtcaaatctttgtagccatcttgaccaaaaaacctttaactttgactccttatgtgtttgaaggagacaaaccgcacaagtgtgagttctgtgacaagtgcttcagccggaaggacaacctgaccatgcacatgcggtgccacaccagtgtgaagccacacaagtgtcacctgtgtgactacgctgccgtggacagcagtagcctcaagaagcacctgcggatccactctgatgagcggccgtacaaatgccagctctgcccctatgccagccgcaactccagccagctcaccgtccacctgcgatctcacacggccaccctatcaaagcgtaatcgagagtgtctccaggagagtgatgagatcccaagggactttaccaccctcttcgacctgtccatcttccagctggataccacctccttccacagcgtcatcgagtcagtacctgtgggcctctga

SEQ ID NO: 10476 - DNA, 1777 bp, Homo sapiens
  SIMILAR (484)..(1434): 741254mologous to Homo sapiens dJ831D17.1 (novel zinc finger protein),accession number AL109984,Smith-Waterman Score=1184.
atgtcgcggcgcaagcaggccaagccccagcacctcaactccgaggagccgcggcctgcgcgccgggagtgtgcggaggtggccccgcaggtggcgggggagccggcttcagaacttgatgatgatgttccaaaagcaaactgcctctccactgaaagcactgacactccgaaggcccctgtcatcactcttccctcagaggcaagggaacaaatggccacccttggagagaggacgttcaactgttgctacccaggttgccacttcaaaactgtccatggcatgaaagacttggaccgccatctcagaatccacacggtccccttctgcttttccaaagtctattggaatggttttcaactaggtatgatttcaccccccaagggaacaatgtctggagacatcttcgattgttacaactggagaagaaagggttctactggcatctgtatttggacaggaggaggcggcacacccatatgcccaggctatcatcttggtcaaatctttgtagccatcttgaccaaaaaacctttaactttgactccttatgtgtttgaaggagacaaaccgcacaagtgtgagttctgtgacaagtgcttcagccggaaggacaacctgaccatgcacatgcggtgcccacaccagtgtgaagccacacaagtgtcacctgtgtgactacgctgccgtggacagcagtagcctcaagaagcacctgcggatccactctgatgagcggccgtacaaatgccaacgtctgcccctatgccagccgcaactccagccagctcaccgtccacctgcgatctcacacggctaggggatacccccttccagtgctggctctgtagcgccaagttcaaaatcagctcggacttgaaaaggcacatgatcgtgcactcgggggagaagcctttcaagtgcgagttctgcgacgtccgctgcaccatgaaggcgaatctcaaatcgcacatccgcatcaagcacaccttcaaatgtctgcactgtgccttccagggccgggaccgggctgacctcctggagcacagccgggcatgcaccaggccgaccacacaggagaagtgtccagagtgcagctactcctgctccagcgcggccgccctgcgcgtgcacagcagagtccactgtaaggaccgtcccttcaagtgtgacttctgcagcttcgacacgaagcggcccagcagcctggccaagcacgtcgacaaggtgcacagggacgaggccaagacggagaaccgggcccctctgggcaaggaagggctcagagagggcagctcccagcacgtggccaagatcgtgacgcagagggccttccgctgtgagacctgcggcgcctccttcgtcagggatgactctctgagatgccacaagaagcagcacagtgatcagagtgagaaacagaaccttacactgggttaaccttcccaccggatagcggtgcctcgggacagctcagcaccctggtctccgtggggcagctcgaggctcccctagagcccagccaagacctctagctcagccgaagagggtggtcagctgtcggaacttctgaccagtgctgttgcccagccctccagaggtgaggccactgagagacaggctttgggcaccacttctggggctggccgctccaacttcacaggccttcagaggcgatggctgggcgacagtgacgaaagcaaagcaaagcagggctgtggagacactcctcgcatttgtctcttccctccaaggattatctgagcaagtcgacttg

SEQ ID NO: 10477 - DNA, 1627 bp, Homo sapiens
  SIMILAR (484)..(1311): 781254mologous to Homo sapiens CUG-BP and ETR-3 like factor 4,accession number AF329265,Smith-Waterman Score=1077.
atgatcgcctttgactccatgtctcacatccaggtcatgctgatgcaagaggaatcaactgcaccagccaccctagagcacatccttggtcactcacagctctgtggttccgatgggctggcccacgctgctgtctgggtcttagctcacctgcattattggtttacagggctctctccaggccccatggatgtgctgccgttgcaccctgcgatctccagctcattccacctttggagagttgcattcatcagcaaagcaggcaagcctagagcagcaggacacctgctcaaaaggttcttgagatgccagttccaacgagcagcttcgtctctcttgtttaccactgtagaagcaatgcttggaacagagtccggcacagagaaggttatgcgaggagctgggacctggtaccacatcatcattgagaactggcccagtgctgagtgcgtctggactgaggagtaccagcagggcagagggcaggaggactctgcagaagatagaaaactcttcgtgggcatgctcaacaagcaacagtccgaggacgacgtgcgccgccttttcgaggcctttgggaacatcgaggagtgcaccatcctgcgcgggcccgacggcaacagcaaggggtgcgcctttgtgaagtactcctcccacgccgaggcgcaggccgccatcaacgcgctacacggcagccagaccatgccgggagcctcgtccagtctggtggtcaagttcgccgacaccgacaaggagcgcacgatgcggcgaatgcagcagatggctggccagatgggcatgttcaaccccatggccatccctttcggggcctacggcgcctacgctcaggcactgatgcagcagcaagcggccctgatggcatcagtcgcgcagggcggctacctgaaccccatggctgccttcgctgccgcccagatgcagcagatggcggccctcaacatgaatggcctggcggccgcacctatgaccccaacctcaggtggcagcacccctccgggcatcactgcaccagccgtgcctagcatcccatcccccattggggtgaatggcttcaccggcctccccccacaggccaatgggcaacctgctgcggaagaaattgttcgccaatggcatccacccctacccagcacagagccccaccgccgcggaccccctgcagcaggcctacgccggagtgcagcagtatgcaggtccagctgcctaccctgctgcctatggtcagataagccaggcctttcctcagccgcctccaatgatcccccagcagcagagagaaggcttcgtgagcttcgacaacccggccagcgcgcagaccgccatccaggccatgaacggcttccagatcggcatgaagaggctcaaggtgcagctgaagcgtcccaaagacgccaatcgcccgtactgagcgccggcgagagcgtcaccccgggggagaccaggactcgcacagggccagtcaaatccaccacagtctcgcgctgagctaggaataaagttcacgtaatcacatgagagtggagaaaagtcccccatccggcaggatgctgaacgggctacattaaaaaacaaacctctctctatatatatttataaatgagaactg

SEQ ID NO: 10478 - DNA, 2051 bp, Homo sapiens
  SIMILAR (1)..(387): 701254mologous to Homo sapiens Similar to etr1,accession number BC001946,Smith-Waterman Score=439.
gcggccgcacctatgaccccaacctcaggtggcagcacccctccgggcattactgcaccagctgtgcctagcatcccatcccccattggggtgaatggcttcaccggcctccccccacaggccaatgggcaacctgctgcggaagctgtgttcgccaatggcatccacccctacccagcacagagccccaccgccgcggaccccctggcagcaggcctacgccggagtgcagcagtatgcaggtccagctgcctaccctgctgcctatggtcaaataagccaaggcctttcctcagccgcctccaatgatcccccagcagcagagagaagggcccgagggctggtaacctgttcatctaccatctgccccaggagtttggggacagctgagctgatgcaagatgttcctccctttcggctttcgtgaggcttcgacaacccggccagcgcgcagaccgccatccaggccatgaacggcttcccagatcggcatgaagaggctcaaggtgcagctgaagcggcccaaagacgccaatcgcccgtactgagcgccggcgggagcgtcccccgggggagaccaggactcgcacagggcaggatgctgaacgggctacattaaaaaacaaacctctctctatatatatttataaatgagaactgttggatgacacctttgacatatcagccaatatcaatcaagctgaagactccagacactgtctgtgtgactgtaacatttcttcaaggaaagtatagcgtctatggagttcagagggcacgtgtttgggggaaaatatatatgacatgaagaagaagatgaagaaaactgagaaaatggcgctcaaaaggcaactttaaaacaaaatatcacgagcagtcggggactgctgaagggctgggagctgggaggagccgctgcttactgatcccggggcttttccagcccacgggcgcctgacgcaggctggggcaagtggtgcgtggggcctggtccccaaggggcggctgagaggccgccactgagcatctctatctgtcattcctttagctatttaggcaccaaaggccctagctttgtagtgcagatgtgtagctatatgtcaaatagagggggaatggaggaccccctccttcctgcctcatggctgttcttgaaacagcttagagcgattctatgaaaaaatgtaataaaaaattaaaaaaaaaacaaaaaacaaaaaaaacaacaaaaaaaggaaaaataacgcttcaatgcttttaaaactagcggatccttttttatttgatacttttgagaggcgctttgatgaccctcatcacaagtctatgacacttttcctatggttttctgtattgctatgtctggatggagctgttaaaagatgaacaaattgcgtggatatttggggaaagcaacacaaatcttaaaactcacccgtgaagtgtgagaaaacaaggaggggaacaaatgggacttaccaagcaaggtcattgttgtgaaaagtctgtaaatgcttctaactcttccccctcttaaaatcataatagttgtacagaattttaaaaarggraaagtttaaaatacctatataatagaagaaaaattagaggaaagcaaaaaataaaaaaaaaaaaataaaaaaggaaaaaaaaaacctatagaagttagcattactgctaaaatcccagatgttgtaggactgtacttttgtagagtttagacagagcatcaatcccttctccccgcgagtgcagtcggatgccgttgtccccaagggccaggccgaactcgccccacacctgcgggcgcctggctgccgacgccggtggaggccacgccgtcggtcgggaacggtcgcgtcgcccgggtcgccgccgccgccgccgccgtcatcctcgcctctcgcttccctctgggagctgcgcgcgcttcactcaccttccgcttcactcgccttccacgcttgctccagagactttccgggcaagggagaactgggaactttcatcttaaaacaactagacaacacacacacacacaaaaccttaaa

SEQ ID NO: 10479 - DNA, 1083 bp, Homo sapiens
  SIMILAR (99)..(275): 561254mologous to Homo sapiens Clone HHFEK40 of TM4SF superfamily,accession number W61624,Smith-Waterman Score=142.
cagatggtgagtgaccgcggagctgggcagcacagatgcaggacgctgcctccatcgcagaaagttctcctggacgccactgttccagatcctgatggttcaagtgctacggatgcaatagctcagcgactggcagcgcagcacgtacctgctgtcgtgggaggtgagagccaccagtgcccgacagcggctgcaaggcagtggtggcgctctgcagccagccggcccacccctccaacatctgcaagggggtgggaggctgcctcaccaagctacctgctactcatgggggcgatgggcatcagggtggcctgcctggaggtttggagggatggagaggagagaggaggggaagaagctaccttcttcactagccttgctgagagacaagtgggtacggcccacaggcacctccaccagcctgccctctacatccagattcgcaaggtgccagctgccctgcacatgtgcgtggtgcagaagcctagcttatttcaggctgacagccgggcccccctggagcaggggctcaggcagcaagcgagcctggcaacagcccggcccatcgtctcaggtgccaatgctggccccgcaggtttaaaagtccctcaggctgcccagctgcaactgtccccctacctccatcgtggggttggggatgaagcatgccgctatggtcgctcacagccgaccaggaaagccttcgcactgtgcatctgtgcggcgcctgccctgccctgccctgccctggacggctcttggatggtctgtggccttggccaggagacccggacctccttggccaatgttcagtcgttcactcaacggccacagcagcagcctctgactgtctggatgttgaacaggggaaggaagccagcccagggcacgctcaccgtcatctgtcccattggacctggacatctactcacctccaccatcactgagagtgtgtgtgtaccgaggaggaacaagtaccactccaggaccctccctgctgcacagcactgtcagtggttggtgactgctgtccccacagccctgggccttgtcatccgggcaggcagcaagaagctgtgctga

SEQ ID NO: 10480 - DNA, 392 bp, Homo sapiens
  SIMILAR (40)..(246): 521254mologous to Cricetus cricetus torsinA protein,accession number AJ298842,Smith-Waterman Score=175.
cctgggacctggcttccctgcgctgcaccttgggcgccttttgcgaatgcgacttccggcccgacttgccggaaggatctgaagagctgggtccaagggaacctcactgcctgtggccgctccctcttcctcttcgatgagatggacaagatgcccccaggcctgatggaagtcctgcgacctttcctgggctcctcctgggtggtatacgggaccaattaccgcaaagccatcttcatcttcatcaggtggggcccggctttgcagtgggcacagtgcgggggccacttctcagaggttcagctctacagccttagcctgtgctcccagcagaatccagttccccatgggcttagctgggctttcccagtgccctccgccactctcagaga

SEQ ID NO: 10481 - DNA, 431 bp, Homo sapiens
  SIMILAR (323)..(430): 351254mologous to Hepatitis C virus core protein,accession number AF233723,Smith-Waterman Score=53.
tttttctggtcccacagctgagtttattatacttgttttcttttacaaaattaaaaacatctaaaaccaggcccaagtggcagcttgagtccctccatttctggaaactgagaaggctccacctggcttgatatggacacagggtgtggggtggaggggaggaggtatggtgcccgaccaaggaggcagactgaggagggagcaccgccacgagccacagtccctgagttataattcacagtaagaaggctcaggctgcagggggaggtcaaggctcagtgaggttctggggtgaccaggggtttccctggggaaggtggccggggccaagatgctctcgagccagtttagaggccagggcccttcctggccatctgtcccgtggcctagccgacactccgttcatctcacttggtgctctgggttcctgt

SEQ ID NO: 10482 - DNA, 4445 bp, Homo sapiens
  SIMILAR (395)..(976): 391254mologous to Mus musculus torsinA protein,accession number AJ298841,Smith-Waterman Score=337.
atggcggctgcgacgcgcggctgccggccctggggctcgctcctcgggctgctcgggctggtctcggccgcggccgccgcctgggacctggcttccctgcgctgcaccttgggcgccttttgcgaatgcgacttccggcccgacttgccgggtctggagtgtgacctggctcagcacctggccggccagcatctggccaaggcgctggtggtgaaggcgctgaaggcctttgtgcgggacccagcccccaccaagccgctggtcctctccctgcacggctggaccggcaccggcaaatcctatgtcagctccctgctggcgcactacctcttccagggcggcctccgcagcccccgcgtgcaccacttttctcccgtcctccacttcccccaccccagccacatcgagcgctacaagaatggatctgaagagctgggtccaagggaacctcactgcctgtggccgctccctcttcctcttcgaatgagatggacaagattgcccccaggcctgaatggaagtcctgcggcctttcctgggctcctcctgggtggtatacgggaccaattaccgcaaagccatcttcatcttcatcagcaacacgggtggcgagcagatcaaccaggtggcattggaggcgtggcgcagccggcgggaccgcgaggagatcctcctgcaggagctggagccggtcatctcccgcgcggtgctggacaaacccgcaccattgccttctccaaactcggggcatcattggaaagagcgcctcctagacgcagtggtgcccttcctcccgctccagcggcaccacgtccggcactgcgtgctcaacgagctggcccagctgggccctggagccaaagggatgagggttgtccaggctgtgctggacagcaccaccttcttccctgaagacgagcagctcttctcctccaacggctgcaagaccgtggcctcccgaatcgccttcttcctctgactctgggggtgttgttcttcggcccccctgatggccaggccatgcaggaaaggccaggggcctctgtcacaggaacccagagcaccaagtgagatcaacggagtgtcggctaggccacgggacagatggccaggaagggccctggcctctaaactggctcgagagcatcttggccccggccaccttccccaggggaaacccctggtcaccccagaacctcactgagccttgacctccccctgcagcctgagccttcttactgtgaattataacgtcagggactgtggctcgtggcggtgctccctcctcagtctgccacccgttgccccttgcctctttggtcgggcaccatacctcctcccctccaccccacaccctgtgtccatatcaagccaggtgggagctttctcagtttccagaaatggagggactcaagctgccacttgggcctggtttttagatgtttttaattttgtaaaagaaaacaagtataataaactcagctgtgggaccagaggactgttgctaagacttttaattgctctggaaggaggcagctggctgagtgccagtgtggggaggtgggtagaactcatcccctccccagcaagaagggagggtctggatggtcccttcagacagcttcatagtaggtgaggtcctgatcaacctcagttttgctgagacttgggctgggtccccaggtggactcggccttgctggaagttgagctcatgccctggctcttgccctgggcaccctcagccttgctggacctctggccctggccttgggcatactcagttttgctgaggctccagtttgagtcatagaaagcctcagtcttggtggaacttcggagcagtcccctgcttcggccctgggtggcatcaaccttgctgggtctccagctccggccacgagcagccttgacctttctgggcctctgccttgggctccgggtggtcttggtcttgctgggctcctgccttgggccctgggtggcctcaatctcgctggagctctgcctctggccctgagtggcctcagtcttgctggagctctgcccctggccctgggtggccctggtcttgctggagttccgcctctggctttgggtggccttggtcttgctggagttcctcttgtgtatagtggccttggtcttgctggagttccgcctctggctctgggtgggctcagtcttgctaaggctctgcctctggccctgggtggccttgatttttctgggaccatggcttagtgcctccctgttgttcccagagtccgaggattgcgtcttcaacagtgacgagtcagagaatgtcacggcggtggctgaggtgctcctgtattcctggcagatagccgacatctcagtctctgaggtgcctgtggtcctgaagctcatgctggaggctgaagaggtctggtcaaggtagctgtcagacagggacgccaccttgctaggtatgagctctgattttttctcctcttttttctccttctccttttcttcctcctcctcaggggcctcagcctctccctctgagcttcccggttttacctgcggaatctcaggggtggccttcagctcctcggaggtcgcaatcaaaggctccccctgcttccatgagtgctgcagggccaaggccttctggcgctccaactcgtgccgtttaagcatccccacaatgccttgtgggctgccggcctgcaggctgccctccaccatctgctccagctgcagcctggccaggtgggctatctgggtgctaagcacctcctccaccgacatgcccgggaagaggttggtcatcagcagggacagctttggttgcttggggttgaggagcaggacagtggccacatcctggcgggccccaaaaatgttctgcagcagctgccggctcttggcccggtacaggtagtactgggccttctgggggttgtgccggatggccgtggagaagtggttctctgccttctggaactgcctgcacgacacagtgggtcccaagctgctatgagctgggccatcgtgggggcgggagcccacgcacttgcgcctctgctcgcagaagcccatcttctcctgcagcaggcccatgcgcgtgttggcgccctcgtcctgagggctcagcgccagcgcctgctggtagtccgcctcggcaaaggccaggttgcccagctggaagaagcaatcgcctcggttgatgtagagtcctttctcctgctgctcgtcccggagggccttgttcagcagcagcacgccctcctggtaggcgccctgcctgtagcagtgcacggcaaagtcgttgtaggtcagcaacagctggcgctgtgcctgccgcaccatgtcctcctggtcctcggtcaccatgtccagcaccttcaggaagtcctccactgccccatcgaactcctggagccgtcggtacatggtgccccttcccatgcagtaccggaagaggaagagactggggtccagagggttgttctcgatggcacggttgatccgctgcagtgcgtgctgcagcttgccctgcacagccaggatccccgcatcttggcgcgcctgctgggcctgggccaccatcttctggagcagcatcctggcctgcgggtgcttgggattcaacagcaaggcgctgtgcaggtcccggtagcagaggtggggcttctggagaaagttgtagagtctggcccggaagatgtagacatcggcgttggtggtgtcctgcttcagctcgttggtgatgagcgtgaggcaggcctgatgctgcttgagggccaggagacaggccatgcatcggtaacggaagcatggtttctcaggctggagctcagcagcatgtgagaagacattcagggcatccaggaaggcacactgctcaaaaaggcattgtccctgtaggtagagcacaaaggtgaggcgctccaggtgcttgcagttgtcctgctgtaatgagtaggcccttcgcaggttctgggcggccgaggagaagtcacagagctggaggtaggcctcagcccgtaaggcatagaagtccaccagctgtgggtccaggtggagtgcgcgggagaagagcagcacagctgtctcccagtctgcctgctccaagcactgctggcctctggagtagtattccctgactttgaggggcactgttaaccctgtgacctttggttttacatcacagatgctttggaacacgtggctggtcccaaagatgtgctgcaggatccctttgggggctggaatcacccatggctttgggatgtcccgtgaggggccctggtcaaccttcagggcatctgacacactccccagcattctgacttctgccccaggttctcccattttggtgaggtcaccttccccaccagctacccaagccagagacctctgtccaagcagccgccgagccttacaaggatctttcacatgcctggttcttggcat

SEQ ID NO: 10483 - DNA, 562 bp, Homo sapiens
  SIMILAR (158)..(559): 961254mologous to Homo sapiens PR-domain containing protein 10,accession number AF275817,Smith-Waterman Score=667.
gccacttcccctcaccagtcacagcagtccactgtggatgttggccagctccatgatcctcagccctacccccagcacgccatccaggtgcagcacatccaggtcagcgagcctaccgcctcggccccgtcctccgcccagggcagttcttccacacaggggcagggttgtgcagcagcagcagcagcagcagcagaattcctctgtgcagcacacgtacctgcccagtgcttggaattccttccgtggctattcatctgagattcaaatgatgacgcttcctccgggtcagtttgtgattacagacagtggtgtggcaactccagttactactggccaggtgaaggcggttacttcgggtcattatgtgttatcagaaagtcaatcagaattggaagaaaagcaaacttctgccctctctggtggagtccaggtcgagccacctgcacacagtgactccctggacccccagaccaacaaacaacagcagaccacacagtacatcatcaccaccaccaccaacgggaacggaagcagcgaagtgcatatcaccaaaccatga

SEQ ID NO: 10484 - DNA, 560 bp, Homo sapiens
  SIMILAR (139)..(240): 321254mologous to Homo sapiens Human prostate cancer- associated protein 71,accession number Y48285,Smith-Waterman Score= 54.
ttttttccaatgactcctcttttattgctgatctggggcagactcacaaaggcctgtgccagttgctgacagtgtctgtcccgcgaggccttcctcctcgttgccgggtcttctgggtgtcaaagaaagtctcgtgttcctcccagcgccggtcacaggccgcacagaggaaattagactcaaaacagccgcagcaacagccatgatgcctgcagggatggggcccagtggctgcatgttcttcgtggctgtgtttgcagcgacattgggccctccaggccttggggtcaaaggtggcccgtctcttgagccagaactcacccacctcctctgggcgtgatgggataaagcagaacatgaagcagcggcactggcttaccttgcagggcaccgatatgtctgagatgatccggtgctctctcaacaagtgtccacaaaagcatctggactcatccccaatccggaaacagtcccataggtaatgggggcagcgccagccaatgtagagacccatagtctgtcaggatctaaagcctgtctagatgtggcttttggctttg

SEQ ID NO: 10485 - DNA, 2597 bp, Homo sapiens
  SIMILAR (330)..(1997): 991254mologous to Homo sapiens NAG-5 protein,accession number AF149297,Smith-Waterman Score=2980.
ggctgatcaagccagaggtaaaccaacagagtgggcagtgtctgctacacagttccaactggatttcccaattacctagtgctatggtcttctttgacaacgtgtctcaagaagacatatcggtgccctgcaaggtaagccagtgccgctgcttcatgttctgctttatcccatcacgcccagagaaggtggcctgggggacagagcgagactctgtctcaaacaacaacaacaacaacaacaacaacaacaacaacaacaactactactactactactactactactactactactactactactacaacaatgtgaagggactgaggggaggccttttcctgactgattactccacctgctcaccccgcaagctgagtcctttccgctcctttgccagcaccgagctcttccacttccatgttcctgaggacacattcctggctgtttggaacctcatcatcttcaaggagcaagggggaacttttggggaccactgcccagaccaaagtgtgactgtgtatttccggtccggggcaccccctgtcatcaatcccctgcatacacacttcccaggggacacagctgtgcctggggttttctcactgaccctcagctggacactgcccaaccgcacctcaggcatctttaacgtcagcagccccttacctggggactggttcttggctgcccaccttccccaggcccacggccacatctctgtcaagggtctccaggatgagtgtcagtacctccttcagccgcagctgattgtccggcgtttgctggacgtcgctgtgctggttcctggccggccctcagagcaaaccctctccccacacaatcgctcagccctgtacaaggtctttgtgcccagcttcacttacagggtttcagcacagctggtgtgtgtggggggccgtggggtatctgcctgccccctgtcactgcgtctgcgtcccaaagccccacccctgcacaactcaagctctgtggcctgtggaggtgcctcaggatgccagctggagctggcactgcccccctgggggcactgggtctacgtgcgtgtggaaacatcatcccggggccctggtaggaccatccgcttccagctgtgtgtgcggttgcaagagtgcccacagcccggcctgctccgagccctggtccctggagctgccatgaacatgccccagtccctgggcaaccagccactgcccccagaaccgccatcccttggaacccctgcggaggggcctgggaccacgtccccacccgagcactgctggccagtgcgcccgactctgcgcaacgagctggacaccttctctgtccacttctacatcttctttggcccaagtgtggcccttccccctgagcgcccagccgtgttcgccatgaggctgttgccagtgctggacagtggaggcgtcctcagcctggagctccagctcaatgcgagctccgtgcgccaggaaaacgtgacggtgtttggatgcttgactcacgaggtgcccttgagcctgggggatgcagcagtgacctgttccaaagagtccctggccggcttcctcctctctgtcagtgccaccaccagggttgccaggctgcgaatcccattcccgcagacggggacctggttcctggccctccgctccctgtgcggggtggggcctcggttcgtgcggtgccgcaacgcgacggccgaggtgcggatgcgcaccttcctgtccccatgcgtggacgactgcgggccctacggccagtgcaagctgctgcgcacacacaattatctgtacgcagcctgcgagtgcaaggccgggtggagaggctggggctgcaccgacagtgcagatgcgctcacctatggattccagctgctgtccacactcctgctctgcctgagcaacctcatgtttctgccacctgtggtcctggccattcggagtcgatatgtgctggaagctgcagtctacaccttcaccatgttcttctccacgttctatcatgcctgtgaccagccaggcatcgtggttttctgcatcatggactacgatgtgctgcagttctgtgatttcctgggctccttaatgtccgtgtgggtcactgtcattgccatggctcgtttacagcccgtggtcaagcaggtgctgtatttgctgggagctatgctgctgtccatggctctgcagcttgaccgacatggactctggaacctgcttggacccagtctcttcgccctggggatcttggccacagcctggacagtacgcagcgtccgccgccggcactgctacccacccacgtggcgccgctggcttttctacttgtgccctggcagccttattgcaggcagtgccgtcctgctttatgcttttgtggagacccgggacaactacttctacattcacagcatttggcatatgctcattgcgggcagtgtgggcttcctgctgccccctcgtgccaagactgaccacggggtcccatctggagcccgggcccggggctgtggttaccagctatgcatcaacgagcaggaggagctgggcctcgtgggcccaggaggggccactgtcagcagcatctgtgccagctga

SEQ ID NO: 10486 - DNA, 1149 bp, Homo sapiens
  SIMILAR (232)..(558): 811254mologous to Homo sapiens phosphoglycerate mutase 2,accession number J04173,Smith-Waterman Score=443.
atggtcacctacaagctagtactgatcagatgtggtgagagcacgtggaacctggagaatcacttcagcagctgtgcagaagagagcgatcggatcctctggacagtgctagatgccattgatcagatgcggctgccagtagtgaggacttggtgcctcaaggagtggcattacgggagtctggctggcctcaataaagcagaaacttctgcgaagcatggtgaggcccagagcaacatcagtaagggttgcaggtatgcagacctcactgaagatcagctatcctccggtgagagtctgaaggaaatagttcctcagatcaaggaggggaaatgggtactgactgcagcccatggcaacagccttcggggcattgtcaagcatctggagggtctctctgaagaggctatcatggagctgaacctgccgactggtattcccatcgtctatgaattggacaagaacttgaagcccatcaagcccatgcagttcctgggggatgaagtgactctgtgtaaagccatggaagctgtggctgcccagagcaaggctaagaagcgaaggccagcaggcatgctactgtcccccggaacaccctccctggccatcccttcctctgcccctgccccctgcacatgtcacactgaccacatctggaactcacccgtatatagtgacctggccatactgagagccaaccccttctgcgttcatatatctaaggcaaattatctggtcaatgagctacacacagcagtaaatgtagccggtctctacattggctggcgctgcccccattacctatgggactgtttccggattggggatgagtccagatgcttttgtggacacttgttgagagagcaccggatcatctcagacatatcggtgccctgcaaggtaagccagtgccgctgcttcatgttctgctttatcccatcacgcccagaggaggtgggctgttgctgcggctgttttgagtctaatttcctctgtgcggcctgtgaccggcgctgggaggaacacgagactttctttgacacccagaagacccggcaacgaggaggaaggcctcgcggagcagactatgtaccttttgcagagatggctgtgctccgagaagccatcctcagcaactctgacttctag

SEQ ID NO: 10487 - DNA, 934 bp, Homo sapiens
  SIMILAR (5)..(451): 931254mologous to Homo sapiens phosphoglycerate mutase 2,accession number J04173,Smith-Waterman Score=732.
ggggcgcctcaatgagcggcactatgggggtctaaccggtctcaatatagcagaaactgctgcaaagcatggtgaggcccaagtgaagatctggaggcgctcctatgatgtgccaccacctccgaaggagcccgaccatcctttctacaggaacatcaggatggatcgcaggtatgcagacctcacagaagatcaactaccctcctgtgagagtctgaaggatactattgccagagctctgcccttctggaatgaagaaataggtccccagatcaaggaggggaaacgtgtactgattgcaacccatggcaacagcctccggggcattgtcaagccatgggagggtctctctgaagaggctatcatggagctgaacctgccgactggtattcccattgtctatgaattggacaagaacttgaagcctatcaagcccatgcagtttctggggggatgaagagacggtgcgcaaagccatggaagctgtggctgcccagggcaaggccaagaagtgaaggccggcggggaggatactgtccccaggagcaccctccctgcccgtcttgtccctctgcccctcccacctgcacatgtcacactgaccacatctgtagacatcttgagttgtagctgcagacggggaccaggggctcccatttaattgtagcaattatgacgccaggacccactcacttgatcaagcctagccgcatacgactccaattgcccacacctcccactcaacgcgggacctacgcccctcgctccgccggaaccataccccaccaatcgtgagtcgcccgagcttcctacgcacacgacagtcagagagcgcacccgtacaccccgtgacatgggcgcaacactcgccccacctgacctggactcccagactccacgacacccgcggattgcgctcgaccgaggacgaggc

SEQ ID NO: 10488 - DNA, 539 bp, Homo sapiens
  SIMILAR (539)..(264): 821254mologous to Homo sapiens splicing factor,accession number L04636,Smith-Waterman Score=388.
  misc_feature (1)...(539): n = a,t,c or g
ggaggagataaaccaattttatgtctatcatgttatacaaaaatctagaaataatagatttgtacagaaaaaaatgataataaatgagaacacaaaacatataatttaaatttggtattttttcccccatgatattaggatgataatcatttcaaagcacatgtctagcttcagagtaggatttgttcactggccaaagcctgccatgaaactatggctttcagcatctgtctgctctactggctcttgacaaaactcttgaggtcttcaagaaaagtaatgtactcctggtgctccagggctgtgttgagtgtataattagtatccttccattcagactcgccagtggactgaaagctaacttccctgatagagaagatgtcactctcagcctcgtcttcttgtccaacctcatcctctggataatgacagtccaacacaagggccttcttgccatcatcattctttataactttcaccacgaaattggggagtgatgtcagttcaggcttctgttcttcaaacttctgnctttgcga

SEQ ID NO: 10489 - DNA, 1329 bp, Homo sapiens
ccggcggcgcctcaggtcgcggggcgcctaggcctgggttgtcctttgcatctgcacgtgttcgcagtcgtttccgcgatgctgcctctgctgcgctgcgtgccccgtgtgctgggctcctccgtcgccggcctccgcgctgccgcgcccgcctcgcctttccggcagctcctgcagccggcaccccggctgtgcacccggcccttcgggctgctcagcgtgcgcgcaggttccgagcggcggccgggcctcctgcggcctcgcggaccctgcgcctgtggctgtggctgcggctcgctgcacaccgacggagacaaagcttttgttgatttcctgagtgatgaaattaaggaggaaagaaaaattcagaagcataaaaccctccctaagatgtctggaggttgggagctggaactgaatgggacagaagcgaaattagtgcggaaagttgccggggaaaaaatccccgttccctttcaacattaacaacagcattccccccaacattttatggtgagaaggacccctcgcaaagccagaaggtttgaagacagggagcctgaactgacatcacttcccaaatttggtggttgaagttataaagaatgatgatggcaggaaggcccctggtgttggactgtcattatccagaggatgaggttggacaagaagacgaggctgagagtgacatcttctctatccagggaagttagctttcagtcccactggcgagtctgaatggaaggatactaattatacactcaacacagattccttggactgggccttatatgaccacctaatggatttccttgccgaccgaggggtggacaacacttttgcagatgagctggtggagctcagcacagccctggagcaccaggagtacattacttttcttgaagacctccaagaagttttgtcaagagcccatcgagcagacagatgctgaaagccatagtttcatggcaggctttgatcagtgaacaaatcctactctgaagctagacatgtgctttgaaatgattatcatcctaatatcatgggggaaaaaataccaaatttaaattatatgttttgtgttctcatttattatcatttttttctgtacaaatctaattattttctagattttttgtataacatggatagacataaacacctggtttatctcctccaaggcagtttgtctttttctattcctcccccttcaacctgtgtcacaaaagaccaagaacagatgtcggaaaagtttttttttcttcagtattgtttaaaagtttcaatacaaaataagttataaataaaaggcttgtatgtaaaaaaaaa

SEQ ID NO: 10490 - DNA, 1412 bp, Homo sapiens
  SIMILAR (294)..(494): 411254mologous to Rattus norvegicus cyclic nucleotide-gated channel beta subunit,accession number AJ000496,Smith-Waterman Score =153.
gcggccggctgccggaaagagaactcacttgaccttcgctctcagtttccaaggggcagggattccgaggactttaatgtaaaagaggaggctaatgctgctgctgaagagatccgttatacccacattctcaatcgggtactccctccagacatccgtatattggcctgggcccctgtagaaccaagcttcagtgctaggttcagctgccttgagcggacttaccgctattttttccctcgtgctgatttagatattgtaaccatggattatgcagctcagaagtatgttggcacccatgatttcaggaacttgtgtaaaatggatgtagccaacggtgtgattaattttcagaggactattctatctgctcaagtacagctagtgggccagagcccaggtgaggggagatggcaagaacctttccagttatgtcagtttgaagtgactggccaggcattcctttatcatcaagtccgatgtatgatggctatcctctttctgattggccaaggaatggagaagccagagattattgatgaagctgctgaatatagagaaaaatccccaaaagcctcaatatagtatggcttgtagaatttcctctagtcttataatgcctgtaagtttgaaaatgtcaagtggatctatgaccaggaggctcaggagttcaaatattacccacctacaacaactgtgggctaatcatgctgtcaaaactcacatgttgtatagtatgctacaaggactggacactgttccagtaccctgtggaatgggaccaaagatggatggaatgacagaatggggaaatgttaagccctctgtcataaagcagacccagtgcctttgtagaaggagtgaagatgcgcacatataagcccctcatggaccgtcctaaatgccaaggactggaattccgggatccagcattttgtacgtaggggacggaattgagcacccacatttattccatgaggaaagaaacaaaagccaaaagggactgtaatgacacactagaggaagagaatactaatttggagacaccaaacaagagggtctgtgttgacacagaaattaaaagcatcatttaaccatagacaatttgccaggatctaggaaccacctaatggtaggtggacagaaaaggaaaaaaaaaaaaaaatttacttgcaagtactaggaattcagatgatcagctcttaaaaaaaaaaaaaaagcaaaaagactaaagccctattaaggaagttattgctttaataagaaatttcaaatattctcttatcccggtccaaaaggattaagcgattaaagaacgtaaaatggagatgtatttacatacacctggaaacctgtgccttgtattcaaattcattaaagcctaatcctgcaagaaaaaaaaaaaaaaaaaa

SEQ ID NO: 10491 - DNA, 437 bp, Homo sapiens
  SIMILAR (199)..(2): 431254mologous to Homo sapiens p8 protein,accession number AF216972,Smith-Waterman Score=103.
  misc_feature (1)...(437): n = a,t,c or g
ctggttgaccgcctgcggaattcggacgaggcgctccgnactganacggcgtccctgggccggacggcggtgtcctggcgtggcggtttgccggcactggagcgggagcgcactgggcgcgggaccgggaggcgcagggaccggacggctcccgagtcgcccacctgacggtaccgagagggcggcgcccctccgagcagagccgtcccggccactcccctgggatctgacttggctcttgcggtcgcgggcaccgtgaagccctggggtgtgcgtggctcctcctgctagaagaagtcttcacttcccaggagagccaaagcgtgtctggccctaggtgggaaaagaactggctgtgacctttgccctgacctggaagggcccagccttgggctgaatggcagcacccacgcccgcccgttcaatgctgccaccac

SEQ ID NO: 10492 - DNA, 594 bp, Homo sapiens
  SIMILAR (763)..(960): 781254mologous to Arabidopsis thaliana putative protein,accession number AL162506,Smith-Waterman Score=269.
ttttttttttttaaatacaaatgttttattacgcaaaccacatgtaggtcccaggctcaggggcttaccctacagcccccactggtccctggctccaagcctgctccttgccctttgcccaccctggaaagccaggatctcctatggagtgtgtaggtgtccacgagtgtaccggtgtgcgggcctcctgggctgcaggcactcaggcatggtggcagcattgagggaaagacaggtgtttggggagcggtgtccccacctgcccaggctcaaggagtcacaggggtctgcacagtcctttctgctgtggaacacgtgataagatgctggtcggggggaacatagcaacagcgccgagcagagagcccacctggatggccacgccggcttgccagcaatgccggccggcccccgccatgcagcagggagctgggctgccaccttcacgtaggagaacacgccaagacacagcacccacgacagcaccacgaggaccacccccgccgaggtgcccaccaggggcgggcaggggctcaggactgccagcgccatcaggtagcccccacagaacacgcccagcagagagaggcggcc

SEQ ID NO: 10493 - DNA, 2061 bp, Homo sapiens
  SIMILAR (40)..(333): 711254mologous to Homo sapiens Human thyrotropin GPR N- terminal sequence,accession number W03626,Smith-Waterman Score=365.
gccacgggtgagtcgggtcgtggctgctgccgggtcctgcgcgctccggactgaggtggcgtccctgggccggacggcggtgtcccggcgtggcgggaagccggcactggagcgggagcgcactgggcgcgggaccgggaggcgcagggaccggacggctcccgagtcgcccacctgacggtaccgagagggcggcgcccctccgagcagagccgtcccggccactcccctgggatctgacttggctcttgcggtcgcgggcaccgtgaagccctggggtgtgcgtggctcctcctggtaggcgccctttcccggcgtccggcttggggtggtggtggcgttgactccagccccgcctctccctggagaggagggctccactcgctccttcggcctcctcccctggggccgcagcgactcgggccggcttcctgcttccctgcctgccggcggtcccgctggctagaagaagtcttcacttcccaggagagccaaagcgtgtctggccctaggtgggaaaagaactggctgtgacctttgccctgacctggaagggcccagccttgggctgaatggcagcacccacgcccgcccgtccggtgctgacccacctgctggtggctctcttcggcatgggctcctgggctgcggtcaatgggatctgggtggagctacctgtggtggtcaaagagcttccagagggttggagcctcccctcttacgtctctgtgcttgtggctctggggaacctgggtctgctggtggtgaccctctggaggaggctggccccaggaaaggacgagcaggtccccatccgggtggtgcaggtgctgggcatggtgggcacagccctgctggcctctctgtggcaccatgtggccccagtggcaggacagttgcattctgtggccttcttagcactggcctttgtgctggcactggcatgctgtgcctcgaatgtcactttcctgcccttcttgagccacctgccacctcgcttcttacggtcattcttcctggggtcaaggcctgagtgccctgcttgccctgcgtgctggccctagtgcagggtgtgggccgcctcgagtgcccgccagcccccatcaacggcacccctggccccccgctcgacttccttgagcgttttcccgccagcaccttcttctgggcactgactgcccttctggtcgcttcagctgctgccttccagggtcttctgctgctgttgccgccaccaccatctgtacccacaggggagttaggatcaggcctccaggtgggagccccaggagcagaggaagaggtggaagagtcctcaccactgcaagagccaccaagccaggcagcaggcaccacccctggtccagaccctaaggcctatcagcttctatcagcccgcagtgcctgcctgctgggcctgttggccgccaccaacgcgctgaccaatggcgtgctgcctgccgtgcagagcttttcctgcttaccctacgggcgtctggccttaccacctgggctgtggtgctgggcagtgctgccaatcccctgggcctgcttcctgggccatgggtgttgctgtgcaggtccttggcagggctggggcggccttctctctgctgggcgtgttctgtgggggctacctgatgggcgctggcagtcctgagcccctgcccgcccctggtgggcacctcggcgggggtggtcctcgtggtgctgtcgtgggtgctgtgtcttggcgtgttctcctacgtgaaggtggcagccagctccctgctgcatggcgggggccggccggcattgctggcagccggcgtggccatccagggaggcaggacaccgaactgtgatcagtatgacgggcctggcagcaaggcccattctcccaggcaagaggccccacttctgcagaagggcccctgcagctacagggagcgtgcaggcactggggatggaccatcagaggaggaaggagcccctgtgacccggaaagcctctagtctgggccccatcaaacatcagggggcaggccagctcccaggggggctcaggaccacccaactctga

SEQ ID NO: 10494 - DNA, 1198 bp, Homo sapiens
  SIMILAR (187)..(606): 831254mologous to Homo sapiens phosphoinositol 3-phosphate- binding protein-2,accession number AF302150,Smith-Waterman Score= 573.
ttttgccacttaaaaatttctcaaatttcttctttccacgtaattgtgacataggtattatttgtgttatatcccagatggctcactagggctactaatgtttagagtttgatttgtgtctttagcagtaaacattttaaaagaaacttttagcagttttttagggtaattacatgtcttcctttcaagggtccagattatagactctacaagagtgaaccagagttaacaacagtggcagaagttgatgaatctaatggagaagaaaaatcagaacctgtttcagagatagaaacttcagttgttaaaggttcccactttcctgttggagtagtccctccaagagcaaaatcaccaacacccgaatcttcgacaatagcttcctatgtaaccttgaggaaaactaagaagatgatggatctaagaacggaaagaccaagaagtgcagtggaacagctctgtttggctgaaagtactcgaccaaggatgactgtggaagagcaaatggaaagaataagaagacattcaacaagcgtgcctgagggagaagaaaaaagggttaaaatgtttttcggtgctttcagaccagtcacccttacaaagcccttcaaatttaagggataatccatttaggactactcagactcgaaggagggatgataaggaactggacactgccattagagaaaatgatgtaaagccagaccatgaaactcctgcaacagaaattgttcaactaaaagaaaccgaaccccaaaatgtggacttcagcaaagagggttactggattgccccagtgtcagcattttgccaggaaggtcaatcaagagggcaaagaaccaaaacagttaaaggtgtaagcaggatagtggacatggaacgtaaattggatggaaagggaaggttaccggggaatctgttggcccagattggaaatggcacggatatcagaggatcccccccgctcgaccctcggttctggacaacggagatcgtccccagtcaaggtgattatatcgcagatctcacttgggagcttctcttcaaccatgttgtacagcacaatgagtctagctggccgacttcccagcggtcctttgtgaggtgggtcaacgacacagtcctgttccagcacacgggaaaggaagtcaagctagcattacatcagaaagggaccatacacagagattactgctaa

SEQ ID NO: 10495 - DNA, 436 bp, Homo sapiens
  SIMILAR (129)..(269): 971254mologous to Gallus gallus transcription factor Tcf4,accession number AB040438,Smith-Waterman Score=255.
  misc_feature (1)...(436): n = a,t,c or g
accggtccggaattcccgggcccatatggtcccaccacatggggagggaacctggacatggaagcattgacggtcagagctgtggggtaggggtgtctgaatcctcctgtcgtgattgggtacactggttccctccccatatggtcccaccacatcatacgctacacacgacgggcattccgcatccggccatagtcacaccaacagtcaaacaggaatcgtcccagagtgatgtcggctcactccatagttcaaagcatcaggactccnnnnnnnnnnnnnnnnggggcgcccgtttaaaagaaccaaatttaactacggcggggtggggaggaaaaattttttttaaggggcccccaaaaaaaatttcgggggcggggtttaaaaaacgtggggaggggaaaaacctgggggtaaccaaattaaatcgcttggg

SEQ ID NO: 10496 - DNA, 959 bp, Homo sapiens
  SIMILAR (2)..(955): 991254mologous to Mus musculus HMG-box transcription factor TCF4B,accession number AF107298,Smith-Waterman Score=1721.
tccgcctcgctccgaaagtttccgagacaaatcccgggaaagtttggaagaagcggccaagaggcaagatggagggctctttaaggggccaccgtatcccggctaccccttcatcatgatccccgacctgacgagcccctacctccccaacggatcgctctcgcccaccgcccgaacctatctccagatgaaatggccactgcttgatgtccaggcagggagcctccagagtagacaagccctcaaggatgcccggtccccatcaccggcacacattgtctctaacaaagtgccagtggtgcagcaccctcaccatgtccaccccctcacgcctcttatcacgtacagcaatgaacacttcacgccgggaaacccacctccacacttaccagccgacgtagaccccaaaacaggaatcccacggcctccgcaccctccagatatatccccgtattacccactatcgcctggcaccgtaggacaaatcccccatccgctaggatggttagtaccacagcaaggtcaaccagtgtacccaatcacgacaggaggattcagacacccctaccccacagctctgaccgtcaatgcttccatgtccagctttctgtcttctaggttccctccccatatggtcccaccacatcatacgctacacacgacgggcattccgcatccggccatagtcacaccaacagtcaaacaggaatcgtcccagagtgatgtcggctcactccatagttcaaagcatcaggactccaaaaaggaagaagaaaagaagaagccccacataaagaaacctcttaatgcattcatgttgtatatgaaggaaatgagagcaaaggtcgtagctgagtgcacgttgaaagaaagcgcggccatcaaccagatccttgggcggaggtggcatgcactgtccagagaagagcaagcgaaatactacgagctggcccgggtcg

SEQ ID NO: 10497 - DNA, 1047 bp, Homo sapiens
  SIMILAR (298)..(948): 441254mologous to Mus musculus HMG-box transcription factor TCF4B,accession number AF107298,Smith-Waterman Score=355.
  misc_feature (1)...(1047): n = a,t,c or g
atggtaagcgcggccggcggcgggcgggcgnggcaggggtgcgcggtggccggcccgctgcatcccgcgcgcctgccctgctgcgtccacggctgtccagtccgcatgcatgctctcagcctttgccatgttcgctgtcactttgcggtaactttcaggttgatgtaccttgactggttgcccacagttatagagccttgtggggtcgggtctaacaaagtgccagtggtgcagcaccctcaccatgtccaccccctcacgcctcttatcacgtacagcaatgaacacttcacgccgggaaacccacctccacacttaccagccgacgtagaccccaaaacaggatgtgctcctgtggaactggcagatgtgcggtggcacgtacttgcagaatccgctcatgtgtgccttgtgaagctcttagcccctgcgacgcacgcggtgcccattcagcaggaatcccacggcctccgcaccctccagatatatccccgtattacccactatcgcctggcaccgcaaggtcaaccagtgtacccaatcacgacaggaggattcagacacccctaccccacagctctgaccgtcaatgcttccatgtccagaaagcatcaggactccaaaaaggaagaagaaaagaagaagccccacataaagaaacctcttaatgcattcatgttgtatatgaaggaaatgagagcaaaggtcgtagctgagtgcacgttgaaagaaagcgcggccatcaaccagatccttgggcggaggctggggtacaatgcaagggcatttggcttgaagcggggttggaggttggacaaataccgggggtttgtgtggatggagatggcagtatggtcacttcctcctgccttctccttccagggaaagaagaagaagaggaaaagggacaagcagccgggagagaccaatgacaagcccgaaagctctctgggcgccagcagcctcatggtggtgggaaactggacctaccgtaatcaagaaaaacatattcccacgttggaacttgaccatacagttagtgtgtag

SEQ ID NO: 10498 - DNA, 398 bp, Homo sapiens
  SIMILAR (8)..(331): 871254mologous to Mus musculus p116Rip,accession number U73200,Smith-Waterman Score=463.
cttgcctgcagccatcgaagccatgaagaacgcccaccgggaggaaatggagcgggagctggagaagagccagcggtcccagatcagcagcgtcaactcggatgttgaggccctgcggcgccagtacctggaggagctgcagtcggtgcagcgggaactggaggtcctctcggagcagtactcgcagaagtgcctggagaatgcccatctggcccaggcgctggaggccgagcggcaggccctgcggcagtgccagcgtgagaaccaggagctcaatgcccacaaccaggtcttattgcgggtaaaggaatcggaaatacagtacctgaaacaggagattagctccctcaaggatgagctgcagacggcactgcgggacaagaagtacgcaagtgaca

SEQ ID NO: 10499 - DNA, 381 bp, Homo sapiens
  SIMILAR (300)..(380): 701254mologous to Homo sapiens unnamed protein product,accession number AK026247,Smith-Waterman Score=98.
tccacaccactctctgctgtgttgacttcctgttgtcttcatcaaagcttttttccgtggtattctaaaattaggccagcagtgggggctgggagggcatctgtgttagtcctttcctggctgtgacccgccacactcactgtcagtattaaggcccagcagcctgttgataagctaccctgactcctcacccgctagtctggctgttaagaggagaaagtgcactgccttccagcccaggaggaggacagcattttgtatttgtgccactgatgcagcttagaacgcacacccctgagagtcgtggcaaacctttcacaacctggaaaatgttgaaagcaaccattcctattcttgaatgattaatattgaatcttgcac

SEQ ID NO: 10500 - DNA, 928 bp, Homo sapiens
  SIMILAR (90)..(284): 1001254mologous to Mus musculus p116Rip,accession number U73200,Smith-Waterman Score=362.
gcggccgcgctgagcccctagcccgccgggagcgccaggccgttcaggcctgcgccgccgccgccgccgccgtcgccgccgcgccgaccatgtcggcagccaaggagaacccgtgcaggaaattccaggccaacatcttcaacaagagcaagtgtcagaactgcttcaagccccgcgagtcgcatctgctcaacgacgaggacctgacgcaggcaaaacccatttatggcggttggctgctcctggctccagatgggaccgactttgacaacccagtgcaccgggtctcggaaatggcagcgacggttcttcatcctttacgagcacggcctcttgcgctacgccctggatgagatgatgtcttcccagtgactctccttggggcctggggaaaccacaagggagcttggattcattcacccattgctgccttgctgtgtgcctcagaggggctcagaggtggaaaataaatatgaaaaagcatccttgtcttctagaatctcgtcggctgctgggaagaccaaggggccagccatcgcagggagcataagcactgagacaggcacacgtgcctgcccggctatcgtagccaggctggcagccttgcaactccctggggaagaacaatctaggaacattctggggtgtggagcaggaaaggaagtgtcacatgcaaaaggcaggatcagccaaagcagaggggctgaagaagcagtgattcccccacctaatgtcagaagtaaaatcagttcatggtgaaaatttggggaaacaaaatcatgcagcaaaattgcctattaaaccccacacggaggtaaaaatcggttcatattgtggttatgtatctattctcttatgatgtgtatttatgtgcttatgtaagacctaaaaacaataatttttaaataaaccaaatattattaataag

SEQ ID NO: 10501 - DNA, 585 bp, Homo sapiens
  SIMILAR (118)..(366): 951254mologous to Rattus sp. RB109,accession number D26154,Smith-Waterman Score=397.
ccatggtgggcattcgaaaggaatcggaaatacagtacctgaaacaggagagtagctccctcaaggatgagctgcagacggcactgcgggacaagaagtacgcaagtgacaagtacaaagactatctacactgagctcagcatcgcgaaggctaaggctgactgtgacatcagcaggttgaaggagcagctcaaggctgcaacggaagcactgggggagaagtcccctgacagtgccacggtgtccggatatgatataatgaaatctaaaagcaaccctgacttcttgaagaaagacagatcctgtgtcacccggcaactcagaaacatcaggtccaagtccgtaattgagcaggtctcgtgggatacctgaaatgcacccgcttcccggcccatgcaggagagtctgaaggaaggcctgacggtgcaagaacggttgaagctctttgaatccagggacttgaagaaagactaggtgtgtcccatccaagttgagcaacgcgccttccccagcttgcagcagcacaccccaagcgctgcttttcacctgtacctttgttttattattattattattattgctaaa

SEQ ID NO: 10502 - DNA, 3956 bp, Homo sapiens
  SIMILAR (1482)..(2630): 731254mologous to Mus musculus p116Rip,accession number U73200,Smith-Waterman Score=1316.
gcggccgcgctgagcccctatcccgccgggagcgccaggccggccaggcctgcgccgccgccgccgccgccgtcgccgccgcgccgaccatgtcggcagccaaggagaacccgtgcaggaaattccaggccaacatcttcaacaagagcaagtgtcagaactgcttcaagccccgcgagtcgcatctgctcaacgacgaggatcctgacgcaggcaaaacccatttatggcggttggctgctcctggctccagatgggaccgactttgacaacccagtgcaccggtctcggaaatggcagcgacggttcttcatcctttacgagcacggcctcttgcgctacgccctggatgagatgcccacgacccttcctcagggcaccatcaacatgaaccagtgcacagatgtggtggatggggagggccgcacgggccagaagttctacctgtgtattctgacgcctgagaaggagcatttcatccgggcggagaccaaggagatcgtcagtgggtggctggagatgctcatggtctatccccggagccaacaagcaggatcagaaggagaaacggaaagtggagcccccccacaccacaggagcctgggcctgccaaggtggctgttaccagcagcacagcagcagcagcagcagcagcagcagcatcccccagtgctgagaaagtccccaccaccaagtccacactctggcaggaagaaatgaggaccaaggaccagccagatggcagcagcctgagtccagctcagagtcccagccagagccagcctcctgctgccagctccctgcgggaacctgggctagagagcaaagaagcatctccctcagctccctggatgtggccagccagccacctgcctacgtggactctggcagcactagggggcgggggacagagagactggggagcgcctttgcctttaaagccagcaggcaatatgccaccctggccgacgtccctaaggccatcaggatcagccaccgagaagccttccaggccccagtgttgggcagaggagccctcatcctggaagtggcctgttggaggtcccaggtgattgaaaagtttgaggccttggacattgagaaggcagagcacatggagaccaatgcagtggggccctcaccatccagcgacacacgccagggccgcagcgagaagagggcgttccctaggaagcgggacttcaccaatgaagcccccccagctcctctcccagacgcctcggcttcccccctgtctccacaccgaagagccaagtcactggacaggaggtccacggagccctccgtgacgcccgacctgctgaatttcaagaaaggctggctgactaagcagtatgaggacggccagtggaagaaacactggtttgtcctcgccgatcaaagcctgagatactacagggattcagtggctgaggaggcagccgacttggatggagaaattgacttgtccgcatgttacggatgtcacagagtatccagttcagagaaactatggcttccagatacatacaaaggagggcgagtttaccctgtcggccatgacatctgggattcggcggaactggatccagaccatcatgaagcacgggcaacccgaccactgccccggatgtgaccagctcgttgccagaggaaaaaaacaagagcagctgctcttttgagacctgcccgaggcctactgagaagcaagaggcagagctgggggagccggaccctgagcagaagaggagccgcgcacgggagccggaggcgagagggccgctccaagacctttgactgggctgagttccgtcccatccagcaggccctggctcaggagcgggtgggcggcgtggggcctgctgacacccacgagcccctggcgccctgaggcggagcatggggagctggagcgggagcgtgcacgaaggcggtaggagcgccgcaagcgcttcgggatgctcgacgccacagacgggccaggcactgaggatgcagccctgcgcatggaggtggaccggagcccagggctgcctatgagcgacctcaaaacgcataacgtccacgtggagattgagcagcggtggcatcaggtggagaccacacctctccgggaagagaagcaggtgcccatcgcgcccgtccacctgtcttctgaagatgggggtgaccggctctccacacacgagctgacctctctgctcgagaaggagctggagcagagccagaaggaggcctcagaccttctggagcagaaccggctcctgcaggaccagctgagggtggccctgggccgggagcagagcgcccgtgagggctacgtgctgcaggccacgtgcgagcgagggtttgcagcaatggaagaaacgcaccagaagaagattgaagatctccagaggcagcaccagcgggagctagagaaacttcgagaagagaaagaccgcctcctagccgaggagacagcggccaccatctcagccatcgaagccatgaagaacgcccaccgggaggaaatggagcgggagctggagaagagccagcggtcccagatcagcagcgtcaactcggatgttgaggccctgcggggccagtacctggaagagctgcagtccgtgcatcgggaactggagggtcctctcggagcagtactcggcaaagtgcctggagaatgcccatctggcccaggcgctggaggccgagcggcaggccctgcggcagtgccagcgtgagaaccaggagctcaatgcccacaaccaggagctgaacaaccgcctggctgcagagatcacacggttgcggacgctgctgactggggacggcggtggggaagccactgggtcaccccttgcacaaggcaaggatgcccattaacttaaagggttaatggcgggtaaaggaatcggaaatacagtacctgaaacaggagattagctccctcaaggatgagctgcagacggcactgcggggacaagaagtacgcaagtgacaagtacaaagacatctacacagagctcagcatcgcgaaggctaaggctgcactgctgacatcagcaggttgaaggagcagctcaaggctgcaacggaagcactgggggagaagtcccctgacagtgccacggtgtccggatattgatataattgaaatctaaaagcaacccttgacttcttgaagaaagacagatcctgtgtcacccggcaactcagaaacatcaggtccaagagtctgaaggaaggcctgacggtgcaagaacggttgaagctctttgaatccagggacttgaagaaagactaggtgtgtcccatccaagttgagcacgcgcctttccccagcttgcagcagcacaccccaagcgctgcttttcacctgtacctttgttttatttattattattattattgctgttgttgtcatcgttaactgtgggcatggaatgcgtgaggctggcttctgggttgtccacaccactctctgctgtgttgacttcctgttgtcttcatcaaagcttttttccgtggtattctaaaattaggccagcagtgggggctgggagggcatctgtgttagtcctttcctggctgtgacccgccacactcactgtcagtattaaggcccagcagcctgttgataagctaccctgtctcaccatgtgctggtgtggaaacggggcccagccagcacgcctcaaggtagatggaatccccactggtcagagaaaaagctatgcggacactccagcttggcctgggtcacagcactgactcctcacccgctagtctggctgttaagaggagaaagtgcactgccttccagcccaggaggaggacagcattttgtatttgttccactgatgcagcttagacccacacccctgagagtcgtggcaaacctttcacaacctggaaaatgttgaaagcaaccattcctatttttgtttgttttttattaaatcttgcac

SEQ ID NO: 10503 - DNA, 4419 bp, Homo sapiens
  SIMILAR (2566)..(3603): 821254mologous to Rattus norvegicus P116RIP,accession number AF311311,Smith-Waterman Score=1345.
  misc_feature (1)...(4419): n = a,t,c or g
aagctccaggcaaaagaagagattttaaggaaatttgcaagtgaatctccaaaggacatggaagagccacggagtacccctgaagagacagaaagggatggcactttgctcccaggccaaccagtccaagccactagggcacctctaggcctcccacacacaaggctcgaggatgaggacgaggacctgggggctcctccgggggaagagtacggtgatggcagccccagtagggaagacagcatggtgcccccaaagtcagtggaagtgcttgacagggagggccatcagcagggcacagccaaactcgaccaaggggcacctggtgttaaaaggcaaagaatccggttctccacaatccagtgccaaagatacattcaccccgaagggtctgagaagacctggaccagcagcacatcttccgacaccagccaggaccggtcaccctcggaagaaagcatgtcctcagagcctgcacccagtgtactgcctgcaactggcgactctgacacgtacctctccatcatccactccctggagaccaagctctacgtcacagaggaaaagctcaaagacgtgaccgtgaggctggagagccagcagggtcagagccgtgaggcactgctcgcactgcaccaccagtgggcgggcaccgaggcccagctgcgtgagcagctccgcgccagcctgctccaggttggcgcactggcctcccagctggagcaggagaggcaggagagggccaggagggttgaagggcatgttggagagcttggggacttccaggtcaagaatagtcaggccctgatgtgcctggaaaattgccgagaacaactgagatctctgcctagggccagccaggaggatgagcaggacgcacgcgcagcctccctggccagtgtggagagtgcactcgtcagcgccatccaagccctgcagcactggccggccccagcccatggcggggcccgtgcacagctggagacaggtggcaccgaggagaatgggaagcctgcctccctgcagcagtgctcccagtctgagttgacagagcaggagcaggtgaggcttctttctgaccagattgctctggaggcctcgctgatcagccagatagcagattccctgaagaacacaacatcagatgtctcccgaatgctccatgagatttcttggtcaggacagccaccgatggaatctgctggggcccccgtagacacctgggccaggaaggtcctagtggatggtgagttctggagccaggttgagtctctgaggaagcacttggggacactgggaggagaggcagtcggtgcctcaggagacgggcagcaaagcatcccacagggcctggcccccatcctggccaatgccacatgggtcagggcagagctcagctttgccacacagtcagtgagggagtcgttccaccgcaggctacagagcatccaggagaccctgcggggcacccagacggccctgcggcagcacaaatgcctgctgagggaaatcctgggagcctaccaaaccccagactttgaaagagtgatgcagcaggtcttggaagccctcaggcttccagcgggccatgaagatggtgttcagctgtcctgggacctgagccccttaggagaagtcctgggccgagactcagacagctctcaggagcccttcgatgtgtctgaccagagccctggggcctttgttgctattcaggaggagcttgcccagcagctgaaggagaaggccagcctcttagaggagatagcggctgccttaccatctctgccacctgtggaatcgctgagagattgccagaagcttctccaggtgtcccagagtctctcgtataacacttgtttgggaggcctcggtcagtattcttcattgttggttcaggatgccattattcaggcccaggtttgctatgcgtcctgcagaatccggctagaatatgagaaggagctccagctctgcaaggagtcctggcaaacccgggagccctcctgctcagagcaggcacaggcagcccgggccctgagggaggagtatgaggagcttctccgcaagcagaagagcgagtacctggatgtgatcgccattgttgaaagggagaatgcagagctcaaggccaaggccgcccagctagaccatcagcagcagtgtctggaggatgcagagagcaagcacagcatgagcatgttcaccctgcggggcaggtatgaaaaggagattcggtgtgtggtggagcagctgaccaggaccgagagcacactgcaggctgagcgcagccgggtcctgagccagctggatgcctcggtcagagacaggcaggacatggagaggcatcatggtgagcagatacagaccctggaggacaggttccagctcaaggtccgggagctgcagacgatccacgaggaggagctgaggaccctgcaggagcactactcgcagagcctgaggtgccttcaggacaccctctgcctccaccaggggccacaccccaaggccctgccagcccctgcccccaactggcaggccacccagggagaggctgactccatgacggggctgagggagcgcatccaggagctggaggcccagatggatgtcatgcgggaggagctgggacacaaggacctggagggcgacgcggccacactgcgtgagaagtaccagagggacttggagagccttaaggccacgtgcgagcgagggtttgcagcaatggaagaaacgcaccagaagaagattgaagatctccagaggcagcaccagcgggagctagagaaacttcgagaagagaaagaccgcctcctagccgaggagacagcggccaccatctcagccatcgaagccatgaagaacgcccaccgggaggaaatggagcgggactgggagaagagccagcggtcccagatcagcagcgtcaactgggatgttgaggccctgcggcgccagtacctggagggagctgcagtcggtgcagcgtggaacttggaggtcctcttcgggagcagttattcgcagaaatgcctggagaatgcccatctggcccaggcgctggaggccgagcggcaggccctgcggcagtgccagcgtgagaaccaggagctcaatgcccacaaccaggagctgaacaaccgcctggctgcagagatcacacggttgcggacgctgctgactggggacggcggtggggaggccactgggtcaccccttgcacagggcaaggatgcctatgaactagaggtcttattgcgggtaaaggaatcggaaatacagtacctgaaacaggagattagctccctcaaggatgagctgcagacggcactgcgggacaagaagtacgcaagtgacaagtacaaagacatctacacagagctcagcatcgcgaaggctaaggctgactgtgacatcagcaggttgaaggagcagctcaaggctgcaacggaagcactgggggagaagtcccctgacagtgccacggtgtccggatatgatataatgaaatctaaaagcaaccctgacttcttgaagaaagacagatcctgtgtcacccggcaactcagaaacatcaggtccaagagtctgaaggaaggcctgacggtgcaagaacggttgaagctctttgaatccagggacttgaagaaagactaggtgtgtcccatccaagttgagcacgcgccttccccagcttgcagcagcacaccccaaggcgctgctttttcacctgtacctttgttttattattattatttattattggctgttgttgtcatcgttaactgtgggggcatgggaatgcggtggagggtgggcttctggggtttgtccacaccactctctggctgtgtttgacttcctgttgttctttcatcaaagctttttttcccgtggtattctaaaaattagggccagccagtggggggcttgggagggcaatctgtgttaaatcctttccctggctgtgacccggcccaacactcactgtcaagttatttaaggccccagcagccctgttgataaagctacccttgggttttttctcnccancacatgtgctggttgtggaaaacggggccccagcccagcacgccctcaaggtagatgggaatcccccactggttcagagaaaaaggctatgcggaacactcccagcttggccctgggtcacaagcactgactcctcacccgctaagtctgggctgttaagagggagaaagtgcactgccttccgagcccagggaggagggacagcattttgtatttgtttcacttgatgcagcttagaaccacaccccctgagagtcgttggcaaaccttttcacaacctggggaaatttttgaaagcaaccatttcctatttttgtttgttttttattaaatcttgcacaaaaaaaaaaaaaaaaaaag

SEQ ID NO: 10504 - DNA, 414 bp, Homo sapiens
  SIMILAR (85)..(156): 571254mologous to Plasmodium lophurae histidine-rich protein,accession number M15317,Smith-Waterman Score=113.
tcaatagcagccatcattgccaccaccaccaccaccaccataatcatcaccatcaacatcatcagcataatcattgtcaatcaacaccatcactataatcatcactatgattaccatcatgatgacaattactaccaccaccaccaccaccaccactgaggcaggtggttcatttgaggcgaggagttcaagaccagctggggcaatatagtgagacccatcttgggaagctgccgccccgcttcccttgctcacacagggctttgcagtagtggtggcagccgcggcagaaactggctctggggaagcaattgattcgtctactgccagcagcccggagttgcctacgcggatggctggtccgagttttctccgcttctggcagtggtatttctttttgtcttggtcctgcat

SEQ ID NO: 10505 - DNA, 446 bp, Homo sapiens
  SIMILAR (126)..(425): 381254mologous to Mus musculus proline-rich protein,accession number M12099,Smith-Waterman Score=124.
ggctcttgacacaggtctacaataacaagacagtgccccagtgggctcgagactcggatagctctgctgccgcccgccgtgttcccttctggctccaggacgctcccgccctcgacgcccggcagcagcagcccacagccccggcgcccttgacccgggggccgggcccgccgcgcacacacgccctggcctcgggaacgagggggccagcccgaggagaggagaaggtggctgacacaccccaccacggagagggtggctgtccaaactcggagaaggagccgttcctgcacccgacagcacccccgcccaggctcccaaccccaagcccagagagcgggcctgttcctcacactctgcagcaagctcctcctctgcgccgccatcttggaggaacccctgcgggagcgcccgcctccccgcagagcagcgagtggggcggctag

SEQ ID NO: 10506 - DNA, 420 bp, Homo sapiens
  SIMILAR (1)..(213): 941254mologous to Homo sapiens unnamed protein product,accession number AK000489,Smith-Waterman Score=332.
tcgctggccgtgttttgccacgagttgccacacaagctgggggatttccccgccttgctgcacgcggggctgtccgtgcgccaagcactgctgctgaacctggcctccgcgctcacggccttcgctggtctctacgtggcactcgcggttggagtcagcgaggagagcgaggcctggatcctggcagtggccaccggcctgttcctcttcctgctgcacaacgtgggcctgctgggcggctggaccgtcctgctgctgctgtccctgtacgaggatgacatcaccttctgataccctgccctagtcccccacctttgacttaagatcccacacctcacaaacctacagcccagaaaccagaagcccctatagaggccccagtcccaactccagtaaagacactcttgtccttggaaaaaa

SEQ ID NO: 10507 - DNA, 702 bp, Homo sapiens
  SIMILAR (59)..(565): 541254mologous to Homo sapiens unnamed protein product,accession number AK000334,Smith-Waterman Score=368.
cttactcaaggctcctcccaggtggcggaggagagcccggagctgctgaaccctgagcccagagagactgagcccagagttgaggctactgccctatatgatcactctgggcgacgccgtgcacaacttcgccgacggggctggccgtgggcgccgccttcgcgatcctcctggaagaccgggctggccacctcgctggccgtgttctgccacgagttgccacacgagcttgggggacttcgcccccttgctgcaccgggggctgttccttgcgccaaagaactgctgctgaacctggcctccgcgctaacggccttcgctggtctctacgtggcactcgcggttggagtcagcgaggagagcgaggcctggatctctggcagtggccacccgccttgttcctttacgtagcaatttgcgacatgctcccggcgatgttgaaagtacgggacccgcggccctggctccttttcctgctgcacaacgtgggcctgttgggaggctggaccgtccctgctgatgctgtccctgtacgaggatgacatcaccttctgataccctgccctagtcccccacctttgacttaagatccccacacctcacaaacctacagcccagaaaccagaagcccctattgaggccccagttccaaattcagttaaagccactcttgtccttggaaaaaaaacaaaaaaaaaaaaa

SEQ ID NO: 10508 - DNA, 693 bp, Homo sapiens
  SIMILAR (265)..(471): 311254mologous to Chlamydophila pneumoniae J138 histone-like developmental protein,accession number AP002548,Smith-Waterman Score=75.
atggtaggagtatttacaccatggaaatcagcaaagctacaaatgagggactttttccctcagagatttaccagggtagcaggacgagctgcagacaaaactcctgacaccgagttaaagaaggaagtggtttattcggccaggaacattgggaaagactcctgtctcaagagccgagctccccaattacataatgcttttgaagatgcatgtgagatggaggtggtgttctggggtctaattgctgaacgaatagtgactgaaaaagtctacgagagtgaatcctgcacagatagtgaagaggagcttaacatgaagacatcctcagtacacagaccccctgccatgactgtgaaaaaagaacccagagaggaacgaaagggccccaagaaagggactgctgctctgggcaaagccaacagacaggcagacgggtctcaccctgtggccaccaccaccacatgccagcaaagactactgccaggctactgccaatgttcacttaaggcgcaagggctcttcaatcagcttatggtgaatgctttcaggcctggaattcaccctttcaggcagttggccttccctctggcccagagcaggtccaaaaatgctgtccaagagccaaggcctggaatcatggaccccaagagcccgcttggtgttctaccccactgtggccaaggtggtatctaa

SEQ ID NO: 10509 - DNA, 465 bp, Homo sapiens
  SIMILAR (133)..(2): 1001254mologous to Homo sapiens Protein sequence encoded by clone p199-7 (PL mutet.rsT4),accession number P93369,Smith-Waterman Score=265.
cagcacgccatagtgactggcgatgctgtcggaatggacgatatcccgcaagaggcccggcagtaccggcataaccaagcctatgcctacagcatccagggtgacggtgccgaggatgacgatgagcgcattgttagatttcatacacgatttagtgctatacaatgtgcagctgccgtccctagagctcctgctgaatcctcttcgtcttccaaaaagtttgagcagtcacatcttcacatgtcaagtgagacacaagccaacaatgagctgaccaccaatggtcatggcccacctgcatccaagcaggtttcccagcagcccaaaggaattatgggaatgtttgcctccaaagctgctgctaaaacccaagaaaccaacaaggaaacgaaaacagaggctaaagaagtaacaaatattttttattgcacctacactgatgccataagaggaaaaacttgctaa

SEQ ID NO: 10510 - DNA, 627 bp, Homo sapiens
  SIMILAR (133)..(543): 941254mologous to Homo sapiens Human PRO1557 (UNQ765) amino acid sequence SEQ ID NO:142,accession number Y99382,Smith-Waterman Score=714.
atgctaggccttttacttgaatattttcatttaatctttggaacgaccaataaaagctcaagtggagaaaacaaaagaaaacgaaaacgcgtactaaaatctaaaacttacctggatggggaaggctgcatagcctgtgtgcatggcgggaagacgtactcccacggggaggtgtggcacccggccttccgtgccttcggccccttgccctgcatcctatgcacctgtgaggatggccgccaggactgccagcgtgtgacctgtcccaccgagtacccctgccgtcaccccgagaaagtggctgggaagtgctgcaagatttgcccagaggacaaagcagaccctggccacagtgagatcagttctaccaggtgtcccaaggcaccgggccgggtcctcgtccacacatcggtatccccaagcccagacaacctgcgtcgctttgccctggaacacgaggcctcggacttggtggagatctacctctggaagctggtaaaaggaggaatggacgaagaaagtggagctgttcagcctggagaagagaagactcagggggacaggactgctggcttcgtggctctgaagggctgtcccaggcagagggagcagctgtgttctgagtga

SEQ ID NO: 10511 - DNA, 933 bp, Homo sapiens
ctctgggctttcccagctccgaagtcaatactgagatcccagatgtgtccagagacatcctgaagaggctcggggataaatttaaagtcaatttggactcagaacaagcagtgaaagaagaaaaaatagtggagcagcctacagtgtctgtcacggaaccaaagctggcaactcctgcaggcctgaaaaaatccagcaaaaaagcagagcctgttaaggtgctgcagaaggaaaaaaaaagggggaagcgagtagcattatctgatgatgagacaaaggaaactgaaaacatgaggaaaaagaggagaagaatcaaacttcctgaatctgatagcagtgaagatgaagaaactactctaagaggaattgaaaatggtaagagaggcttccgaaaaaaggatattagctcaactatacaagtaaggtgtgccggcttcctcttcaccttccgccatgattcagtgaagtccaagctagctgtgactgccagcatccatgtgtacagcatccagaaagccatgctaaaggacagtgggcctctgttcaatactgactatgacatccttaaaagcaacttgcagaactgcagcaaatttagtgctatacaatgtgcagctgccgtccctagagctcctgctgaatcctcttcgtcttccaaaaagtttgagcagtcacatcttcacatgtcaagtgagacacaagccaacaatgagctgaccaccaatggtcatggcccacctgcatccaagcaggtttcccagcagcccaaaggaattatgggaatgtttgcctccaaagctgctgctaaaacccaagaaaccaacaaggaaacgaaaacagaggctaaagaagtaacaaatgcatctgcagcaggcaacaaggcaccagggaaagggaatatgatgagcaacttttttggaaaagctgctatga

SEQ ID NO: 10512 - DNA, 3837 bp, Homo sapiens
  SIMILAR (28)..(1695): 1001254mologous to Homo sapiens extraneuronal monoamine transporter,accession number AJ001417,Smith-Waterman Score=2906.
agacgtttcccgccggcgggagctgtggctgtgattgagagaggggttagaggcgggtcccagcgctgccgcaccatggcggaccagctttatctggaaaatatagacgagttcgtgcacggaccaaaacaagatcgtgacatacaaatggctgagctatacactaggggttcatgttaaccaggccaaacagatgctgtatgattatgttgaaaggaaacgaaaagaaaattcaggagcccaactgcatgttacctacttggtgtctggcagtctcattcagaatggacattcctgccacaaggttgcagtattgagagaagataaattggaagctgtgaagtccaagctagctgtgactgccagcatccatgtgtacagcatccaagaaagccatgctaaaggacagtgggcctctgttcaatactgactatgacatccttaaaagcaacttgcagaactgcagcaaatttagtgctatacaatgtgcaagctgccgtccccagagctcctgctgaatcctcttcgtcttccaaaaagtttgagcagtcacatcttcacatgtcaagtgagacacaagccaacaatgagctgaccaccaatggtcatggcccacctgcatccaagcaggtttcccagcagcccaaaggaattatgggaatgtttgcctccaaagctgctgctaaaacccaagaaaccaacaaggaaacgaaaacagaggctaaagaagtaacaaatgcatctgcagcaggcaacaaggcaccagggaaagggaatatgatgagcaacttttttggaaaagctgctatgaataaatttaaagtcaatttggactcagaacaagcagtgaaagaagaaaaaatagtggagcagcctacagtgtctgtcacggaaccaaagctggcaactcctgcaggcctgaaaaaatccagcaaaaaagcagagcctgttaaggtgctgcagaaggaaaaaaaaaagggggaagcgagtagcattatctgatgatgagacaaaggaaactgaaaacatgaggaaaaagaggagaactaatcaaacttcctgaatctgataacagtgaatatgaagtctttccagactcttctggggcttatgaagctgagtcaccatccccacctcctcctccgtctccacctcttgaaccagtgccaaagactgagcctgaacctccttctgtcaagagctcaagtggagaaaacaaaagaaaacgaaaacgcgtactaaaatctaaaacttacctggatggggaaggctgcatagtgactgaaaaagtctacgagagtgaatcctgcacagatagtgaagaggagcttaacatgaagacatcctcagtacacagaccccctgccatgactgtgaaaaaagaacccagagaggaacgaaagggccccaagaaagggactgctgctctgggcaaagccaacagacaggtgtccattactggcttcttccagaggaaataaactgccatctctggtagatcagagacttggagtggtcaagggagaagaccaagaaatgtactcctcacttactatgtaagttcatctagatctccacctcacctgtatcaaaagactgttctttcatcctgtgaggtttatactatttctggtttttaaccaaaaggaaatcatctggaagcaggaggcaaaaagctgttaccttctaatgacatttaaaaagcacagtctttgacctgtccagggagaaggatttactccaaaattatactgggaacagttttcaggaattctcactgaaggccatttagtggcttaacccactgtggctccacttcaccctatggcccggggtccggcatatgggcacagggaattattccttcttgtttcctctgttattggtaagggaattcatgtggggtgttttcttatcctttacattcttgctgggatacgttttacccctgtttgtcttcctgcagtacccacatttctgtcccctaacctcctgaggctgttctctgtaagtcttttaagttttggttggactaaaggctgaagtgaaaatctccctgtaatcctcttcctccattatgcagtacacggacacctggctacagaccaggacgtaggcttgtgtttctgttccttttcaccaaaagctctcctggggaccttcactttgcaaattaagtggttagggaaaaagccctcaggcaagaaacaccaaatagaaatttaatggatgtggtttcaacttccaccagaaaattacctcgagtcagcattgacgatattggaaggagctgccgtgctgctgatacggggtgtgctttatgctgctcctttgccggtttgttgatcccctccttccccactctcaatacctagagagtgaaacccagtacaatgagataaagactaaaaagagaaatcccttcctatatacagtgtgctacatttacaaaaaatttctccttaagaaaacagaatattcaaaaacaagcacttttccaggaagttagtgaggaagataaaggcacacatttatttataaatggatgttgctcctttgtatttttagcttccctatttgcttaaaagtacaggctccctaagagaggatggagagggagagactgaattgttagtaggtctaaacatcaaagaaaacatttttattagttacttatggaaaatcatctattacaatgataaccttcaagtgacttccattatggctggacaggcggtgagctcagtggattgcagtggtgtgctggtgattttgcacagtgagctctgcggaaggggtcaggctcaactgctgatgtgtctcacacgtagcagacaaggggtgtctgactggcttcttttgcctcaagatggtgtatgtcgtaagtgatgcaatcagctgtctgctttttaaggttgggattgtgctgactttgggattaacatggagcttctttagcaaccaagcatgaacttgattaagaccagaagtttgggaaatgagtcctggcattatgtctaggactaaagcagtggctttgtatagcaagctgagtaaaggttgacatattccaaaacccttcttttttaaaatgaaaaaggatggagaggaaggatggaaagccctggacttaaacctttagaaaaaacttcctggagagaaatccccttttaaacagttacttttgtcattgcctctggtcatttgtcctaaataggaatggaaaattaaaagaaaagcaacaatcccaatcttttttcctaaaaattatgcctggggtcctcgactaaaactgaatttgaattggaaaattctggtgttggttggagttcccatcttgcaagggataatacaaatccctatgatctctatgcccaatatgctgcctcaactctgagctgtctgcaaggcttagtaagtattgagtggtgtgttttttttttctttttatacaataccatgttaaccacatgagttaaataaatttgagaagttgttttaaaacagtgcttcaaactgagtatctgatgagtctcttatttgatggatggtaacagtgttgcaattatttaagctctgaatgggaagaaggctggttttcagttgatattgttaaaactgcatacccacagtctgagatgaacaagttatttgctgccttcatcgtttttttcagcactggggaaatgttagtttcagccaacctcattttttagttcatctagaagaaaatctagcacattgtattagtttggcttcatcacttgctagctgtatgactgtgggcaagtttcacagcctcaagttctttatcaaaataaaactaaaatgagttaa

SEQ ID NO: 10513 - DNA, 643 bp, Homo sapiens
  SIMILAR (364)..(173): 811254mologous to Bos taurus Rab5 GDP/GTP exchange factor, Rabex5,accession number AJ001119,Smith-Waterman Score=250.
atccctttccggaacctcaacacgtacgacatccactggctggagaagatcctgaaggcccgaaagcatgtccacatggtcatcattagccagctgcagtgagtgcccagcctcagattggtgaaatagtagccatcctctccagtcatcagtcggcttggattgcagaagcgcgtgatatactggatattagactgaaggcatgggggttgcccttcaaaacaatgtagatgagggtggggaggaagtcatctgctgacgccagctcgttctaggtgatcttgatggcatcgaagatgtgcttgctgcacttggtgatgcaggccagcttgtctcgaggcacacgcctggaatccatttcaatatccttctttgatccgaaccctgggagaacgtcctgaagatttcttcactgtggtaaccttgcgggtcttcttgttggttttctttccttcaaacttggagaatatgagggattgggccccttggctgctctgactgctggcaaaggcctcttcttcctcccgctggagtctcgcctgcgtctccaccggcgtccaaagccccgctcgcccgcgtcgttcgggtaggtctcgactccgcggtccgctaccgcctcatacccaccctcctcctcgacgaa

SEQ ID NO: 10514 - DNA, 2274 bp, Homo sapiens
  SIMILAR (2)..(502): 801254mologous to Homo sapiens putative transcription factor,accession number AF104923,Smith-Waterman Score=647.
gcccgagctgctcactgagggagtcaaagagcccatcatggatagtcaagagagggattccggggaccctctggtggacgagagcctgaagagacagggctttcaagaaaattatgacgcgaggctctcacggatcgacatcgccaacacactaagggagcaggtccaggaccttttcaataagaaatacggggaagccttgggcatcaagtacccggtccaggtcccctacaagcggatcaagagtaaccccggctccgtgatcatcgaggggctgcccccaggaatcccgttccgaaagccctgtaccttcggctcccagaacctggagaggattcttgctgtggctgacaagatcaagttcacagccaccatggccttttcaaggactcatcccaaagcctgatgaagatgacgccaacagactcggggagaaaggtgatcctgcgggagcagatgtaaggaactctttcaacgagaaattacggtgagggccctggggcctgaaccggccggtgctggtcccttataaacttaatccgggacagcccagacgccgtggaggtcccgggtctgccagatgacatcccaatccggaaccccaacacgtacgacatccaccggctggagaagatcctgaaggcccgagagcatgtccgcatggccatcattagccagctgcagctcctgcagcagcagcagcaccacatctcagagggcagaccctttgcagaaatctgcaatgatgccaaggtgccaggtgagtcggaggcaaggaagccacccttctgccctgtggggactagactgttccttttgaaaaaaagggagcctgaggtctccatgaacaaggacaggtatccccaagaggccccccgaaacctgcagagcctgcgcaccctgttggacatcctggacgacccgcggggcggctgcgtgcacctgcgccagagccagtcccgctggcggggggccgacacgcgggagctgccccgtgggatgctggagggcctgcgccagctgctgagcgccatcggctgcccccgggaccccacgtgcgccccggcccagcctggggaccagccgctgcagcgcctggcgtttacgctggccaacgagccacagacagtcctggagaagcccccgcccaggttcaggcggcgcggcgcggcccgcagcccggagcagctgtacaccccccgccgaggcggcgtcctgcccgcggagccagagcggacccagagcgcaagcgcggacgcaggttcattggcctgcagggccctggaggtggactcgggatgtccgactggccccccgtgcccgaagggaagtcggaggctcaccatcaccagcggcgtggactgcggcctgctgaagcagatgaaggagctggagcaggagaaggtggtgctgctgcagggtttggagatgatggcggggtcgcgactgcagcggctgcaaccagtgcaggaccgccagtgccgcctgggccagagcagagccagcgccgactttgggcctgcggggagcccccacccactggggcggctactgcctaaggtacaggaggtggcccggtgcgtgggggagttgctggctgcggccggtgccagccgggccctacctacgtcctcctccgggcccctctgccctgccctgacgttcacctccttcccggggtggcagcagcagactatccttatgctgaaggagcagaaccgacgcctcacccaggaggtgaccgagaagagtgggcgcgtcatgcagctggagcagaagtcggcgctcataatgaagcagctgtttgaggcccaggccctcagccagcaggacggggaggcctctggactccaccttcatctagcccgtttgggctgggcggaaccccagggcagttctgtcactcagcccttcgagggcggacgccctgtctcacccaacgtctctggctggagaccccctgcagcccaggcagtcccggagtgggcgccttcctgccccacttgccatccaggcttcccaggtccgcccccagctggtccccgcaccgagcccttgactcggttttggctcctggtgctgacatgggctggggctctcttgagtctgcatggtccgcaattgctactgccgctgtcaggaacagtgggggactccctgtttccagcggtgctgctctgggtcccatctccagggaaaggcaatgctcacgccgggctgcacttccgacaatggccagtagaggggggccgggcagctctgatgcggcgctga

SEQ ID NO: 10515 - DNA, 3137 bp, Homo sapiens
  SIMILAR (1062)..(1763): 671254mologous to Homo sapiens putative transcription factor,accession number AF156489,Smith-Waterman Score=757.
atgaggaggcgcttccttctgcctgtccatggcccacagcaaaggaatgtctgcttctgggggttggatgggggactgctggcagaactggaaaccttcttcagaaccaatcggaactcgaggcgcagcggctgggtattccaggagagcgcatgcgcagacgcatggccacagactgccggtcagtgtcagtaggcggcgggttagtgtccgcaggctccgactcggccgccgacaccaataagctacaaggacgagctttaccactgcctgtactactgctacctgcgcgacttcccagcctgcggcgtagggcgcagcaagggcctgacgctgagcgagtaggcgctgcgcaccaagcggctgtggcccggagggcactgtcgggcagaagctcctcagtggccaccacaagcccgctagctccggctacagcccttgccgcacactcgcgtcacctgagcctgtgtaggtcagacaagggcagcatgtctgaagactgcgggccaggaacctctggggagctgggtgggctgaggccgatcaaaattgaaccagaggttctggacatcattcaggtcactgtcccagatgccttgccaacctctgaggaaatgacagactcaatgcctgggcacctgccatcggaggattctggttatgggatggagacgctgacagataagaaatggacctgggatggtgccaaggccattggcatctcggaacccatcaaggtgctgtactccaagtttctgatgcacccggaggagctgtttgtggtggggctgcccgaaggcatctccctccgcagacccaactgcttcgggatcgccaagctctggaagattctggaggccagcaacagcatccagtttgtcatcaagagtggtgaggagatccgctgggacagggagctcttctgcagggcctgctctatgccaggagggagtctgctgcagatagcaaaaagctacacaacagggctggagagcaagagttgtgatcctgcagtagaatcaaaggcttcagcaggccaggatgaaatgcagccacatgcccggcccaagctgctcactgagggagtcaaagagcccatcgtggatagtcaagagagggattccagggaccctctggtgggcgagagcctgaagagacagggctttcaagaaaattacgacgcgaggctcttacggattgacattgccaacacgctaagggagcaggtccaggagcttttcaataagacatatggggaagccttgggcatcaagtacccggttcaggtcccctacaagtggatcaagagtaaccccggctccatgatcatcgaggagctgccaccaggaatcctgttccgaaagcccttcggctcccagaacctggagaggattcttgccatggccaacaagatcacgttcacagtcaccaggcctttccaaggactcatccgaaagcctgatgaagatgataccaacagacttggggaggtgatcctgcaggagcaggtgaaggaactcttcaacgagaaatacagtcagtgtctgtggtcagggtgtgagccaccacctgacatccctttccggaacctcaacacgtacgacatccactggctggagaagatcctgaaggcccgaaagcatgtccacatggtcatcattagccagctgcagctcctgcagcagcagcagcaccacatctcagagggcagaccctttgcagaaatctgcaatgatgccaaggtgccaggtgagtcggaggcaaggaagccacccttctgccctgtggggactagactgttccttttgaaaaaaagggagcctgaggtctccatgaacaaggacaggtatccccaagaggccccccgaaacctgcagagcctgcgcaccctgttggacatcctggacgacccgcggggcggctgcgtgcacctgcgccagagccagtcccgctggcggggggccgacacgcgggagctgccccgtgggatgctggagggcctgcgccagctgctgagcgccatcggctgcccccgggaccccacgtgcgccccggcccagcctggggaccagccgctgcagcgcctggcgtttacgctggccaacgagccacagacagtcctggagaagcccccgcccaggttcaggcggcgcggcgcggcccgcagcccggagcagctgtacaccccccgccgaggcggcgtcctgcccgcggagccagagcggacccagagcgcaagcgcggacgcaggttcattggcctgcagggccctggaggtggactcgggatgtccgactggccccccgtgcccgaagggaagtcggaggctcaccatcaccagcggcgtggactgcggcctgctgaagcagatgaaggagctggagcaggagaaggtggtgctgctgcagggtttggagatgatggcggggtcgcgactgcagcggctgcaaccagtgcaggagcgccagtgccgcctgggccagagcagagccagcgccgactttgggcctgcggggagcccccacccactggggcggctactgcctaagcagcagactatccttatgctgaaggagcagaaccgacgcctcacccaggaggtgaccgagaagagtgggcgcgtcatgcagctggagcagaagtcggcgctcataatgaagcagctgtttgaggcccaggccctcagccagcaggacggggaggcctctggactccaccttcatctagcccgtttgggctgggcggaaccccagggcagttctgtcactcagcccttcgagggcggacgccctgtctcacccaacgtctctggctggagaccccctgcagcccaggcagtcccggagtgggcgccttcctgccccacttgccatccaggcttcccaggtccgcccccagctggtccccgcaccgagcccttgactcggttttggctcctggtgctgacatgggctggggctctcttgagtctgcatggtccgcaattgctactgccgctgtcaggaacagtgggggactccctgtttccagcggtgctgctctgggtcccatctccagggaaaggcaatgctcacgccgggctgcacttccgacaatggccagtagaggggggccgggcagctctgatgcggcgctga

SEQ ID NO: 10516 - DNA, 352 bp, Homo sapiens
  SIMILAR (126)..(230): 971254mologous to Mus musculus OASIS protein,accession number AB017614,Smith-Waterman Score=168.
cctatcttgactgaaacgggcacctggcgtgtaggccaagtctggagccagccccgtaggagagctccaggaggcagagatgcctgcggggtcaaagcctgccagctgactgctgtgccctcctcaggaccctgctccagcagctgcagaaactccagactctggtcaccaacaagatctccagaccttacaagatggccgccacccagactgggacctgcctcatggtaggtgtggctccctccaccacagacccacaggaggagagtacttcccaaggctggctttttccagggttgggcagagctttaaagatcgggaacaacggggggcaacggccccaggggacccg

SEQ ID NO: 10517 - DNA, 856 bp, Homo sapiens
  SIMILAR (88)..(339): 741254mologous to Mus musculus OASIS protein,accession number AB017614,Smith-Waterman Score=366.
atggagaagcaagtcagttactatggtggagccaaacctgaaagttggagccatgaagaaaggagccaggtggaggtgggaacaggagaagtgccctcccgaagcctcctattctacgatgacggggcaggcttatgggaagatggccgcagcaccctgctgcccatggagcccccagatggctgggaaatcaaccccggggggccggcagagcagcggccccgggaccacctgcagcatgatcacctggacagcacccacgagaccaccaagtacctgagtgaggcctggcctaaagacggtggaaacggcaccagccccgacttctcccactccaaggagtggttccacgacagtggggagcgtccgaccccggcggtcccccggaagggcgctctcggagggagacaagcgctggagcggaatcaggcaggcgaggctgctgggccagggcgcggggagctctccgaggtgctgaagccgccccaaggccccgacggcgcccctcctcgcgggcggcccggccggcacgcagcggcgcggctggagctcccggccctcgaccccgacggatccctggcggcgcagcccgccccacccacccgcagcctcccgctggggaccctgctccagcagctgcagaaactccagactctggtcaccaacaagatctccagaccttacaagatggccgccacccagactgggacctgcctcatggtaggtgtggctccctccaccacagacccacaggaggagagttcttcccaaggctggctttttccagggttgggcagagctttaaggatcggtaacatcgtgggcagcgtcccagggtacaccatcctggcgcctg

SEQ ID NO: 10518 - DNA, 2152 bp, Homo sapiens
  SIMILAR (253)..(900): 791254mologous to Mus musculus OASIS protein,accession number AB017614,Smith-Waterman Score=839.
atggctgccgcggccgccatggccaccagccccgctgctgggcctcagccccttgtccaggctgcccatcccccaccagattctacttctatttataccccgggactcatttcagactttgacttctcagggagcatcctcggagcccccagccaattaatgcctccttctgtactactgctaccagccattgaacagctacactgttccagacattacctcttgttttattctcatggcaacccacataccaaagcctgtgtggccttcacagttggtgtggaaggtggccccacactcagaggctcaccttctctgagcttaagctgtgcccagaactccaagcccagccacttccccaactgtgcagggcaggcaaccagctttagggaggaggccccgggagagatgactcagctgccagtgatcaaagcagagcctctggaggtgaaccagttcctcaaagtgacaccggaggacctggtgcagatgcctccgacgccccccagcagccatggcagtgacagcgacggctcccagagtccccgctctctgcccccctccagccctgtcaggcccatggcgcgctcctccacggccatctccacctccccactcctcactgcccctcacaaattacaggggacatcagggccactgctcctgacagaggaggagaagcggaccctgattgctgagggctaccccatccccacaaaactccccctcaccaaagccgaggagaaggccttgaagagagtccggaggaaaatcaagaacaagatctcagcccaggagagccgtcgtaagaagaaggagtatgtggagtgtctagaaaagaaggtggagacatttacatctgagaacaatgaactgtggaagaaggtggagaccctggaagaatgccaacaggaccctgctccagcagctgcagaaactccagactctggtcaccaacaagatctccagaccttacaagatggccgccacccagactgggacctgcctcatggtggcagccttgtgctttgttctggtgctgggctccctcgtgccctgccttcccgagttctcctccggctcccagactgtgaaggaagaccccctggccgcagacggcgtctacacggccagccagatgccctcccgaagcctcctattctacgatgacggggcaggcttatgggaagatggccgcagcaccctgctgcccatggagcccccagatggctgggaaatcaaccccggggggccggcagagcagcggccccgggaccacctgcagcatgatcacctggacagcacccacgagaccaccaagtacctgagtgaggcctggcctaaagacgagtgtaatgggcaccaaaccatatttctcccactccaaggagtggttccacgacaaggatatgggccccaacaccaccatcaaactctcctaggccatgccaagacccaggacataggacggacccctggtacccagaagaggagttcttgctcactaacccggatccgcctcgtgcccctgcctcctggagcttcccattccaggagaaaaggctccacttcccagcccttccttgcccctgacatttggactcttcccttgggccgaccactctgttctcattctcccttcccaccaacatccatccgtccttctcagacaaaccactcactgggtacccccacctcctctctccatatgcccaacaaggaccactgcttccctgccccccaaacctgcacccaaacagacacatcaacgcaccccactcacagacaccctttaaccccacccccactgttacagaggaccaaggaacaggaaattgttttgtaaataatggaaccttattttttattattggccaatcccctagagatattgtattttacaaatctccctcttcccttcgccccctcccttgttttatattttatgaagttagtgcgggctttgctgctccctggcccaggaaagagggactacctgaccctcacctgggcacccccctgctgctgcccaagccgctgggcctttttaattgccaaactgctctcttcatcagctcagcacatgctttaagaaagcaaaaccaaaaaaaaaaaaaaaaaaagatgcagcatcaaaaaaaaaaaaaaaaaa

SEQ ID NO: 10519 - DNA, 1895 bp, Homo sapiens
  SIMILAR (855)..(1874): 371254mologous to Caenorhabditis elegans weak similarity to HSP90,accession number AF000198,Smith-Waterman Score=540.
atggatgggctccaggccagtgcagggccgttgaggcgcgggcggccgaagcgccggcgcaagccccagccacacagcgggtcggtcctggccctgcccttgaggtccaggaagatacgaaagcagctgcgaagtgttgtatcccgcatggcagcgctgaggacgcagacgctgcctagcgagaactcggaggaatcgagggtggagtcgacggccgacgacctgggggacgcgctacccgcccggcgagagccatacggccacctggggcccgcagagctgctggaggcctcgcccgccgcgcgctccctgcagaccccgtcggcgcgcctggtgcccgcttccgcgccgcccgcgcgcctggtggaggtgcccgccgcgccggtccgggtggtggagacctcggccctgctgtgcaccgcgcaacacttagcggccgtccagtcgtccggggcccctgcgacggcgtcggggccgcaggtggataacacgggtggggagccggcctgggactccccgctgcggcgcgtcttggccgagctgaaccgcatccccagcagccggcggcgagcggcccgcctctttgagtggctcatcgcgcccatgccgccagatcacttttaccggcgcctatgggagcgcgaggcggtgctggtgcggcggcaggaccacacctactaccagggacttttctctaccgctgacctggattcgatgctgcgcaacgaggaggtgcagttcggccagcatttggacgccgctcgctacatcaacggacgacgcgagaccctgaacccacccggccgcgcgctgcccgccgaccgcgtggtccctgtaccaggccggctgctcgcttgcgtctcctctgtccgcaggctttctctactactgtgtggcagtttttggctgtgcttcaagagcagtttggaagcatggcaggctccaacgtttacctcacgccccctaactcgcagggctttgccccccactacgacgacatcgaggccttcgtgctgcagctggaaggtaggaaactctggcgtgtataccgaccccgagtcccaaccgaggaactggctctgacatccagccccaacttcagtcaggacgacctcggtgagccggtgctgcagaccgtgctggaacctggagatttgctgtattttcctcggggcttcattcaccaagctgaatgccaggatggagtccactctctgcacctcaccttgtccacgtaccagcgcaatacctggggtgacttcttagaggccatactgcctctggcagtgcaggctgcaatggaagaaaatgtggagtttcggaggggtctgccccgagacttcatggattacatgggggcccagcattcagattctaaggatccgcgaagaaccgctttcatggagaaggtgcgggtcttggttgcccgcctgggacactttgctcctgttgatgctgtggccgaccagcgagccaaagacttcattcacgattctctgccccctgttttgactgatagggagagggcactaagtgtttacgggcttccaattcgctgggaggctggagaacctgtaaacgtgggggcccagttgacaacagaaacagaagtccatatgcttcaggatgggatagctcggctggtgggtgaggggggccatttgtttctctattacacagtggaaaactcccgtgtgtatcatctggaagaacccaagtgcttggaaatatacccccagcaagctgatgccatggaactgttgcttggttcttatccagagtttgtgagagtgggggacctgccctgtgacagtgtggaggaccagctgtccttggcaaccacgttgtatgataaggggctgctgctcactaagatgcctctagccctaaattag

SEQ ID NO: 10520 - DNA, 413 bp, Homo sapiens
  SIMILAR (5)..(310): 871254mologous to Drosophila melanogaster clathrin-associated protein,accession number AJ006219,Smith-Waterman Score=476.
ggtcctctcgggcatgcccgagctgcgcctgggcctcaacgacaaggtcctctttgacaacacgggccgcggcaaaagcaaatccgtggagctggaggatgtgaagttccaccagtgtgtgcggctatcacgcttcgagaatgaccgcaccatctccttcatcccacccgacggcgagttcgagctcatgtcctaccgtctcaacacccacgtcaagcctttgatatggatcgagtcggtgatcgagaagcactcccacagccgcatcgagtacatgatcaagggcggcaaggagtacctgatgcgggcccacttcggcctgcctagtgtggaggccgaagacaaggagggcaagcccccgatcagtgtcaagttcgagatcccttacttcactacctccggcatccaggtgg

SEQ ID NO: 10521 - DNA, 972 bp, Homo sapiens
  SIMILAR (427)..(654): 761254mologous to Homo sapiens Human normal ovarian tissue derived protein 6,accession number Y59729,Smith-Waterman Score=328.
atggggcagctgggcaccccagagcaggggctgtccttaccagcctggggcagcacagggccgagctttggctccccagcacaggggctcatgctcccctccctggactgggggcggcaaggagtcctgatgcgggcccacttcggcctgcctagtgtggaggccgaagacaaggagggcaagcccccgatcagtgtcaagttcgagatcccttacttcactacctccggcatccaggtacgtctggcgcctggctccctctatggtcggaaaaggagcagtcttggcaaaagtcatccgagcctgctgcaggtggacgggcagtactcccagcagcagggtgccgggcaccctaggggcacaaagcgggggtcacaaacccctggggcgcgacaacgtgttgaacccggcaagtgctggcccgtggtctgtgtacctcatgtcccatgtccacccacgtctacggcactcaggaagcacttgcgcccgcagcgggccatttacacgtcgaggctggcacctggcgcgctcgggggccactgtagcgtctgcctgctccctggactcgcaggcctcgcctgtggcgccttcccagggccagcctgggtcacgagatgctgtcactcagccagatcagtattgacccaccagggagcacctcccggaccggacataacggtccccgcgcggctccccgaaccggaagtggaggtgagctgtcgcgggcggcgcccggccttgctcaacgcccagcagtccccaccgtcgctgccgccgccaccgccctcggccgctgccgaggcctcctgcagccatcatgtccgccagcgccgtctacgtgctggacctgaagggcaaggcttttatctcttccacgatagaaataaacacagcattttaaaactggcaaagccccgagagccgttctgtgtggtaacagatagcaggattcagtttggcccacctcattga

SEQ ID NO: 10522 - DNA, 2176 bp, Homo sapiens
  SIMILAR (342)..(1079): 621254mologous to Mus musculus clathrin-associated protein,accession number M62419,Smith-Waterman Score=640.
  misc_feature (1)...(2176): n = a,t,c or g
atgaagcagccccaggtgaaccagaggctgccttttctggagctgctgaaatccaagggctattttcaagtcggtcagaacctgccctgtaccccccacccaaccctgccgaaatgtcaaggccagaagctgtggcgttggtgcgggtaccacctccttcactctgagcgtgtggccccacaggtacatcactcaggaaggccacaagctggaaacaggggccccgcgggcaccaggcaccgtcaccaacgcggtgtgctggcggtccgaaggcatcaagtatcggaagaatgaggtgttcttggacgtcatcgagtctgtcaacctcttggtcagcgccaagcggcaatgtcctgcgcagcgagatcgtgggctccatcaagatgcgagtcttcctctcgggcatgcccgagctgcgcctgggcctcaacggacaaggtcctctttgacaacacgggccgcggcaaaagacaaatccgtggagcctggaggatgtgaagttccaccagtgtgtgcggctatcacgcttcgagaatgaccgacaccatctccttcatcccacccgacggccgagttcgaggctcatgtcctaccgtctcaacacccacgtcaaggcctttgatatggatcgagtcggtgatcgagaagcactcccacagccgcatcgagtacatgatcaaggccaaaagccagttcaagcgggcggtcaacagccaacaacgttggagatccacatttcccgttgcccaatgattgccgacttaacccaagtttcaaggacgacggttggggagcgtttaagttgggttcccgagaacagcgagatcgtgtggtccatcaagtccttcccgggcggcaaggagtacctgatgcgggcccacttcggcctgcctagtgtgggaggccgaagacaaggagggcaagccccccgattcagtgttcaagtttcgagatcccttactttcattacctccggcatccaggtgcgctacctgaagatcattgagaagagtgggtaccaggccctgccctgggtgcgttatatcacgcagaatggagattaccagctccggacccagtgaggggctgtcgcagccaacaccccggcctcggggcctcctgggtggcagcaccagggngacacacctgccaaacccaccagattgagggggccctccctgggtctctggccaccctcccagcctctgcccagggacccctgccttccccaggccatctcgctctgccgtcgacactcgtctcagaaagcccctttcccaagaagaggctggtcttcaagaagtcttcgtttcttttgcccctgaagtcatgtttcaggggaaggatgtgaaatttttccgtgtagaggttacagccttttatggtgtttgagctcccagggtaccaaaaagcttgggccaacgctttgccagccagcccagctgcaggtggcatctgccacgaagggaaggcgccagcttcgccaggccagcaggggcgtcgttttgttgccaattttgttgaacgttatgggtttaatgggtgttcctggaaacttgtctttgtgcattcgttgctgtttgtgttacccttcactgtcccccatgtcccaacccaacgtcttacggcactcaggaaagcaacttggttgaggacgaacccctcacccttttttttcttcctttccccggcaaggcgcccgcaagcgggccaatttacacgtcgaaggctggcacctggcgcgcttcgggggccactgtagcgtcatgccatgctcccatggacttcgcaggcctcgcctgtggcgccttccccagggccagccctgggtcacgagatgctgtcactcagccagatcagtattgaccccacccaggggaaggtgggggtttggtgagagacgccagcctcagactttttcccactgagggtccaaagaacggggccaacgtgtcacccacgtctgcgcttggtcacccgtccctccccaccctgtgtgtgtttatgtcatagttacattaaattccgattcattgaatactccacagccttcctctgatgcagcgtggtcccaactcctcctgcgtgaccacagggcttgcctggttttgtcgccgaccttccctgtggccccacgaggtgtcaccagctccctctgcttccccagctgagacac

SEQ ID NO: 10523 - DNA, 454 bp, Homo sapiens
  SIMILAR (451)..(260): 371254mologous to Lycopersicon esculentum extensin (class II),accession number X55686,Smith-Waterman Score=88.
  misc_feature (1)...(454): n = a,t,c or g
tttttcctttgtgcaacactttattgggaaagatttacacacggtgacctgtcataggccaagcgatgagaagagggcgccaggagtgctggggtcccgaggtggctcagatggaagccatgggacggccgtcccanggcccgcgcacccgcacctcagtttcccctttgtgaaatgggaagcttatgcttccttccaagtctgcaatattggtgcgatgagctaaaagtggagcnaaagacacaaggaagaggcttcccactcccaggctcaccagcttcagcgtcacacgcaagctggacggcattggtgaagggcgttgggagtgggcaggcccaggaggctgagggctcggaagaacaggagataggagaaagtccaggccagagccagggcgtggcaggagcagggctgggcctgaatgagggccaggtcccgaggatggtnaccagag

SEQ ID NO: 10524 - DNA, 239 bp, Homo sapiens
  SIMILAR (151)..(237): 751254mologous to Homo sapiens BB1=malignant cell expression- enhanced gene/tumor progression-enhanced gene,accession number S82470,Smith-Waterman Score=116.
ctcctgccacgccctggctctggcctggactttctcctatctcctgttcttccgagccctcagcctcctgggcctgcccactcccacgcccttcaccaatgccgtccagctgctgctgacgctgaaggaaggaaatggcctcaggcttcagcaaggggcccaccctgggctgctgcccgacgtgccctccctgatggagacactcagctacagctactgctacgtgggaatcatgacag

SEQ ID NO: 10525 - DNA, 3219 bp, Homo sapiens
atgcacacgttctctcagttgcagaagctgaagggcctgcagccgcccgtggtagtgctccggaacaagatcaagccctgcttaaccattgactcgtcgccgctgtcagcagacctgaagaaggttactaggtacattcatcataaaattgttggaaaattgcatgatgcaaaagtgatcctggctttgggaaatacagtttggattgatccaatggtgcacattacaaacctttccagtttaaaaacctctgtcattgattataatgttcgagctgaaattttgtccatgggcatgggcattgataatccagaacacatagaacaactgaaaaaattacgcgaagatgctaagataccagcttgtgaagaaagcctaagccagaccccggagcttaacatacccgtggtcacgaacacagagcatacagcactgcgaggtttcacagagagcctgctagaagagaccccatatcagacagctcctggagaacaggggatcctgacaggcttgaattgtctcttcaaagatgtacaaaaactgagtcacattgtcacccacgaggaagggagctggctggctggggagcaggggacgcctccagcagaagatgctgcttgcctgcagagcccccagcctgaggacacgggtgcagaaggaggggctgagtccaagacgagctcagaaaaccagaagcctgacattgggcctgcaaagcagcccagcggggccctgcagttattgacaacaccaccaagcattgatgaggatgcggagcaaccggaacttgcgcggaggttggtgatgtttgctatattagataactttaaaaaaaatattgaagttgaagaaagggaatctgcaccacatcagattgttgcagttggagttcattggaacaaacatatagaacatctcatcaaagagttcatgaatgatccctacattgtgatcacagccatggaagaggctgctctctatggcaatgtccaacaggtagtagaaagcagttcaatattttgcttgaagatgcataaagaaatgatttttaacttacaaaatgttttagaacagtggaagaagaagttaagttctggctctcaaattatattagccctcacagacgactgcgtcccactcttggccatcaccgatgccacgtgtgtgattcacttcagtttccctgcctcaccaaaagtttttggtggacgcctgtattgcatgtctgatcattttcacgctgaacagggttctcctgcagaacagggagataagaaagccaaatctgtcttgctgctgacggagaaagatgcgagccatgcggtgggcgtcctgcgctacttggagcgagcggacgccaaggtccccgcagagctgtacgagttcaccgcaggagttctggaagccaaagaagataagaaagccggaaggcctctttgtccatatctgaaggcttttggtttttgcaatgtgtgtatccattctcctattgatgggcctgtgggtggtttccactatcaggctatgatgtttgaagctgttaggaacactcttggccatgtcttttgtggaaatgtgtacgcatttctcttgggtagacgctccagagggcaagtggcaggtcatggggtaggcatgcgtttaactcttccaaagcggctggccattttccggtctgacttctgcaatgattgtgagtttcctgaggcttccgcagaagccgagcagatgccagcatcatgcttccgctccagcctgcagaaccatgagccagttaagcctctcttctttataaattacccagcctcagaaaacaaagaggcttttgaagagcactggcgtcccattcccagggcccaggacagtgtgaggggttcctgccgccccgcacaggaccttctgaacaacgtgaacaatgactacaacgggttgaaactcaccatgtatagaaaaacccacaggctggagttgcctttggaggtgcccgtagtcattcccgtcttgatgacactcatctctgtgtttttggttctggctccaatcatcagcaagcccacctgggagtacctctactgtgtgctgtttatattaagcggccttttattttacttcctgtttgtccactacaagtttggatgggctcagaaaatctcaacaataaccaacactgtgcttttgcagccagctcccctagtccaggccgagcttgcacttgcgtcttgtctgctgctgctgaaccaagatttagctgtgcgccctccttgcagtctcctggaaccagcaggaggaaacatgggggatactggcctgagaaagcggagagaggatgagaagtcgatccagagccaagagcctaagaccaccagtctccaaaaggagggcagaggtgtgggcagggcctccgagagctcccatgcctggcagcagaggggatggaggagggacggcaccaaggctttagggcttgaccggagggctggcaatggcctgaatggcttggcctgggacccccaggagagtgattacaggttcatcgtttctaatcacacattggcagtcatctttccttatgttgccccgcagctccagatcagccagctgggcctcatcagtggcatctccatcatcgtgggcaccatcattggctctgggatcttcgtttcccccaagtctgtgctcagcaacacggaagctgtggggccctgcctcatcatatgggcggcttgcggggtcctcgcgacgctgggtgccctgtgctttgcggagcttggcacaatgatcaccaagtcagggggagagtatccctacctgatggaggcctacgggcccatccccgcctacctcttctcctgggccagcctgatcgtcattaagcccacgtccttcgccatcatctgcctcagcttctccgagtatgtgtgtgcgcccttctatgtgggctgcaagcctcctcaaatcgttgtgaaatgcctggccgccgccgccatcttgaactcactgagcgtgcggctgggaagctacgtccagaacatcttcaccgcggccaagctggtgatcgtggccatcatcatcatcagcgggctggtgctcctggcccaaggtgacccacgggagggaaacacaaagaattttgataattctttcgagggcgcccagctgtctgtgggagccatcagcctggcgttttacaatggactctgggcctatgatggatggtga

SEQ ID NO: 10526 - DNA, 1502 bp, Homo sapiens
  SIMILAR (53)..(133): 1001254mologous to Homo sapiens Similar to ubiquinol- cytochrome c reductase hinge protein,accession number BC001426,Smith-Waterman Score=136.
atgacgcccgccctcacagccctgctctgccttgggctgagtctgggccccaggacccgcgtgcaggcagggcccttccccaaacccaccctctgggctgagccaggctctgtgatcagctgggggagccccgtgaccatctggtgtcaggggagcctggaggcccaggagtaccgactggataaagagggaagcccagagcccttggacagaaataacccactggaacccaagaacaaggccagattctccatcccatccatgacagagcaccatgcggggagataccgctgccactattacagctctgcaggctggtcagagcccagcgaccccctggagctggtgatgacaggattctacaacaaacccaccctctcagccctgcccagccctgtggtggcctcaggggggaatatgaccctccgatgtggctcacagaagggatatcaccattttgttctgatgaaggaaggagaacaccagctcccccggaccctggactcacagcagctccacagtggggggttccaggccctgttccctgtgggccccgtgaaccccagccacaggtggaggttcacatgctattactattatatgaacaccccccgggtgtggtcccaccccagtgaccccctggagattctgccctcaggcgtgtctaggaagccctccctcctgaccctgcagggccctgtcctggcccctgggcagagcctgaccctccagtgtggctctgatgtcggctacgacagatttgttctgtataaggagggggaacgtgacttcctccagcgccctggccagcagccccaggctgggctctcccaggccaacttcaccctgggccctgtgagcccctccaatgggggccagtacaggtgctatggtgcacacaacctctcctccgagtggtcggcccccagcgaccccctgaacatcctgatggcaggacagatctatgacaccgtctccctgtcagcacagccgggccccacagtggcctcaggagagaacgtgaccctgctgtgtcagtcatggtggcagtttgacactttccttctgaccaaagaaggggcagcccatcccccactgcgtctgagatcaatgtacggagctcataagtaccaggctgaattccccatgagtcctgtgacctcagcccacgcggggacctacaggtgctacggctcacgcagctccaacccctacctgctgtctcaccccagtgagcccctggagctcgtggtctcaggacactctggaggctccagcctcccacccacagggccgccctccacacctggtctgggaagatacctggaggttttgattggggtctcggtggccttcgtcctgctgctcttcctcctcctcttcctcctcctccgacgtcagcgtcacagcaaacacaggacatctgaccagagaaagactgatttccagcgtcctgcaggggctgcggagacagagcccaaggacaggggcctgctgaggag

SEQ ID NO: 10527 - DNA, 2091 bp, Homo sapiens
  SIMILAR (1)..(2082): 1001254mologous to Homo sapiens similar to NFE2-related transcription factors; similar to I48694 (PID:g2137676),accession number AC004520,Smith-Waterman Score=3651.
gctgggactgctcggccgcctcctgcccggcgagcagctcagaccatgtcgcctgaagaatggacgtatctagtggttcttcttatctccatccccatcggcttcctctttaagaaagccggtcctgggctgaagagatggggagcagccgctgtgggcctggggctcaccctgttcacctgtggcccccacactctgcattctctgggcaccatcctcgggacctgggccctccattcaggcccagccctgctcctgccacgccctggctctggcctggactttctcctatctcctgttcttccgagccctcagcctcctgggcctgcccactcccacgcccttcaccaaagccggacagatggctgctgacgctgaagctggtgagcctggccagtgaagtccaggacctgcatctggcccagaggaaggaaatggcctcaggcttcagcaaggggcccaccctggggctgctgcccgacgtgccctccctgatggagacactcagctacagctactgctacgtgggaatcatgacaggcccgttcttccgctaccgcacctacctggactggctggagcagcccttccccggggcagtgcccagcctgcggcccctgctgcgccgcgcctggccggccccgctcttcggcctgctgttcctgctctcctctcacctcttcccgctggaggccgtgcgcgaggacgccttctacgcccgcccgctgcccgcccgcctcttctacatgatccccgtcttcttcgccttccgcatgcgcttctacgtggcctggattgccgccgagtgcggctgcattgccgccggctttggggcctaccccgtggccgccaaagcccgggcccggaggcggccccaccctccaatgcccaccccccagcagtccggagaaggcggcttccttggagtatgactatgagaccatccgcaacatcgactgctacagcacagatttctgcgtgcgggtgcgcgatggcatgcggtactggaacatgacggtgcagtggtggctggcgcagtatatctacaagagcgcacctgcccgttcctatgtcctgcggacggcctggaccatgctgctgagcgcctactggcacggcctccacccgggctactacctgagcttcctgaccatcccgctgtgcctggctgccgagggccggctggagtcagccctgcgggggcggctgagcccagggggccagaaggcctgggactgggtgcactggttcctgaagatgcgcgcctatgactacatgtgcatgggcttcgtgctgctctccttggccgacacccttcggtactgggcctccatctacttctgtatccacttcctggccctggcagccctggggctggggctggctttaggtgggggcagccccagccggcggaaggcagcatcccagcccaccagccttgccccggagaagctccgggaggagtaagctgtcacgaccctccctctgccagctggtcccgggaattctgtgaaccaggctgctgtctcctccccagaaagagtccttaccttggagagggtcctggagagaatttcctcttccccagctaaataccctgcctgcaactgaagcagacccgggggtgtcctccctgccctctgcccagaggcacctccactcctacaaaatcaaagtattgtccagacaagagtcactggcccctgctccagcttctgggtatccagagagcactgcacttccccaaaacggaaggggcccctgggcagtgggttttgggcaaattccctttctttgcatccacaatgtgggtcggagcttgggggcaggtcctgggagtgggaagcctcttccttgtgtctttcgctccacttttagctcatcgcaccaatattgcagacttggaaggaagcataacttccatttcacaaaggggaaactgaggtgcgggtgcgggcctggggacggccgtcccatggcttccatctgagccacctcgggaccccagcactcctggcgccctcttcttcatcgcttggcctatgacaggtcaccgtgtgtaaatctttcccaataaagtgttgcacaaaa

SEQ ID NO: 10528 - DNA, 823 bp, Homo sapiens
  SIMILAR (1)..(750): 1001254mologous to Homo sapiens similar to NFE2-related transcription factors; similar to I48694 (PID:g2137676),accession number AC004520,Smith-Waterman Score=1303.
aagcttactctctcagatgacttcgtctcccaccgactgcctgtttaagcacattgcatcaggtaaccagaaagaagtggagagacttctgagccaagaggaccatgataaagataccgtccaaaagatgtgtcaccctctctgcttctgcgatgactgtgagaaactcgtctctgggaggttgaatgatccctcagttgtcactccattctccagagacgacagggggcacacccctctccatgtggctgctgtctgtgggcaggcatccctcatcgacctcctggtttccaagggcgccatggtaaatgccacagactaccatggagccactccgctccacctggcctgtcagaagggctaccagagcgtgacgctgctgctgctgcactacaaggccagcgcggaagtgcaggacaacaatgggaatacgccactccacctggcctgcacctacggccacgaggacgacccactctggctccaggtcgcctggaagcacagcagcctcccccagggggctctgccctcgcccagcactcacggactgcccctgcgggcacctcagcggcctgcctgtggccagtgtctgagcagggagctgcccccatgtgccaggtgaccagaccaccaggaagtcaggcaccgtgttcccaacccagtgcacacgcccataaacatctgacaacgggctcctcgagcccagcggaggcatcagctctgcccagggcttaaacaggcagtcggtgggagacgaagtcatctgagagagtaagctcattctctgcttaaggaacagcctgtctccaaatccctcagactc

SEQ ID NO: 10529 - DNA, 2452 bp, Homo sapiens
  SIMILAR (1729)..(1280): 331254mologous to Equine herpesvirus 1 transcriptional activator,accession number M86664,Smith-Waterman Score=122.
atgtggaggaagccagtctttatggagaaacacaaagatgactcagggagcatccgggaagcgggagaaaaaggagaagttaccaggcgtttgtgctactattacatccatgagccaatccataaactgacacttcaagttttgcaaaaggaaattgtgaacacccaaaatgttcaaacaacctcggtgtctgggctgaagcagacactgctggcggagtccgaggctctgaccagctacagccaccgggtgttctcggcctgggacttcggtctctgcggggacgtccacgtgcggctgcgccagcgcatcatcttgtacgaattaaaggtggagctggaggagacagtggtgcggcgccaggctgcggtgcggacgctgggccagcaagccagggtttggttggtgcgggtgctgctcaacctgctggtggtcgcgctcctgggggcagccttctatggcgtctactgggctacggggtgcaccgtggagctgcaggagatgccccttgtccaggagttgccactgctgaagcttggggtgaattaccttccgtccatcttcatcgctggggtcaattttgtgctgccgcccgtgttcaagctcattgctccactggagggctacactcggagtcgccagatcgtttttatcctgctcaggaccgtgtttcttcgcctcgcctccctggtggtcctgctcttctctctctggaatcagatcacttgtgggggcgactccgaggctgaggactgcaaaacctgtggctacaattacaaacaacttccgtgctgggagactgtcctgggccaggaaatgtacaaacttctgctctttgatctgctgactgtcttggcagtcgcgctgctcatccagtttcctagaaagctcctctgtggcctctgtcctggggcgctgggtcgtctggcggggacccaagagttccaggtgcccgacgaggtgctggggctcatctacgcgcagacggtggtctgggtggggagtttttttctgccctttactgcccctgcttaacacggtcaagttcctgctgcttttctacctgaagaagcttaccctcttctccaccttgctccccggcttgcccgcaccttccgggcctccgcggcgaatttctttttccccttggtccttctcctgggtctggccatctccagacggtccctgttttaacagcatcttcctgatcccgccttctaagctgtgtggtccattccgggggcagtcgtccatctgggcccagatccctgagtctatttccagcctccctgagaccacccagaatttcctcttcttcctggggacccaggcttttgctgtgccccttctgctgatctccagcatcctgatggcgtacactgtggctctggctaactcctacggacgcctcatctctgagctcaaacgtcagagagagacgatctgtgacaagaggcggttgctaggggataccacgagccgaacgcctagcattcgctgtgataaagggcgtctcagccaatcacctgtcgctacaggccagggggccgtaccaactaattcggaaccaatccgcggtcgaagtagggacaagaaaaaggggggcatcctctcgccaatcggaagtgcaaagaggcgggcgtgccagtccctggacagctacgacgccatgaatatcttgcccaagaagagctggcacgtccggaacaaggacaatgtcgcccgcgtgcgacgtgacgaggcccaggcccgggaggaggagaaggagcgtgagatgggtgctgctggctcagcaagagaattcctacggaagaaagccagacatcagaactcactgcctgagcttgaagcagcagaggcgggagccccaggttctggccctgtggacctgtttcgggagctgctggaggaagggaaaggagtgatcagaggcaataaagagtacgaggaagaaaagcgacaggagaaagagaggcaagagaaagctctgggcatcctgacatacctgggccagagtgcagcggaggcacagactcaacccccttggtaccagctacccccagggcgagggggccccccgcccggcccagccccagatgagaagatcaagagccgtctggaccctctgcgggagatgcagaagcatctggggaagaagagacagcacggcggtgatgaaggcagtcgcagcagaaaggaaaaggaggggtctgagaagcagcgacccaaggagcctccatccctggaccagcttcgagctgaacgtctgcggagggaagcagctgagaggtctcgggcagaggccctgctggcccgggtccaaggccgggcactacaggagggtcagccggaagaagacgagacggatgaccggcggcggcggtacaactcccaattcaacccccagctggcccggcgcccccgccagcaggaccctcaccttactcactga

SEQ ID NO: 10530 - DNA, 1140 bp, Homo sapiens
  SIMILAR (16)..(186): 981254mologous to Homo sapiens Human secreted protein clone rb649_3 protein sequence SEQ ID NO:18,accession number Y94906,Smith -Waterman Score=292.
atggcaaacctgtggctctgtcctggggcgctgggtcgtctggcggggacccaggagttccaggtgcccgacgaggtgctggggctcatctacgcgcagacggtggtctgggtggggagttttttctgccctttactgcccctgcttaacacggtcaagttcctgctgcttttctacctgaagaaggagtctgagggatttggagacaggctgttccttaagcagagaatgagcttactctctcagatgacttcgtctcccaccgactgcctgtttaagctggtgagcctggccagtgaagtccaggacctgcatctggcccagaggaaggaaatggcctcaggcttcagcaaggggcccaccctggggctgctgcccgacgtgccctccctgatggagacactcagctacagctactgctacgtgggaatcatgacagcgtatcgggagcacagagaagagatacaggagaggttttcttcctggacgtcagcagctgggctggacctggaggaggacatgggagtatgtcctgtgtttgctgtgacgctgacgtcggaggaggaggaagaggaggaggaagagcagcaggacgaaggccaccgagaccccaatcaaaacctccaggtgttcacagggcccactcccccttggacaggccagctggagctgggctcctgccacgccctggctctggcctggactttctcctatctcctgttcttccgagccctcagcctcctgggcctgcccactcccacgcccttcaccaatgccgtccagctgctgctgacgctgaagggttctcctgcagaacagggagataagaaagccaaatctgtcttgctgctgacggagaaagatgcgagccatgcggtgggcgtcctgcgctacttggagcgagcggacgccaaggtccccgcagagctgtacgagttcaccgcaggagttctggaagccaaagaagataagaaagccggaaggcctctttgtccatatctgaaggcttttggtttttgcaaggcaggcatcctcatcgacctcctggtttccaagggcgccatggtaaatgaccacagaactaccatggagccactccgctccacactggcctgtcagacagggctaccagacgcgtga

SEQ ID NO: 10531 - DNA, 1620 bp, Homo sapiens
  SIMILAR (454)..(1212): 1001254mologous to Homo sapiens dJ425C14.2 (Placental protein DIFF33 LIKE),accession number Z99129,Smith-Waterman Score=1317.
atgaagcagagttcgaacgtgccggctttcctcagcaagctgtggacgcttgtggaggaaacccacactaacgagttcatcacctggagccagaatggccaaagttttctggtcttggatgagcaacgatttgcaaaagaaattcttcccaaatatttcaagcacaataatatggcaagctttgtgaggcaactgaatatgtatggtttccgtaaagtagtacatatcgactctggaattgtaaagcaagaaagagatggtcctgtagaatttcagcatccttacttcaaacaaggacaggatgacttgttggagaacattaaaaggaaggtttcatcttcaaaaccagaagaaaataaaattcgtcaggaagatttaacaaaaattataagtagtgctcagaaggttcagataaaacaggaaactattgagtccaggctttctgaattaaaaagtggaaacaactccactgtaactagattgatctatgcacttttcttgcttgttggagtatgtgtagcttgtgtaatgttgataccaggaatggaagaacaactgaataagattcctggattttgtgagaatgagaaaggtgttgtcccttgtaacattttggttggctataaagctgtatatcgtttgtgctttggtttggctatgttctatcttcttctctctttactaatgatcaaagtgaagagtagcagtgatcctagagctgcagtgcacaatggattttggttctttaaatttgctgcagcaattgcaattattattggggcattcttcattccagaaggaacttttacaactgtgtggttttatgtaggcatggcaggtgccttttgtttcatcctcatacaactagtcttacttattgattttgcacattcatggaatgaatcgtgggttgaaaaaatggaagaagggaactcgagatgttggtatgcagccttgttatcagctacagctctgaattatctgctgtctttagttgctatcgtcctgttctttgtctactacactcatccagccagttgttcagaaaacaaggcgttcatcagtgtcaacatgctcctctgcgttggtgcttctgtaatgtctatactgccaaaaatccaagaatcacaaccaagatctggtttgttacagtcttcagtaattacagtctacacaatgtatttgacatggtcagctatgaccaatgaaccaggaggtcttgcctcaatgttgacggctgctgaccgaacaggcatccgtacttcaaacaatagtcaggttaataaactgactctaacaagtgatgaatctacattaatagaagatggtggagctagaagtgatggatcactggaggatggggacgatgttcaccgagctgtagataatgaaagggatggtgtcacttacagttattccttctttcacttcatgcttttcctggcttcactttatatcatgatgacccttaccaactggtacaggtatgaaccctctcgtgagatgaaaagtcagtggacagctgtctgggtgaaaatctcttccagttggattggcatcgtgctgtatgtttggacactcgtggcaccacttgttcttacaaatcgtgattttgactga

SEQ ID NO: 10532 - DNA, 2656 bp, Homo sapiens
  SIMILAR (58)..(1101): 891254mologous to Homo sapiens Diff33 protein homolog,accession number AF164794,Smith-Waterman Score=1579.
cgagaaagaagctgtctccatcttgtctgtatccgctgctcttgtgacgttgtggagatggggagcgtcctggggctgtgctccatggcgagctggataccatgtttgtgtggaagtgccccgtgtttgctatgccgatgctgtcctagtggaaacaactccactgtaactagattgatctatgcacttttcttgcttgttggagtatgtgtagcttgtgtaatgttgataccaggaatggaagaacaactgaataagattcctggattttgtgagaatgagaaaggtgttgtcccttgtaacattttggttggctataaagctgtatatcgtttgtgctttggtttggctatgttctatcttcttctctctttactaatgatcaaagtgaagagtagcagtgatcctagagctgcagtgcacaatggattttggttctttaaatttgctgcagcaattgcaattattattggggcattcttcattccagaaggaacttttacaactgtgtggttttatgtaggcatggcaggtgccttttgtttcatcctcatacaactagtcttacttattgattttgcacattcatggaatgaatcgtgggttgaaaaaatggaagaagggaactcgagatgttggtatgcagccttgttatcagctacagctctgaattatctgctgtctttagttgctatcgtcctgttctttgtctactacactcatccagccagttgttcagaaaacaaggcgttcatcagtgtcaacatgctcctctgcgttggtgcttctgtaatgtctatactgccaaaaatccaagaatcacaaccaagatctggtttgttacagtcttcagtaattacagtctacacaatgtatttgacacggtcactgtatgaccaatgaaccagaaacaaattgcaacccaagtctactaagcataattggctacaatacaacaagcactgtaccaaaggaagggcagtcagatccagtggtggcatgctcaagggaattataggactaattctctttttgttgtgtgtattttattccagcatccgtacttcaaacaatggtcaggttaataaactgactctaacagagtggtgaatctacattaataggaaggtgggtgggagctaggaagtgatgggatcactgggagggatggggggacggatgtttcacccgaggctgttaggattaatggaaaggggatgggtgttcactttacagttattccttctttcacttcatgctttgccctggcttcactttatatcatggatgcacccttaccagctggtacaggtatgaaccctgctgcgtggatggaaagtcagtggacagctgtgctggggtgaaaatctcttccagttggattggcatcgtgctgtatgtttggacactcgtggcaccacttgttcttacaaatcgtgattttgactgagtgagacttctagcatgaaagtcccactttgattattgcttatttggaaaacagtattcccaacttttgtaaagttgtgtatgtttttgcttcccatgtaacttctccagtgttctggcatgaattagattttactgcttgtcattttgttattttcttaccaagtgcattgatatgtgaagtagaatgaattgcagaggaaagttttatgaatatggtgatgagttagtaaaagtggccactattgggcttattctctgctctatagttgtgaaatgaagagtggaaaacaaatttggtttggactattttaaaaattatattaggaccttaagctgttttagcaagcattaaaggcaaatgtatggctgccttttgaaatatttgatgtgttgcctggcaggatactgcactagaacatggtttattttaaaaatttataaacaagtcacttaaatgccagtttgtctgaaaagctcttataagggcgttacccttgatacgggaatttacacaggtagggagtgtttagtggacaatagtgtaggttatggatggaggtgtcggtactaaattgaataaccgagtaaataatcttacttgggtagagatggcctttgccaacaaagtgaactgttttggttgttttaaactcatggaagtatgggttcagtggaaatgtttggaactctgaaggatttagacaaggttttgaaaagcataatcatgggttagaaggaagtgtttgaaagtccactttgaaagttagttttgggccagcacggtagctcacccttgtaatcccagcactttgggaggctgagggtgggtagattacttgagcccagggaattcaagaccagcctggggcaacatgggtgaaaccctgttttctataaaaaataatctggggctttgtagcatatgcctgtggtcccagctactgaaggaggctgaggttgggaggattgcttgagcccagggaggcagaaggttgcagtgagccaaggtcacgtcactgcactctagcctgggcaacagagtaagacaaaaaaatatatatatattgaaaatcaaaggaggcaaaattttgacagggaaggaagtaactgcaaaacactaggctttagttaggtacttatataaaatctagtccagttctctcatttaaaaaaatgaagacactgaagtacagacttatatagc

SEQ ID NO: 10533 - DNA, 837 bp, Homo sapiens
  SIMILAR (395)..(445): 641254mologous to Homo sapiens HERV-E integrase,accession number AF026246,Smith-Waterman Score=72.
atggagtccttctctgcagactttagcaggggcagaactactggacttcttgcagaccaaggtcactgggaatatgagagacaagagaactactcccatgcccgagttcttacatgcttcctggcccaacacagagctcaggtactggaaagagaactgtcccgagagccaaaagggcccctgaccaatgatggctttgagctgagggtgccctctgccttggccagctcccaatgtgacatcatcatcaaagggatggagcccagggcaactctggatgtacagatttggacggcccttacgaatcagctcggaaacgggctggagtttgtggctgacttagtacagacgacagcaaagttcactctttctccccgggtgattgagtgtggatcaggactggaacgtagcccctgtgtgcccccactggaaagtaccccagacctcatcctgaccactcccaccgctgtgaagggtctatttgaccttggaatggtcttcatcgtgatgagggagctgagcaggagagctgagcgggacagcccagagtccctcatgcagaccactctgcttgccaaccgtttcctacaggcccggaaacggatcgcgtgggtgaaggtgacggcgtcgagcgtgagtgaccctctgtgtagattaaactgcgctccctgtttcccatttccacagccgatgtccagggtcgatacgcccttaaaatccccgtacactccaccccaggtgaatacaggcctcgcagttctgcagtcagtttgccccacgcaagacccaggatctgggtctgtgaataatattcaagccaacatcattgccaagtga

SEQ ID NO: 10534 - DNA, 2501 bp, Homo sapiens
  SIMILAR (232)..(1362): 991254mologous to Homo sapiens FLJ00032 protein,accession number AK024442,Smith-Waterman Score=2096.
atggaggatgcgtgggggattcgcaaagagacaggaagagtcaaagaagaagctgagaaagtaacaggatggggaaacaactggagaaatgtagagaaaagctccatgtccagaaaggtgaaggcagcaagaccaggattcaagaagttgcccatgacgtcagatatccctcctaaatgtacaatcaaggatttgctaccaaaagagaagagcagtacagaagcagtattccacacagtggtgttggaaagacacgaaagccctgacattgaagacttttccttcaaggaaccccagaaaaatgtgcatgattttgagtgtcaatggagagatgacacaggaaattacaagggagtgcttatggcccagaaagaaggtaaaagagatcaacgcgacagaagagacatagaaaacaagcttatgaacaatcagcttggagtaagctttcattctcatctgcctgaactgcagctatttcaaggtgaggggaaaatgtatgaatgtaatcaagttgagaagtctaccaacaatggttcctcagtgtcaccacttcaacaaattccttctagtgtccaaacccacaggtctaaaaaatatcatgaacttaaccatttttcattactcacacaaagacgaaaagcaaacagttgtggaaaaccttataaatgtaatgaatgtggcaaggcgttcactcagaattcgaaccttacaagtcataggagaattcatagtggagagaagccttacaaatgcagtgagtgcggcaaaacctttactgttcgttcaaatctaactattcatcaggtcatccatactggagaaaaaccttacaaatgtcatgagtgtggcaaggtcttcaggcacaattcataccttgcaactcatcggcgaattcatactggagagaaaccttacaagtgtaatgagtgtggaaaagcctttagaggacattcaaacctaactacccatcagttaattcatactggagaaaaaccgttcaaatgtaatgaatgtggcaagctcttcactcaaaattcacaccttataagtcattggagaattcacactggagagaaaccttacaagtgcaatgagtgcggcaaagcctttagtgttcgttcaagcctagcaatccatcagacaatccacactggagaaaaaccttacaaatgtaatgaatgtggcaaagtctttaggtacaattcatacctcggaaggcatcggagagttcatactggtgagaaaccttacaagtgtaatgaatgtggcaaagccttcagtatgcattcaaacctagctacccatcaggtcatccatactggaacaaaacctttcaaatgcaatgaatgcagcctaggttttcactcaaaattcacaacttgcaaatcatcgaagaattcatactggagagaaaccttacaagtgtaatgagtgtgggaaagccttcagtgttcgttcaagtctgactacccatcaggcaatccattctggagagaaaccttacaaatgtatcgaatgtggcaagagcttcactcaaaaatcacaccttagaagtcatcggggaattcattctggagagaaaccttacaagtgtaatgaatgtggtaaagtcttcgctcaaacatcacaacttgcaaggcattggagagttcatactggagaaaaaccttacaagtgtaatgactgtggcagagcctttagtgatcgttcaagcctaacttttcatcaggcaatacatactggagagaaaccttacaaatgtcatgaatgcggcaaggtttttaggcacaattcataccttgcaactcatcggcgaattcatactggagagaaaccttacaagtgtaatgagtgtgggaaagcctttagtatgcattcaaacctaactacccataaggtcatccatactggagagaagccttacaaatgtaatcaatgtggcaaggtcttcacttcagaactcacaccttgcaaatcatcaaaggactcacaccggagagaaaccttaccgatgcaatgagtgtgggaaagccttcagtgttcgttcaagcctaaccacccatcaggcaatccatactgggaaaaaaccttacaaatgtaatgaatgtggcaaggtctttactcaaaatgctcacctggcaaatcaccgaagaattcatactggggagaaaccttacaggtgtacagagtgtgggaaagcctttaggagacagggtgtcactcctgggcccagtctggagtgcaatggaacaattctggcttacagcagcctcaagtttgtgggctcaagtgatacccacattagcctcctaaggagccaggatgacaggcaggtgctaccacacctggctaatcccaatttcagagaaggtctcctgcctgcctttctgctgctctgttcagactctcacttcctgcagttctgcagtcagtttgccccacgcaagacccaaggatctgggtctgtgaataatattcaagccaacatcattgccaagtga

SEQ ID NO: 10535 - DNA, 478 bp, Homo sapiens
  SIMILAR (169)..(89): 481254mologous to JC virus large T-antigen,accession number AF320284,Smith-Waterman Score=56.
aagggttgttcaaagtcccctggaaggacctaaacatgctgactgccatgctttccctccttggctttctcccaggcactcttcacacacagatgtgtctacagtggcaggtttgggagcctgaagagcggctgtgcccggtactgcaatgccactgtgaaggtgaggagcgcgtggccgaggcccagtctaggccagtagggccaggcagctccagggccatgctcttgggtcctagggtccacgtggtcacaggtggcccgtgcttgctgttgtcttccgttctctgaaatgatcttgttttactgtttttaaaattcatacattgactcttccccaacttagaacgttggctccacaagcatgagccttcctctgtccgttcgcacagtgttagagccagtccagcacccaggggaggggctcagtagagttgtggtgaccagatgactgagcactagccatgccatcaactttc

SEQ ID NO: 10536 - DNA, 150 bp, Homo sapiens
  SIMILAR (1)..(87): 1001254mologous to Homo sapiens 13kDa differentiation- associated protein,accession number AF112208,Smith-Waterman Score= 148.
atggagttagtgcaggtcctgaaacgcgggctgcagcagatcaccggccacggcggtctccgaggctatctacgggtttttttcaggctggtctctgtcccatatatccccgatacaagaccgaagctatctgtagagtcagagctgtga

SEQ ID NO: 10537 - DNA, 459 bp, Homo sapiens
  SIMILAR (198)..(377): 1001254mologous to Homo sapiens 13kDa differentiation- associated protein,accession number AF112208,Smith-Waterman Score= 351.
cggacgcgtgggcggggccagcgaggcaagatggagttagtgcaggtcctgaaacgcgggctgcagcagatcaccggccacggcggtctccgaggctatctacgggtttttttcaggacaaatgatgcgaaggttggtacattagtgggggaagacaaatatggaaacaaatactatgaagacaacaagcaattttttggcatcgttggcttcacagtatgactgatgatcctccaacaacaaaaccacttactgctcgtaaattcatttggacgaaccataaattcaacgtgactggcaccccagaacaatatgtaccttattctaccactagaaagaagattcaggagtggatcccaccttcaacaccttacaagtaaagacaatgaagaacagttgaaacatgcaaaatatggagcttttcatgtaattactcttttactgtttaccattcactat

SEQ ID NO: 10538 - DNA, 538 bp, Homo sapiens
  SIMILAR (56)..(175): 851254mologous to Bos taurus NADH:ubiquinone oxidoreductase b17.2 subunit,accession number AJ011400,Smith-Waterman Score=187.
tttcgtaggtcctgaaacgcgggctgcagcagatcaccgggcacggcgggtcttccgaggctatctacgggtttttttcaggacaaatgatgcgaaggttggtacattagtgggggaagacaaatatggaaacaaatactatgaagacaacaagcaattttttggtgatgaacgactgcaggcatctggactggctctaacactgtgcgaacagacagaggaaggctcatgcttgtggagccaacgttctaagttgggaaagagtcaaagtatgaattttaaaaacagtaaaacaagatcatttcagagaacggtgagtgctgggaaaacaaagtattatcatccagtggtggcaggaagacaacagcaagcacgggccacctgtgaccacgtggaccctaggacccaagagcatggccctggagctgcctggccctactggcctagactgggcctaaaacacgcgctcctcaccttcacagtggcattgcagtaccgggcacagccgctcttcaggctcccaaacctgccactgtag

SEQ ID NO: 10539 - DNA, 535 bp, Homo sapiens
  misc_feature (1)...(535): n = a,t,c or g
gggctcatttgctaatccctagcatattttggactatgaaattcatttgcaattgaatataatatcagaagaaattacagggggatactgtatacctaacgatataaaaaaattttgtttattgtaggtacggctgcttttttgtggtatgacagtgttagaaatgattcgtttgtaatcttctttgcctgttatggtcaaactattatctaattatatttttaaatttatcttttagggacagtatggaaattaccagcagtgaaaaagtacttacattccagtagccagtatctattagcagccatattgtcacctcagcactgtggacacctccctgtgaagagatccttccattccatctagtttttgggaaaaaccttgtggataagtggctgtttcatcagtaagcagcctttgtggtttagttataaaaggctttagtagctcataaatactcttgatttacatttctactctagatggcacatttgacagaanatgcaatgacataaccaatttgtaatgattttgg

SEQ ID NO: 10540 - DNA, 603 bp, Homo sapiens
  SIMILAR (139)..(495): 981254mologous to Homo sapiens SYT/SSX4 fusion protein,accession number AF257500,Smith-Waterman Score=698.
atgaagatttgctggaatatattgagtacaacagagtttatagaaaatgaaatcaagggcttctgggagaaaattgatgtctgggttttcactcagtggccattaacgtttcttcctgtctcttgtcgaattgatgtaggtcataatgattacggttatcagcaaccgtcgtatcctgaacaaggctacgataggccttatgaggattcctcacaacattactacgaaggaggaaattcacagtatggccaacagcaagatgcataccagggaccacctccacaacagggatatccaccccagcagcagcagtacccagggcagcaaggttacccaggacagcagcagggctacggtccttcacagggtggtccaggtcctcagtatcctaactacccacagggacaaggtcagcagtatggaggatatagaccaacacagcctggaccaccacagccaccccagcagaggccttatggatatgaccagactctaagccttatctccttaagtcagaacatctggcagactcagcctcagttccccttcgtgcactgcagactggaaactctcaagggacagtatggaaattaccagcagtga

SEQ ID NO: 10541 - DNA, 2921 bp, Homo sapiens
  SIMILAR (4)..(1176): 1001254mologous to Homo sapiens translocated in synovial sarcoma,accession number X79201,Smith-Waterman Score=2217.
tggatgggcggcaacatgtctgtggctttcgcggccccgaggcagcgaggcaagggggagatcactcccgctgcgattcagaagatgttggatgacaataaccatcttattcagtgtataatggactctcagaataaaggaaagacctcagagtgttctcagtatcagcagatgttgcacacaaacttggtataccttgctacaatagcagattctaatcaaaatatgcagtctcttttaccagcaccacccacacagaatatgcctatgggtcctggagggatgaatcagagcggccctcccccacctccacgctctcacaacatgccttcagatggaatggtaggtgggggtcctcctgcaccgcacatgcagaaccagatgaacggccagatgcctgggcctaaccatatgcctatgcagggacctggacccaatcaactcaatatgacaaacagttccatgaatatgccttcaagtagccatggatccatgggaggttacaaccattctgtgccatcatcacagagcatgccagtacagaatcagatgacaatgagtcagggacaaccaatgggaaactatggtcccagaccaaatatgagtatgcagccaaaccaaggtccaatgatgcatcagcagcctccttctcagcaatacaatatgccacagggaggcggacagcattaccaaggacagcagccacctatgggaatgatgggtcaagttaaccaaggcaatcatatgatgggtcagagacagattcctccctatagacctcctcaacagggcccaccacagcagtactcaggccaggaagactattacggggaccaatacagtcatggtggacaaggtcctccagaaggcatgaaccagcaatattaccctgatggaaattcacagtatggccaacagcaagatgcataccagggaccacctccacaacagggatatccaccccagcagcagcagtacccagggcagcaaggttacccaggacagcagcagggctacggtccttcacagggtggtccaggtcctcagtatcctaactacccacagggacaaggtcagcagtatggaggatatagaccaacacagcctggaccaccacagccaccccagcagaggccttatggatatgaccagggacagtatggaaattaccagcagtgaaaaagtacttacattccagtagccagtatctattagcagccatattgtcacctcagcactgtggacacctccctgtgaagagatccttccattccatctagtttttggaaaaaccttgtggataagtggctgtttcatcagtaagcagcctttgtggtttagttataaaaggctttagtagctcaaaaatactcttgatttcacatttctactctagatggcaacattggacagaaaatgcaatgacataaccaatttgtaatgattttggaactgtgtttcaaatggactgttacagactgaaaggtgtgaacagctttggtttgtttatgaaggggtaagggaatttaatacttttccacagatttttttgtaaggggaagagggaaatgtacactttttacagcagcaatattttgtatattatgtttatttcatgtggtgaatatgcaaggcggtacactacgcactggacagcatcagaaatcctctgttaatgtggactggagcatggtagatgcttgattgttttggtctcaaaatggtgtgctataaagataaaggtgaggggaagacaaagcacaccatatgtccactgttctgttctcatagaggaaattcaaatcccttttatctattagataatcaagggcactgtgatacagttttgagtaaaaagacattttttaaaagccttccagttttgtggattaaacctttttataaagatcatttataatactgttttaaaatgtgaggcaataagaattactttgtgttggatctgaggaggctttggtaaaacagtttcatctaaatgaaagtggtaatcctcttctaaaatagcaataactgaaaatgaaagtgttaattttaccttgtttgagttatcagggaacttagtaagtaatatcaaagcattttataaatgatatcaaagaagagtcaacattgatccagtcattttattttgtaatattgagggataattggttattaaactgaatagttcaggagactttacaaacctttgtttcaactttcttatctggaaataatatcatttataaagggacacttttatgtttttcccttttttatgttggttgatataacacaaagagatatttaggaaaatgcttattgatgaggtttattctatctgtttttaaagcaccgaggttgcattctagataaccttgtttattagcatggcatattttaatcattatttgagactgtcctgtgcctgattattttagctaaattcagggagattgcgtggggcaggaaagcatgcattgaaaaatttctaaccacggttatttaagcataatctgaaaacatctagcccaaaggtaagttgctattttcatcacagttgcctatgcccagggaataagatgtattctttataattgaattggtttttcccacgtctaactggaaacaaaacagaaggggcgtcataaatttgaataagcagaacatactgttctcaacatactgtaatcaaaaggaggaatttcagtgggtctctgtgtgtgtatgagagagagagtgtgtgtttgtgtgtttcaaggtcagaacaggtttttttgtttttgttttttgttctttgtttttttttttgagatggagtcttgctcttgtcgcccaggctggagtgcagtggcgcaatctcagctcactgcaacctccgcctcccaggttcaagcagttctcctgcctcagcctcctga

SEQ ID NO: 10542 - DNA, 1058 bp, Homo sapiens
  SIMILAR (439)..(858): 951254mologous to Mus musculus homolog of human SYT,accession number X93357,Smith-Waterman Score=785.
atgcacttggaagtaaattcttccccagaacctctagatgagaacctggacaacactgtgacttcagccttgtcaggccatgaacagagaatccagacaagcctgcctgtacttcttactacaaaaactgagatattagccaggttctcacaactgcagtttccagaggaacagagcagttttgcatatcctgccaactgtgtcaaatctaaaggaatgaatacaaaacttccccttcgccctctgaaggtttgccgtgaactgacaatagacagtgatagagatatattatacagaactcttttcatgggagatagtggcatgggaaaagtacaatttgaatttggagaggaagtacacatagtgattaagagcacgggctttggaccatttagtagctatgctactttagagcctttcgtagcagtacagctttggggaggcggacagcattaccaaggacagcagccacctatgggaatgatgggtcaagttaaccaaggcaatcatatgatgggtcagagacagattcctccctatagacctcctcaacagggcccaccacagcagtactcaggccaggaagactattacggggaccaatacagtcatgggggacaaggtcctccagaaggcatgaaccagcaatattaccctgatggtcataatgattacggctatcagcaaccgtcggatcctgaacaaggctacgataggccttatgaggattcctcacaacattactacgaaggaggaaattcacagtatggccaacagcatgatgcataccagggaccacctccacaacagggatatccaccccagcagcagcagtacccaggccagcaaggttacccaagaacagcagcagggctacggtccttcacagggtggtccaggtcctcagtatcctaactacccacagggacaaggtcagcagtatggaggatatataccaacacagcctggaccaccacagccaccccagcagaggccttatggatatgaccagggacagtatggaaattaccagcagtgaaaaagtacttacattccag

SEQ ID NO: 10543 - DNA, 438 bp, Homo sapiens
  SIMILAR (221)..(436): 981254mologous to Homo sapiens glutathione S-transferase theta 1,accession number AF240786,Smith-Waterman Score=368.
ggtcaggtcggtcggtccccactatgggcctggagctgtacctggacctgctgtcccagccctgccgcgctgtttacatctttgccaagaagaacgacattcccttcgagctgcgcatcgtggatctgattaaaggtcagcacttaagcgatgcctttgcccaggtgaaccccctcaagaaggtgccagccttgaaggacggggacttcaccttgacggagaggacctgcaggcccgtgcccgtgtggatgagtacctggcatggcagcacacgactctgcggagaagctgcctccgggccttgtggcataaggtgatgttccctgttttcctgggtgagccagtatctccccagacactggcagccaccctggcagagttggatgtgaccctgcagttgctcgaggacaagttcctccagaacaaggccttccttac

SEQ ID NO: 10544 - DNA, 349 bp, Homo sapiens
  SIMILAR (18)..(230): 951254mologous to Homo sapiens glutathione transferase T1,accession number X79389,Smith-Waterman Score=344.
  misc_feature (1)...(349): n = a,t,c or g
gtcggtcggtccccactatgggcctggagctgtacctggacctgctgtcccagccctgccgcgctgtttacatctttgccaagaagaacgacattcccttcgagctgcgcatcgtggatctgattaaaggtcagcacttaagcgatgcctttgcccaggtgaaccccctcaagaaggtgccagccttgaaggacggggacttcaccttgacggagagcccgtgggtgctggctgccaagtnttcgaaggccgacccaagctggccacatggcggcagcgcgtggaggcagcagtgggggaggaccttttccaggaggcccatgaggttcattctgaaggccaaggactt

SEQ ID NO: 10545 - DNA, 607 bp, Homo sapiens
  SIMILAR (174)..(572): 631254mologous to Rattus norvegicus glutathione transferase,accession number X67654,Smith-Waterman Score=406.
agccctgccgcgctgtttacatctttgccaagaagaacgacattcccttcgagctgcgcatcgtggatctgattaaagtgtggccatcctgctctacctgacgcgcaaatataaggtccctgactactggtaccctcaggacctgcaggcccgtgcccgtgtggatgagtacctggcatggcagcacacgactctgcggagaagctgcctccggccttgtggataaggtgatgttccctgttttcctgggtgagccagtatctccccagacactggcagccaccctggcagagttggatgtgaccctgcagttgctcgaggacaagttcctccagaacaaggccttccttactggtcctcacatctccttagctgacctcgtagccatcacggagctgatgcatcccgtgggtgctggctgccaagtcttcgaaggccgacccaagctggccacatggcggcacgcgttggaggcagcagtgggggaggaactcttccaggaggcccatgagttcattctgaaggccaagacttccacctgcagacccagcatagggcagaagctgatccctgcgtgcggccatgatccgtgagtgggaaactcacc

SEQ ID NO: 10546 - DNA, 392 bp, Homo sapiens
  SIMILAR (391)..(293): 961254mologous to Homo sapiens glutathione transferase T1,accession number X79389,Smith-Waterman Score=164.
tgcccctgcacccagctgcgcccgtttttgtcctcctgtctggcttctcttcatgatccccacccctttattcggcctcaggggaaccccgtggtctattccgtgagaccgagcagagttttggggagccccgactcttggatctccctgctggctcacctttctctgttcggtctccaaaccagaccagcaatggccccaggaagaaggtggcgctgggagaagttccctaagctatgtatgcctacctgtccccttcctgacttttcggttccccaaacccgaggctggacctacctttaatcagatccacgatgcgcagctcgaagggaatgtcgttcttcttggcaaagatgtaaacagcgcggcagggctgggacagcaggtccagg

SEQ ID NO: 10547 - DNA, 505 bp, Homo sapiens
  SIMILAR (497)..(300): 1001254mologous to Homo sapiens glutathione transferase T1,accession number X79389,Smith-Waterman Score=338.
gcacggtgggcaaagctgccatcgtcctctggcctaccctgtctcaaggatactctcaccactcaccagcaaccaaagcactggtgtggaagtaaagtagatatttgcttttctaatcatcagggtgaactggaatagcaggaaggcaagggcctggggtccagtactgactctctgcaggatgcggggcacagagactctctgcctctgaagactttagtttccttgtctatgaaatagagggttagaacaggatggttccagcaggcctggcagcagtcctagggtcccagttacctctccgtcaaggtgaagtccccgtccttcaaggctggcaccttcttgagggggttcacctgggcaaaggcatcgcttaagtgctgacctttaatcagatccacgatgcgcagctcgaagggaatgtcgttcttcttggcaaagatgtaaacagcgcggcagggctgggacagcaggtccaggtacagctccaggcccatagtgggga

SEQ ID NO: 10548 - DNA, 402 bp, Homo sapiens
  SIMILAR (2)..(187): 1001254mologous to Homo sapiens ribosomal protein L18a,accession number AB007175,Smith-Waterman Score=328.
  misc_feature (1)...(402): n = a,t,c or g
tgcccggcaccgcgcccgagcccactccattcagatcatgaaggtggaggagatcgcggccagcaagtgccgccggccggctgtcaagcagttccacgactccaagatcaagttcccgctgccccaccgggtcctgcgccgtcagcacaagccacgcttcaccaccaagaggcccaacaccttcttctaggtgcagggccctcgtccgggtgtgccccaaataaactcaggaacgccccggtgnnnnnnnnnngnnnnnnnnnnnnnnnnnnnnnntataaatggggggggcccctttaaaagaaccannnnnnnnnncggggggaggggaagaaaatatttttttttgggggccccaaaattgaatccccgggccgggtttttaaaaaggggggaggggga

SEQ ID NO: 10549 - DNA, 1261 bp, Homo sapiens
  SIMILAR (1)..(219): 841254mologous to Rattus rattus ribosomal protein L18a (AA 1- 175),accession number X14181,Smith-Waterman Score=326.
atgtttgcgcctaatcatgtcgtcgccaagtccagcttctggtatttcgtatctcagttaaagaagatgaagaagttttcaggggagattgcctactctgggtgggtgtttgagaagtcccctctgcgggtgaagaacttccgcatctggctgcgctgtgactccctgagcggcacccacaacctgtatcgggaataccaggacctgaccacggcgggcggtcacccagtgctaccgagtcatggactctaggcactgcgcacaggcccactccatccagatcatgaaggtggaggagatcgcagccggcaagtgccgccggccgtccgtcaagcagttcctcgactctaaggtcaagttcccgctgccccaccaggtcatgcgccgtcagcacaagccacgtttcaccaccaagagtaaaaatgattttgaatggcttggactcatgcatgatagactgtcatggcagcaaaaactctaccagcagagattggttacattagtaagagcacagaaagaacagggaaaggtaatcacagcaaacaacaaaaagtaccttactgtgaaaagctgtgctatctcttgggaaggtctatcggtgcgggcctcttgttatttagcccagctggcgtaaagcggcatgtgctgcaagccgattaagttgggtaacgccagggtttccccagtcacggacgttgtaaaacggacggccagtgaattgtaatacggactcactatagggcgaattgggtaccggggccccccctcgagcaactgcagggtcacatccaactctaccagggtggctaccaagtgtctggggagatactggctcacccaggaaaacagggaacatcaccttatgccacaaggcccggaggcagcttctccgcagaagtcgtgtgctgccatgcccaggtactcatccaacacgggcacgggcctgcaggtccctaagggtaccaagtagtcagggaccttatatttgcgcgtcaggtaagagcaggatggcccacactctccgtcaaggtgaagtccccgtccttcaaggctggcaccttcttgagggggttcaccctgggcaaaggcatcgcttaagtgctgacctttaattagatccacgatgcgcagctcgaagggaatgtcgttcttcttggcaaagatgtaaacagcgcggcagggctgggacagcaggtccaggtacagctccaggcccatagtggggaccgaccgacctgaccggaaaccagagggagtcagc

SEQ ID NO: 10550 - DNA, 1290 bp, Homo sapiens
  SIMILAR (136)..(483): 881254mologous to Macaca mulatta mannose-binding protein A,accession number L43912,Smith-Waterman Score=549.
gctgggcatagggtgatttttcagaggtctggcttcccagggaactcaaactgcttgcctactgtcctgcgctgggctccaaacccagccagcctcactcaccatttgtggtttcagtgtaagccttctccttggggaaaaatgtctgagaagaagctttttggaccaaatggtgagcggatgcctttctccaaagtgaaggctctgtgtgctggtctccaggccacagtggctgcccccaagaatgccgaggagaataaggccatccaggatgtggccaaagacactgccttcctgggcatcacagatgaggcaactgaaggccagttcatgtacttgacgggcgggaggctgacctacagcaactggaagaaggatgagccaaatgaccacggctcaggggaggactgcgttattctcctgaacaatgggctctggaatggcatctcctgcacctcctccttcattgccatctttcagtgggcccattatcagtacagacaagcggaaaattaccccaaaggtgagcttcataccctacgggttaaattatgcgggcccagctggccaacaaatgccatccactttcggagcaggcttctgatgccattgggacccacagttctgctcatgaccatggctgtttttcagctatctcaggcagtggccatgtgcagctggtgctgtggcctcgtgctgccccctgctggttgcctccaagacaaggccagcaaacccagagagactcaagcccagccaggtctctgtgtccgaggcaatttcagaatcccctcaagacaggactttgctgctgctcttgcccgagccctgtcggggctggatttgtgggcttctctctgggttccctttgcggactttttgggttcatccctctctgtgccttggttttcatatttggaaaatgacgaggaggatttaactagattatctctaaggttgaatggggaaagaacattcctggaatcaccaggcaagaagaggattggagctggtactcctcccatgagtcaagaggcagtcatgttggcagtgatggagagagatcctgggcagtgcaggggtgaggaagggcctactgagtgcagggccatgtggcctggctggggaggcagacattctctgccaggtcaccctgccatgctgtgcagcttcctgggctcagaccttgaaataagaggcagcaatggaggctgggagcctccttttatccctgggctccagccagaactggctagaggaatccagggttcaggaagaggtgctgaatag

SEQ ID NO: 10551 - DNA, 445 bp, Homo sapiens
  SIMILAR (216)..(97): 421254mologous to Bacteriophage VT2-Sa similar to C2 of bacteriophage L,accession number AP000363,Smith-Waterman Score=65.
tccttggcttggacagaggaactcaagcttgggctgggcagagatttttttctgctgggcagacttcccattgttcctcagcagagcactcagaagcacatcatcgagggaaattggtttgtcatcaaaggcttgggaagacagctctgctgagacgcatgctctggctggacaggttagggctttgggggcccttctggaagtctgccagtgtccttggtcctaggacacccagatactctctcagcctgggaggatcttcagggagaggctaggtgttggtttgggtagctcagcatctgtctgcagtcagcagtttgtacaccagggatggatcagctgccccatgctccttagggattctggactggggaaccctcccaagcacagccgagccagggagggaaggcccagcggacgcgtgggtcgacccgggcgtccgaag

SEQ ID NO: 10552 - DNA, 603 bp, Homo sapiens
  SIMILAR (61)..(600): 821254mologous to Homo sapiens dJ977B1.1 (novel protein tyrosine kinase with Src homology domain 2 domains),accession number AL050318,Smith-Waterman Score=725.
atgtcggacagtgatctaggtgaggacgaaggcctcctctccctggcgggcaaaaggaagcgcagggggaacctgcccaaggagtcggtgaagatcctccgggactggctgtacttgcaccgctacaacgcctacccctcagagcaggagaagctgagcctttctggacagaccaacctgtcagtgctgcaaagacatggctcttactctctgtcagtccgcctcagccgccctgcatcctgggaccggatcagacactacaggatccactgccttgacaatggctggctgtacatctcaccgcgcctcaccttcccctcactccaggccctggtggaccattactctgagctggcggatgacatctgctgcctactcaaggagccctgtgtcctgcagagggctggcccgctccctggcaaggatatacccctacctgtgactgtgcagaggacaccactcaactggaaagagctggacagctccctcctgttttctgaagctgccacaggggaggagtctcttctcagtgagggtctccgggagtccctcagcttctacatcagcctgaatgacgaggctgtctctttggatgatgcctag

SEQ ID NO: 10553 - DNA, 957 bp, Homo sapiens
  SIMILAR (3)..(239): 981254mologous to Homo sapiens NDRG3,accession number AB044943,Smith-Waterman Score=398.
tttcgtccaaactctctggcctgacaaccaatgttgtggacattattttggctcatcactttgggcaggaagagttacaggccaacctggacctgatccaaacctacagaatgcatattgcccaagacatcaaccaagacaacctgcagctcttcttgaattcctacaatggacgcagagacctggagatcgaaagacccatactgggccaaaatgataacaaatcaaaaacattaaaggggttctactttactggtggtaggggacaattcgcctgcagttgaggctgtggtcgaatgcaattcccgcctgaaccctataaatacaactttgcctaaagatggcggactgtgggggactgcccccagggtagttcagccctgggaagctcaccgaggccttcaagtactttttgcagggaatgggctacatccccttggttctctgttacagtaccatctggcagcatgacttcggttgcccgatcacggaacccactcaacctcgagtagcctcggctctggagaaagtcccttcagccggtctgtcaccagcaatcagtcagatggaacttcaagaatccttgtgagtcccctgatgtcctggacagacaacagaccatggaggtgtcctgctaagcagatgctcctcccctggaccattgcaagtccatccttcaaatgaccactccataatataacatttcatccaggtaaactggcctctactatctttaactcatgcatggccactgaacctctctctagtagcctggatttatcattctctctgcctgcccacccccttttttgtatagcccaagaaccacttccatgccatactgtaacattccaacatctttagctgatcagatctctccatatcctctcttgccagctttttcccgtgctcccccaactatgtatcagataagattctttgatcccgacaaaaaaa

SEQ ID NO: 10554 - DNA, 2049 bp, Homo sapiens
  SIMILAR (3)..(716): 721254mologous to Homo sapiens dJ460J8.1 (novel protein similar to N-myc downstream regulated (NDRG1)),accession number AL031662,Smith-Waterman Score=826.
  misc_feature (1)...(2049): n = a,t,c or g
ataaatcctgtttcaatgcattctttaactttgaggatatgcaagagatcacccagcacgtttgctgtctgtcatgtggatgccccaggccagcaggaaggtgcacccgtcntttcccaacagggtatcagtaccccacaatggatgagctggctgaaatgctgcctcctgttcttacccacctaagcctgaaaagcatcattggaattggagttggagctggagcttacatcctcaagcagatttgcactcaaccatccagagcttgtggaaaggcccttgtgctcattaatggttgacccttgccgctaaagggctggattgactgggcagcttccaaactctctgggcctgacaaccaatgttgtgagaaattattttggctcatcactttgggcaggaagagttacaggccaacctggaccctgatccaaacctacagaatgcatattgcccaagacatcaaccaagacaacctgcagctcttcttgaattcctacaatggacgcagagacctggagatcgaaagacccatactgggccaaaatgataacaaatcaaaaacattaaagtgttctactttactggtggtaggggacaattcgcctgcagttgaggctgtgatggcggactgtgggggactgccccaggtagttcagcctgggaagctcaccgaggccttcaagtactttttgcagggaatgggctacattcccgtatgtgcagctcagtcacctgagcaccgagtcagtaccatctgccagcatgactcggctcgcccgatcacgaacccactcaacctcgagtagcctcggctctggagaaagtcccttcagccggtctgtcaccagcaatcagtcagatggaactcaagaatcctgtgagtcccctgatgtcctggacagacaccagaccatggagatttccctcgatgatgtgcttctgagtgctctgctgaggaacaatgggaagtctgcccagcagaagaaaatctctgccaagcccaagcttgagttcctctgtccaaggccagggacctgtgaccatggaagcagagagaagcaaggccacagccgtggccctgggcagtttcccggcaggtggcccggccgagctgtcgctgagactcggggagccattgaccatcgtctctgaggatggagactggtggacggtgctgtctgaagtctcaggcagagagtataacatccccagcgtccacgtggccaaagtctcccatgggtggctgtatgagggcctgagcagggagaaagcagaggaactgctgttgttacctgggaaccctggaggggccttcctcatccgggagagccagaccaggagaggctcttactctctgtcagtccgcctcaaccgccctgcattctgggaccggatcagacactacaggattcactggcttgacaatggctggctgtacatctcaccgcgcctcaccttcccctcactccaggccctggtggaccattactctgagggctggcccgctccctggcaaggatatacccctacctgtgactgtgcagaggacaccactcaactggaaagagctggacagctccctcctgttttctgaagctgccacagggggaggagtctcttctcagaggaggggctccgggagtcccctcagcttctacatcagccctgaatgacgaggctgtctcttttggatgatgccctaggcccccaagggagaggccaaaaggggaaacccacggttggccaccttagaaccccaattcagcctcctgggcaccccagaggcaaggctgtgcactcagggagggagggtgggacacagaggtgcatntagggtcccacctgtacccttgctctttcctctcttagcccttagaagtcacctactttccttcagggccatgatcccacctgcgacctctaatgcgagtgcanagaaggggggaccagggccagggttcccaaaaagagaataagccttcctgggggggcccggacccaattaggttctttgagagttggggtttccaataccccttctggagg

SEQ ID NO: 10555 - DNA, 426 bp, Homo sapiens
  SIMILAR (337)..(2): 701254mologous to Homo sapiens gag,accession number AF156961,Smith-Waterman Score=424.
tctttccctaagttatcgcggacatctttgcttaattcatgggctttttcctaattctccttagtccttctagaacacaggtcagcagatgtttatgaatccagtccccgtgatctgagtctaggtcccagtggggatgcatactgggaacagcttgctcactggtagggaatttgtccctttcttcagctgtcattctatcatttacttgactaagataccaggtatctccaaattctcaggctgcagctaaagccgcattcttttcattaaaggccatggtttgatctaacaatagcatgacgtctctccaagtgaagtcgaagatttgccctaggtctaccttggcaagatcaggtctaccttgatctgctttaaatcagagagagagaaggggacatatacccgggttgtgctaaattccct

SEQ ID NO: 10556 - DNA, 1551 bp, Homo sapiens
  SIMILAR (589)..(1536): 721254mologous to multiple sclerosis associated retrovirus polyprotein,accession number AF009668,Smith-Waterman Score=1180.
atgcgcaaggacagttgcgccagcagcatgcatcagcaagttagcagaagcaagaagagagctgggcagaagacaccccctgaagatcaagagggaggccagcgggcactacgcagcagccacatcagactgggacaattcctgcttatagaggactgtaaaaccccttccccatcctcacttggggctgacgctattgccaagcagaggaaaactagtgtttctgctgctgcgtcagtgagtgcaactattcccatccgcagggtccagggaccgaccgttgtgggttcttgggcaagaggtgtttctgctgctgcatcgggaccaagaggaacaggcccaaaaggaaaagcgagatcagagaaaggctgcagccttagtcatggccctcagacaaacaaacctttggtggttcagaaaggacagaaaatggagcaggccaatcacccggtagggcttgttatcagtgtggtttacaaagacattttaaaaaagattgtccaacgagaaacaagccaccccctcatccatgtccgctatgccgaggcaatcactggaaggcgcactgccccggaggacaaaggttctctggggagggatatgttagccaaagctggagctattatctacatgaatatggggaacaagttacccatttggtgtcacctacttgaggaaggaatctaccttgaagtctgggcattggaaggacaatttggaagggcaaaaaatgcctgcccagtccaaatcaggttaaaagatcccaccacatttccttatcaaaggcaatatcccttaaggcctgaagctcataaaggattacaggatattgttaaacatgtaaaagctcaaggcttagtaaagaaatgcagcagtccctgcaacaccccaattctaggagtacaaaaaccgaacggtcagtggagtctagtgcaagatcttagactcatcagtgaggcagtaattcctctatatccagttgtacccaacccctataccctgctctctcaaataccagaggaagcagaatggttccctgttctggacctcaaggatgccttcttctgtattcccctgcactatgactcccatgactcccagtttctctttgcctttgaggatcccacagaccacacatcccaacttatatggaccgtcttgccccaagggtttagggatagccctcatctgtttggtcaggcactggcccaagatctaggccacttctcaagtccaggcactctggtccttcagtatgtggatgatttacttttggctaccagttcggaagcctcatgccagcaggctactctagatctcttgaattttctagctaatcaagggtacaaggcatctaggtcaaaggcccagctttgcctacagcaggtcaaatatctaggcctaatcttagccagagggaccaggacccttggcaaggaacgaatacagcctatactggcttatcctcaccctaagactttaaaacagttgtgggggttccttcaaatcaccgcttttgccaactatggatccccagatagagcaagatag

SEQ ID NO: 10557 - DNA, 1377 bp, Homo sapiens
  SIMILAR (766)..(1317): 901254mologous to Homo sapiens putative p150,accession number U93563,Smith-Waterman Score=825.
atgaagccatcagtgtgggccctaattcaactcaacttgagtccttatgagaaggggatattgggactcacaaagagacaccagggacgtctgtgcacagacggaagacaaggaattcaacctcttcctccttctcaggcacacacggggatccctcttctccatccctactctatccaggtggattgcgccattgacagaggaaaactatgtttctgctgctgcatcggtgagtgtaactattctgaccagcagggtccagggactgttgcgggttcttgggcaagaggtatttctgctgctgtgtcagtgagtgcaactattctgatcagcagggtccagggaccattgcatgttcttgggcaagaggtgtttctgctgctgcgtcgacaaacaaaccttgctggttcagagaggacagaaaatggagcaggccaatcacctggtggggcttgttatcagtgtggtttgcaaggacactttacaaaagattgtccaatgagaaacaagctgccccctcgcccatgtccactataccaaggaaatcactggaaggatggggaaccaatcgagcatgactgccaacaaattatagtccagacttctgctgctcgagaggatcttttagaagtccccttagctaatcctgaccttaacctatataccgatggaagttcatttgtggagaatggggaagtagctaaagcggtcatcgcccaattcccgacaacagttggggtgtcctgtttagatgggagattgagagtgttggaagttctggccagggcaatcaggcaggagaaggaaataaagggtattcaattaggaaaagaggaagtcaaattgtccctgtttgcagatgacatgattgtatatctagaaaaccccatcatctcagcccaaaatctccttaagctgataagcaacttcagcaaagtctcaggatacaaaatcaatgtgcaaaaatcacaagcattcttatacaccaataacagacaaacagagagccaaatcatgagtgaactcccattcacaattgcttcaaagagaataaaatacctaggaatccaacttacaagggatgtgaaggacctcttcaaggagaactacaaaccactgctcaacgaaacaaaagaggatacaaacaaatggaagaacattccatgctcatgtgtagaaagaatcaatatcatgaaaatagtcatactgcccaaggtaatttatagattcaatgccatccccatcaagctaccaatgactttcttcacagaattggaaaaaaactactttaaagttcatacggaaccaaaaaagagcctgcattgccaagtcaatcctaagccaaaagaacaaagctggaggcatcacgctacctga

SEQ ID NO: 10558 - DNA, 2094 bp, Homo sapiens
  SIMILAR (1459)..(2091): 691254mologous to multiple sclerosis associated retrovirus polyprotein,accession number AF009668,Smith-Waterman Score=748.
atggggagaaaacagcacaaaaaggctgaaaattctaaaaaccagaatgcctattctcctccaaaggatcacaactccttgccagcaagggaacaaaactggacagagaatgagtttgacaaattgacagaagtaggcttcagaagcaaggcagaccaacattcaaattcaggaactacagagaacaccgcaaagatactccttgagaagaacaacgccaagacacataattgtcagattcacattgaaatgaaggaaaaaatgttaagagcagccagagagaaaggtatagggcagcaggtcttctgcaatgaaggtcttaatgctctactttcagacaagttcttaaagatgatgtgtccgcagtttgttccttcagatgttcagatgtgtccagagtttcttcctcctggtgggttcgtggtctcactgacttcaggagtgaagctgcagaccttcacagtgagtgttacagctcttaaaggcggcatatctggagttgttcattccttctggtgggttcgtggtcttgctggcctcatgagtgaagctgcagaccttcgtggagtgaacctgcagaccttcatggtgagtgttacagctcataaaggctttgcggacccaaagagtgagcagcagcgagatttattgcgaagagtgaaagaacaaaggttccacagcctggaaagtgacctgagccagttgcccctgctggctctggtcgcctgcttttattcccttatcttgccccacccacatcctcctgagagagctgactggtccattttacagagagctgattgtctgggcactctggcagcccagagggagctcgtcccagacaatcaagaggaaaagaggggaagcgagaaagagatggagacctggtattgtggccaatcatcccgtgaaaagggaatggcggtccatgcatgggattcagcctctgatcaagcccagcaggcatcagcccgctgccctgagtgcggggcttgccaagcctgcgctcacctggaacccgcactggcctgtgagcaccgcacgcagccccagctcctgcctgcgcctctctcttcacacttccctaattcaggggctaaataccagacacctattggccagttaaaagtgactagcacagccgccggactaaagacacgggtgtcaggctttctgggaaagggctctctaacaaaccccgactcttcagagttgggagcattgaaggaaataagcaaagaaatctccaaaggaccacaaaaccccccaggctgtcagttttgtccccttcaagctgtagggggtggggaatttggccccacccaggtacatgaccctttctccctctctgatttaaagcagatcaaggcagacctggtgaagttttcagatggtcctgatagacgactgtcctcaaggtccgttaccatccggggaatcctgggacagtctgtaaccaggcctgaagctcataaaggattacaagatattgttaaacatttaaaagctcaaggcttagtaaggaaatgcagcagtgactgcaacaccccaattctaggagtacaaaaactgaatggtcagtggagactagtgcaagatcttggactcatcaataaggcaataattcctctatatccagttgtacccaacccctataccctgctctctcaaatatcagaggaagcagaatggttcactgttctggacctcaaggatgccttcttctgtattcccctgcactctgactcccagtttctctttgcctgtgaggaccccacagaccacacatcccaacttacacagacgatcttgccccacgggtttagggatagcccttacctgtttggtcaggcactggcccaagatctaggccacttctcaagttcaggcactctggcccttcagtatgtggatgatttacctttggctaccagtttggaagcctcatgccaacaggctactctagatctcttgaactttctagctaatcaagggtacaaggcatctaggtcaaaggcccagctttgcctacagcaggtcgaatatctaggcttaatcttagccagaggggccagggccctcagcaaggaatga

SEQ ID NO: 10559 - DNA, 2406 bp, Homo sapiens
  SIMILAR (1147)..(1893): 751254mologous to multiple sclerosis associated retrovirus polyprotein,accession number AF009668,Smith-Waterman Score=989.
atgtctatgggctttctggttgaagaaagtgaaccagtagtttggagaggccttatggtaatgtcggccattgagaaattgttgaggcaggtatcgggttaccttctggcccagggtgtgtctaggaatgtcgtccatgagcctggagtggggtcctcacaggtctgctctgtgccctgtcctactgtggctaagctgaattcaggggctaaataccgggcacctgtcggccagttaaaagctactagcgcggcaaccagactaaagacacgggtgtcaggctttctgggaaggggctctctaacatcccctgactctttggagttgggagcgttggtttgcctagaaccagcttccacttttcctgtacttctgggccgagccaagggtcgacagagaggaaagccattcagctccggggtccgaacaacaagaggacctatcagcttacccccatatcctagcctccctatagctccccgtcctattaacgataatcctcctctaatctcccctgcccagaaggaaatatgcgaagaaatctccaaaggacaacaaaaacccctgggctatcggttatgtccccttcaagctgtagggggaggggaatttggcccaacctgggtacatgtccccttctccctctctgatttaaagcagatcaaggcagacctggggaatttttcagatgatcctgataggtacataaatgtcctacagggtctaggacaaatcttctatctcatttggagagatgtcatgctattgttagatcaaaccctggcctttaatgaaaagaatgcagctttagctgcagcccaagagtttggagatacttggtatcttagtcaagtaaatgacagaatgacagctgaagaaaggggcaaaatccctaacggtcagcaagctgtccccagtatggatccccactgggaccttgactcagatcatggggactgcagttgcaaacatctgttgacctgtgttctagaaggactaaggagaattaggaaaaaggaccaagaggaacaggcccaaaaggaaaagcaagatcagagaaagaccgcagctttagtcatggccctcagacaaacaaactttggtggttcagagaggacagaaaatggagcaggccaatcacccgagagggatacattagccaaagctggagctattatctacatgaatatggggaacaagttacccatttgttgtcccctacctgaagagggaataaaccctgaagtctgggcattggaaggacaatttggaaaagcaaaaaatgcccacccagtccaaatcaggctaaaagaccccaccacttttccttatcaaaggcaatatcccttaaggcctgaagctcataaaggattaaaggatattgttaaatatttaaaagctcaagccttagtaaagaaatgcagcagtccctgcaacagcccaattctaggagtacaaaaaccaaacagtcagtggagactagtccaagatcttagactcatcaatgaggcagtaattcctctatatccagttgtacccaacccctatatcctgctctctcaaataccagaggaagcagaatggttcactgttctggacctcaaggatgccttcttctgtattcccccgcactctgactcccagtttctttttgcctttgaggatcccacagaccacatgtcccaacttatgtggacagtcttgccccaagggtttaaggatagccctcatctgtttggtcaggcactggcccaagatctaggttacttctcaagtccaggcactctggtccttcagtacgtggatgatttacttttggctaccagttcagaagcctcgtgccagcaagctactctagatctcttgaactttctagctaatcaagggtacaagcgtttgctgactatggatccccggacacagcgagatagccaggcccctctatactctaatcaaggagagaaccagagagacaaaaagtcaaagaaagaagtacaaagagaggaagagacagacaaagagggagtcagaaagagagaaagagagagacaaaggagaagtcaaagagaaagaaagagagatggaacctcggtgtccactctggctgtgctcgaggagcccttcagcctgccgatgcgctatgggggcccctacctggggctggccaagaccagagctgactccctctgcttgtggggaggtgtggagggagaggcacgggtgggagctggggcttcgtgcagcactcgcaggccagtgcgggttccaggtgagcacaggctcggcaggccctgcactgggcatggccagccagcacctgctgggcttgatcgggggatgtgctccttctgggctgccagagtgcccgggctaggtggtgcaaagtcccacggcgactgccattga

SEQ ID NO: 10560 - DNA, 1779 bp, Homo sapiens; identical to SEQ ID NO: 5306
  SIMILAR (778)..(1236): 751254mologous to Homo sapiens gag,accession number AF156961,Smith-Waterman Score=620.

SEQ ID NO: 10561 - DNA, 1466 bp, Homo sapiens
ctcttagcagagaggagacctggagagggtatcttctctatgcagatggtcctcccgatgtctgcccagccttatggcggcaggctgctctaggtctcttgatctttctagctactcaagggtgcaaggtgtctaattcaaaggcccagttttgcccacagcaggagacccacagagcacatactcttctattagaatgggaaccacaggcagaaacagccttcacaaccttaaagcaggccttattacaagctgcagctttaacccttcccacacgacaaaacttctctttatatgtcacagacagagcagagatagctcttggagtccttattcagacttgtgggacaaccccacaacctgtggcatacctaaccatcgaaaaggggaaggagaggggagaacagcagcataagcagctggcagaggcagcagaaaggaaagagagaaagagacaggaagtcagagaaagagagaaagagaaagagacagagagacagtcaaagaaggaaagagaagaagagacaaagatggagtcagagagaaagagagagacagaaaaagaagtgtccactctggctgcgctcgaggagcccttcagcccacctcagccctctctggggctggctgaggctggagccggctccctcttctcgtggggaggtgtggagggagaggtgcgggggggaggcagggctgcacacagcgctcatcggctggtgcaggttccgggaggccaggtgagggtgcaggttttcgagaatccattgctaaaggccattaaatccgaccttcctcggtcctccctgtggtctgggaggaaaactagtgtttctgctgctgcgttgaaggaaataagaaaagaaatctccaaaggaacacaaatccccctgggctatcggttatgtccccttcaagctgtagggggaggggaatttggcccaaccaagatacatgtccccttctccctctctgatttaaagcagatcaaagcagacctggggaagttttcagatgatcctgataggtacatagatgtcctacagggtctagggaaaacctttgacctcacttggagagatgtcatgctactgttagatcaaaccctggcctttaatgaaaagaatgcggctttagctgcagcctcagagtttggaggtatctggtatcttagtcaagtaaatgatagaatgacagctgaagaaagggaccaattccctactggtcagcaagccatccccagtatggatccccactgggaccttgactcagatcatggggactggagtcataaacatctgttgacttgtgttctagaaggactaaggggaattaggaaaaagcccatgaattattcaatgatgtccaccataattcagggaaaggaagaaaatccttctgccttcctccagcagctatggaagtccttaagaaaatatactcccccgtcatccaaatcactctag

SEQ ID NO: 10562 - DNA, 690 bp, Homo sapiens
  SIMILAR (243)..(584): 421254mologous to Homo sapiens 1-8U,accession number X57352,Smith-Waterman Score=150.
aattcgggggctaaataccgggtaactgttggccagttaaaagcgactagcatggccaccggactaaagacacggaaggaaacaagcaaagaaatctccaaaggactacaaaaacccctgggctattggttatgtccccttcaagctgtagggggaggggaatttggcccaacctgggtacatgtctccttctccctctctgatttaaagcagatcaaggcagacctggggaagttttcagatggtcctgataggtacatagatgtcctacagggtccagggcaaaccttctatctcacttggacagatgtcatgctattgttagatctaaccctggcctttaaagaaaagaatgtagctttagctgaagccctagagtttggagatacctggtatcttagtcaagtaaatgatagaatgacagcaaaagaaaggaacaaattccctaccggtcagcaagccgaccccagtatggatccccactgggacctcgactcagatcagggggactggagtcacaaacatctgttgacctgtgttctagaaggactaaggagaattaggaaaaagcccatgaattattcaatgatgtccaccataactcagggaaaggaagaaaatccttttgccttcctcaagcagctactggaggacttacgaaaatatactcccatcacccaactcacttga

SEQ ID NO: 10563 - DNA, 405 bp, Homo sapiens
  SIMILAR (294)..(1): 661254mologous to multiple sclerosis associated retrovirus polyprotein,accession number AF009668,Smith-Waterman Score=318.
ctgctgtaggcaaagctgggccttcaacctagacaccttgtacccttgattagctagaaagttcaagagatctagagtagctttctggcacaaggcttccaaactggtagctaaaagtaaatcatccacatattgaaggatcagagtgcctggacttgagaagtggcctagatcttgggccagagcctgaccaaacagatgagggctatccctaaacccctgaggcaagaccgtccatgtaagttgggaagtgtggtctgtgggatccaacggtcccaactctgaagagtcaggggttgttagagagccctttcccagaaagcctgacacccgtgtctttagtctggcggccgtgctagtcgcttttaactggccgacaggtgcccggtatttagcccccaaatt

SEQ ID NO: 10564 - DNA, 411 bp, Homo sapiens
  SIMILAR (166)..(357): 731254mologous to multiple sclerosis associated retrovirus polyprotein,accession number AF009668,Smith-Waterman Score=226.
ggactaagaggaatggcccaaaaggaaaagcgagatcagagaaaggccacggccttagtcatggccctcagacaaacaaaccttggtggttcagagaggacagaaaatggagcaggccaatcacccggatcccacagaccacatgtcccaacttatgtggacggcttgccccaagggtttagggatagccctcatctgtttggtcaggcactagcccaagatctaggccacttctcaagtccaggcactctggtccttcagtatgtggatgatttacttttggctaccagttcggaagcctcatgccagcaggctactctagctctcttgaactttctagctaatcaagggtacaagcgtctagatcgaaggcccagctttgcctacagcaggtcaaatatctatgcctaa

SEQ ID NO: 10565 - DNA, 1208 bp, Homo sapiens
  SIMILAR (4)..(591): 821254mologous to Homo sapiens laminin-binding protein,accession number J03799,Smith-Waterman Score=834.
ttctagagcataagtcaacagatgtttgtgactccagtccccatgatctgagttgaggtcccagtggggatccatattggggatggcttgctgaccggtagggaatttgtccctttcttcagctgtcattctatcatttacttgactaagattccaggtatctccaaactcccaggctgcagctaaagccgcattcttttcattaaaggccagggtttgatctaacaatagcatgacatctctccaagtgagactgaaggtttgccctagaccctgtaggacatctatgtacctatcaggatcatctgaaagcttccccaggcctacgctgatctgcagttcctccttgtacttctggtagaatttggctgtgaatccatgctggtgcctggagctctttttggttggtaagctattgattattgccacaatttcagatcctgttattggtctattcagagattcaaattcttcctggtttagtcttgggagagtgtatgtgtcaaggaatttgtccatttcttttagattttctagtttatttgcgtagaggtgtttgtagtattctctgatggtagtttgtatttctgtgggatcggtggtgatatcccctttatcatttgttattgcatctacttgatacttctctctttttttctttattagtcttgctagcggtttgttgatcctttcaaaaaaccagctcctggattcattaattttttgaagggttttttgtgtctctatttccttcagttctgctctgattttagttatttcttgccttctgctagcttttgaatgtgtttgctcttgcttttctagttcttttaattgtgatgttagggtgtcaattttggatctttcctgctttctcttgtgggcatttagtgctataaatttccctctacacactgctttgaatgtgtcccagagattctggtatgttgtgtctttgttctcgttggtttcaaagaacatctttatttctgccttcatttcattatgtacccagtagtcattcaggagcaggttgttcagtttccatgtagttgagcagttttgagtgagtttcttaatcctgagttctagtttgattgcactgtggtctgagacacagtttgttataatttctgttcttttacatttgctgaggagagctttacttccaagtatgtggtcaattttggaataggtgtggtgtggtg

SEQ ID NO: 10566 - DNA, 350 bp, Homo sapiens
  SIMILAR (173)..(277): 821254mologous to Homo sapiens Human secreted protein, SEQ ID NO: 7102,accession number G03021,Smith-Waterman Score=155.
ctactctggtggggacttggagaacctttgtgtggacactctgtatctagctaatctagtggggacgtggagaacctttgtgtctagctcagggattgtaaacgcaccaatcagcgccctgtcaaaacagaccactgggctctctgtaaaatggaccaatcagaaggatgtggctgtaacactcacgggaaaggtctgcagcttcactcctgagccagtgagaccacgaacccaccagaaggaagaaactccgaacacatccggacgtcaggaggaacaaactccggacacgctgcctttaagaactgtaacactcaccgctagggtccacggcttcattcttgaagtca

SEQ ID NO: 10567 - DNA, 405 bp, Homo sapiens
  SIMILAR (14)..(100): 481254mologous to Arabidopsis thaliana F24O1.6,accession number AC003113,Smith-Waterman Score=69.
atgcctgagcctcccaccacctccgtgggatcctgtgcggcccgagcctccccagtgagtgccatcccctgctccacagcacccagtcccatcgaccacccaagggctgaggagtgtgggcgcacggcgtgggactggcaggcagctccacctgcagtcccggtgcgggatccactgggtgaagccagctgggctcctgagtctgggtttgtgaatgcaccaatcaacactgtatctagctactctggtggggacttggagaacctttgtgtcgacactctgtatctagctaatctagtggggacgtggagaacctttgtgtctagctcagggattgtaaacacaccaatcagcgccctgtcaaaacagaccactgggctataccaatcagcaggatgtgggtga

SEQ ID NO: 10568 - DNA, 1704 bp, Homo sapiens
  SIMILAR (625)..(26): 681254mologous to Homo sapiens gag,accession number AF156961,Smith-Waterman Score=692.
tttgttcagggccaagggctcgcttttggagctttctcctgatatctcagctgattgggtaataaacatcttttaggatcaattgaccctcgagggagttgggtgacaggggagtatattttcttaaggcctcccatagctgcttgaggaaggcagtaggattttcttcctttccctgagttatggtggacatcattgaataattcatgggctttttcctaattctccttagtccttctggaatacaggtcaacagatgtttgcgactccagttcccatgatctgagtctaggtcccagtggggatccataatggggatggcttgctgcccattagggaatttgtccctttcttcggctgtcattttgtcatttacttgactaagataccaggtatctccaaattctcgggctgcagctaaagctgcattcttttcattaaaggccagggtttgatctaacaatagcatgacatctctccaagtgaggtcgaaggtttgccctggaccctgtaggacatctatatacctaccaggatcatctgaaaactttcccaggtctaccttgatctgctttagaatgccagcaatacaccctgaactcggagaaaacataatctttaccctcaaaaagctcacagtctggtgctcagttgaccaaacatcgtgtttcttttctaccgagttgcaggtctataagttgtccttttaattcccagccacctctggcctctgcttaccatggccctgccttctgacttgctgtttgctcagctccttagtgcatgggaagagcagaaacatcaggggaagagcgctgagatctgctgtgcacctgtgccgcacagcccttcccatgtagacatgtgtagcttttgggtttgccagtggatggaacttatccgcatcaagtagccttcataaatagattatccaccatttccatcactctctggataccctcacatgtttaccaccaaaactcctgcgcagagactggtcctcttttgcaaactgcctttggctcccccgcgaagagtagttttccacttagaaccagccaactctctataaaatttacctccgtgattctaattttgctccctccgccgtgggcaagttggcaatgtctgaatgtctgaagtcatttttgcttgtcacgactggggaggacagcacaagatgtcaacagtgccaaggctgagaaaccctggtttaccttaaccttaaaagaacaattcgaatgcttgggaagggatgtctgccacatctgtactggagagaagcatggcccccagtcaaggacatggagagttccatgtctggatctagaccgtgtccatccacaaagatgcctcctgctcttctccgacatgaaaattggtccaatcaacattttcctttggccagggtagcttaccagcagctcctccataaggtccataattgcaatttctcattctcatttgcctggctggcttcacccttctgtcctctctgcaccttcccacaagtgaccgaatgtttgtgcacgcaggctccattcatgcgcatgcacacacccggcttgtgtccttcttccctctcgtcccttgaacccgtagctcttgattctgcctgtaggagcaatgatgttgtagcaaccatgacaaaagaaacaaaatcagaaggcagatccaggccgctccctgccacctgccctctgt

SEQ ID NO: 10569 - DNA, 494 bp, Homo sapiens
  SIMILAR (363)..(494): 771254mologous to Human endogenous retrovirus W polyprotein,accession number AB021921,Smith-Waterman Score=173.
gaggaaaactatgtttctgctgctgcatcggtgagtgtaactattctgaccagcagggtccagggactgttgcgggttcttgggcaagaggtatttctgctgctgtgtcagtgagtgcaactattctgatcagcagggtccagggaccattgcatgttcttgggcaagaggtgtttctgctgctgcgtcgacaaacaaaccttgctggttcagagaggacagaaaatggagcaggccaatcacctggtggggcttgttatcagtgtggtttgcaaggacactttacaaaagattgtccaatgagaaacaagctgccccctcgcccatgtccactataccaaggaaatcactggaaggatggggaaccaatcgagcatgactgccaacaaattatagtccagacttctgctgctcgagaggatcttttagaagtccccttagctaatcctgaccttaacctatataccgatggaagttcatttgtggagaatggg

SEQ ID NO: 10570 - DNA, 691 bp, Homo sapiens
  SIMILAR (56)..(688): 691254mologous to multiple sclerosis associated retrovirus polyprotein,accession number AF009668,Smith-Waterman Score=748.
acgactgtcctcaaggtccgttaccatccggggaatcctgggacagtctgtaaccaggcctgaagctcataaaggattacaagatattgttaaacatttaaaagctcaaggcttagtaaggaaatgcagcagtgactgcaacaccccaattctaggagtacaaaaactgaatggtcagtggagactagtgcaagatcttggactcatcaataaggcaataattcctctatatccagttgtacccaacccctataccctgctctctcaaatatcagaggaagcagaatggttcactgttctggacctcaaggatgccttcttctgtattcccctgcactctgactcccagtttctctttgcctgtgaggaccccacagaccacacatcccaacttacacagacgatcttgccccacgggtttagggatagcccttacctgtttggtcaggcactggcccaagatctaggccacttctcaagttcaggcactctggcccttcagtatgtggatgatttacctttggctaccagtttggaagcctcatgccaacaggctactctagatctcttgaactttctagctaatcaagggtacaaggcatctaggtcaaaggcccagctttgcctacagcaggtcgaatatctaggcttaatcttagccagaggggccagggccctcagcaaggaatga

SEQ ID NO: 10571 - DNA, 458 bp, Homo sapiens
  SIMILAR (220)..(2): 601254mologous to Homo sapiens gag,accession number AF156961,Smith-Waterman Score=228.
cagtagggaatttgtccctttgttcagctgtcattctatcatttactggacgatgataccaggtatctccaaactcttgggctgcagctaaagccacattattttcattaaaggccagggtttgatctaacaatagcatgacatctctccaagtgagatgtaggacatctatgtacctatcaggatcatctgaaaactttcccaggtctacctggatctgcgatgcggtagcagaaacacctcttgcccaagaacctgcaacggtccctggaccctgatgatcagaatggttgcactcaccaatgcagcaatagaaacacctcttgcccaagaacccacaatggccttggaccctgttgataggaatagttgcgctcactgatgcagcagcagaaacacctgttgcccaagagctcacaacagtctctgtaccctgctgataggaatagttgcgctca

SEQ ID NO: 10572 - DNA, 546 bp, Homo sapiens
  SIMILAR (379)..(480): 671254mologous to Homo sapiens protease,accession number AF156962,Smith-Waterman Score=120.
atgaaggaacaaactctggacacaccatctttaagagctgtaacactcaccgcggaggtctgcggcttcattcttgaagtcagtgagaccaagaacccaccggaaggaataaattccaggcacattttggtgaccacaaagggactttcgcctattgccaagcagtaccaagaggaacaggccaaaaaggaaaagcaagatcagagaaaggccacagccttagtcatgaccctcagacagacaaaccttggtggttcagagaggacagaaaatagagcaggccaatcacctggtagggcttgttaccagtgtggtttggaaggacaccttaaaaaagattgtccatggtatggctttctcaatgttaatctcctgtcccgacagctgtcctcaaggtctattaccatccaaggaattctgggacgggctgtaaccaggtatttctcccacctcctcagttgtaattgggagactttgctacagatagatcaaggccatcaagctacagatggtcttacaaatggaaccccaaatgagctcaactaa

SEQ ID NO: 10573 - DNA, 669 bp, Homo sapiens
  SIMILAR (280)..(528): 611254mologous to multiple sclerosis associated retrovirus polyprotein,accession number AF009668,Smith-Waterman Score=243.
atgatccaacaactggactcagggtgcccaggtcaagcgccagctcatgtcatcaccctcactgagccccgggtatgtttaaccattgagggccaggaaattcacttcctcctggacactggtatggccttctcagtactaatctcctgtcctggacaactgtcttcaaggtccgttaccatccgaggaatcctgggacagcctgtaaacaggatcccacagaccacacatcccaacttacgtggaccatcttgccccaagggtttagggatagccctcatgtttggtcaggcactggcccaagatctaggtctcttctcaagtccaggcactctggtccttcagtatgtggatgatttacttttggctaccagtttggaagcctcatgccagcaggctactctagatctcttgaactttctagctaatcaagtgtacaaggtgtctaggttgaaggcccagctttgcctacagcaggtcaaatatctaggcctaattttagccagaggaaccagggccctccaggatggggaaccaattgagcatgactgccaacaaattatagtccagacttatgctgcccgagatgatctcttggaagtccccttagctaatcctgaccttaacctatataacgatggaagttcatttgtggagaatgggatatga

SEQ ID NO: 10574 - DNA, 675 bp, Homo sapiens
  SIMILAR (465)..(283): 621254mologous to multiple sclerosis associated retrovirus element gag polyprotein,accession number AF123881,Smith-Waterman Score=193.
ctactgctgcaccaagtcattttggtgatactcaacaatattgtccatatcccattttcctggttccttcagctctgattttgaagaactttcttccatagggatgtagtctacctgaggtgacatctgccaccacttggggctgacacctgtgggttcacactcactgctaagctgctccagatgacaagtggcctgagtaggagctgtcactgctgccacaattggaactggcattctgctacagcaattggcatttcttgtctgcaattggctgcttctatcaggatcatctgaaaacttccccaggtctgccttgatctgctttaaatcagagagggagaaggggacatgtatccaggttgggccaaattcccctccccctacagcttgcaagggacataactgatagcctgggggtttttgtggtcctttggagatttctttgcttgtttccttcataatgtagaatccgtgggagccctgagcttgttttcctgcaactagacagtcccatctatccagcaggaagtagctagagtggtcatcagccaaattcccaacagcagttggggtgtccttgctactttcttctgtgtgtagatcccagtgattcttgatggatgctatgtcccggatggacttagtcagatatacttctgcaagagtttccat

SEQ ID NO: 10575 - DNA, 482 bp, Homo sapiens
  SIMILAR (284)..(364): 511254mologous to Homo sapiens Human secreted protein encoded from gene 14,accession number Y25724,Smith-Waterman Score=46.
ctctatctagctactctggtggggacttggagaaactttatgtctagctaagagattgtaaatacactaatcagcactctgtgtctagctcaaggtttgtaaacataccaatcagcaccctgtgtctaactcagggtttgtgaatgcacccaatggacactctgtatctagctactctgggtggggacttggagaacctttgtgtccacactctgtatctagctaatctagtggggatgtggagaacctttgtgtctagctcagggatcgtaaacgcaccaatcagcaccctgtcaaaacagaccacttgactctctgtaaaatggaccaatcagcaggatgtgggtggggcgagacaagagaataaaagcaggctgcctgagccagcagtgacaacccccctcgggtcccctcccacgccgtggaagctttgttctttcgctctttgcaataaatcttgctactgcccaaaaaaaaaaaaa

SEQ ID NO: 10576 - DNA, 2334 bp, Homo sapiens
  SIMILAR (1075)..(1821): 751254mologous to multiple sclerosis associated retrovirus polyprotein,accession number AF009668,Smith-Waterman Score=989.
atgggctgctttgtaattcacacaaaggcactgtgtgagctagccttgctcagaagggcagctcagcagctcattgaagtgttccctgaattcctgccaagaggacctatcagcttacccccatatcctagcctccctatagctccccgtcctattaacgataatcctcctctaatctcccctgcccagaaggaaatatgcgaagaaatctccaaaggacaacaaaaacccctgggctatcggttatgtccccttcaagctgtagggggaggggaatttggcccaacctgggtacatgtccccttctccctctctgatttaaagcagatcaaggcagacctggggaatttttcagatgatcctgataggtacataaatgtcctacagggtctaggacaaatcttctatctcatttggagagatgtcatgctattgttagatcaaaccctggcctttaatgaaaagaatgcagctttagctgcagcccaagagtttggagatacttggtatcttagtcaagtaaatgacagaatgacagctgaagaaaggggcaaaatccctaacggtcagcaagctgtccccagtatggatccccactgggaccttgactcagatcatggggactgcagttgcaaacatctgttgacctgtgttctagaaggactaaggagaattaggaaaaagtacatgaattattcaatgatgtccaccataactcagggaaaggaagaaaatccttctgcctccctcgagcggctatgggaggccttaagaaaatatactcccctgtcaaccaaatcacttgagggtcaattgattctaaaagataagtttattacccaatcagccacagatatcaggagaaagttccaaaagcaagccctgggccctaaacaaaatttggagacattattaaacctggcaacctcagtattctataacagggaccaagaggaacaggcccaaaaggaaaagcaagatcagagaaagaccgcagccttagtcatggccctcagacaaacaaaccttggtggttcagagaggacagaaaatggagcaggccaatcacccgagagggatacattagccaaagctggagctattatctacatgaatatggggaacaagttacccatttgttgtcccctacctgaagagggaataaaccctgaagtctgggcattggaaggacaatttggaaaagcaaaaaatgcccacccagtccaaatcaggctaaaagaccccaccacttttccttatcaaaggcaatatcccttaaggcctgaagctcataaaggattaaaggatattgttaaatatttaaaagctcaagccttagtaaagaaatgcagcagtccctgcaacagcccaattctaggagtacaaaaaccaaacagtcagtggagactagtccaagatcttagactcatcaatgaggcagtaattcctctatatccagttgtacccaacccctatatcctgctctctcaaataccagaggaagcagaatggttcactgttctggacctcaaggatgccttcttctgtattcccccgcactctgactcccagtttctttttgcctttgaggatcccacagaccacatgtcccaacttatgtggacagtcttgccccaagggtttaaggatagccctcatctgtttggtcaggcactggcccaagatctaggttacttctcaagtccaggcactctggtccttcagtacgtggatgatttacttttggctaccagttcagaagcctcgtgccagcaagctactctagatctcttgaactttctagctaatcaagggtacaagcgtttgctgactatggatccccggacacagcgagatagccaggcccctctatactctaatcaaggagagaaccagagagacaaaaagtcaaagaaagaagtacaaagagaggaagagacagacaaagagggagtcagaaagagagaaagagagagacaaaggagaagtcaaagagaaagaaagagagatggaacctcggtgtccactctggctgtgctcgaggagcccttcagcctgccgatgcgctatgggggcccctacctggggctggccaagaccagagctgactccctctgcttgtggggaggtgtggagggagaggcacgggtgggagctggggcttcgtgcagcactcgcaggccagtgcgggttccaggtgagcacaggctcggcaggccctgcactgggcatggccagccagcacctgctgggcttgatcgggggatgtgctccttctgggctgccagagtgcccgggctaggtggtgcaaagtcccacggcgactgccattga

SEQ ID NO: 10577 - DNA, 1353 bp, Homo sapiens
  SIMILAR (103)..(714): 651254mologous to Homo sapiens gag,accession number AF156961,Smith-Waterman Score=701.
atgcaagaaaaacaccatgggaacacagacgcagagactgaactgaggcaagctagagaacaccaaggactgccagcccgcatagaagacaggagcagaaggaaacaagcaaagaaatctccaaaggaccacaaaaaaccccagctatcggttatgtctccttcaagctgtagggtaggggaacttggcccaacctggatacacatccccttcaccctctctgatttcaagcagatcaaggtagaactggggaagttttcagatgatcctggtaggtatatagatgtcctacagggtctagggcaaactttcaacctcgattggagagatgtcatgctattgttaggtcaaacactggcctttaatgaaaagaatgtggctttagctgcagcccgagagtttggagatacctggtatcttagtcaggtaaatgatagaatgacagccaaagaaagggaaaaattccctacaggtcagcaagccatccccagtatggatccctgctgggacctcgactcagatcatggggactggagatgcaaacatctgttgacctgtgttctagaaggactaaggagaattaggaaaaagcccatgaattattcattgatgtccaccataactcagggaaaggaagaaaatccttctgccttccctgagcagctacaggaggccttaagaaaatatactcccttgtcacctgactccctcaaagcctgggccacagagcaagattccatctcaaaaaaaagaaaaagattgtccaatgaaaaacaagctgccctctcacccatgtccactatgccgaggcaatcactggaaggcacagtgccccagaggacaaaggttctctgggccagaagcccccaaccagatgatccaacaacaggacagagggtgcccggggcaagcgccagctcatgtcatcaccctcactgagccccgggtacgtttaaccattgagggccaggaaactgacttcctcctggacactggcgcggccttctcagtgttaatctcctgtcttggacgactgtcctcaaggtctgttaccatccgatgaatcctgggacagcctgtaaccaggtatttctcccacctctcagttgtaattgggagactttgctcttttcacatgcctttcttattatgcctgaaagttccacacccttattaggcagggacatattagccaaggctggagctattatctacatcaatatggggaacaagttacccatttgttgtccccctacttgtggagggaatcaaccctgaagtctgggcattggaaggacaatttggaagggcaaaaaatgcccgcccattacaaatcaggttaaaagatcccac

SEQ ID NO: 10578 - DNA, 1997 bp, Homo sapiens
  SIMILAR (1272)..(1988): 741254mologous to multiple sclerosis associated retrovirus polyprotein,accession number AF009668,Smith-Waterman Score=939.
attggttgtcattatttattttatttttatttatttatttatttttagagacacggtctgactttgttaccccggctggagtgcagtggtgcaatcatggctcactgcagccttaacctcctgggctcaagtgatcctctcgccaaggctaggataagtagctaggactacagatgcgccccatcacgcccagctaattttacaacttctgtagagatggagtgttgctgggttgcccaggctggtcttgaattcctgggctcaagcgatcctcctgtgtccggaatttggtgggttcttggtctcactgacttccagaatgaagccgcggaccctcgcggtgagtgttacagttcttaaagacagcgtgtccagagtttgttccttctgatgttcagatgtgttcagagtttcttccttctggtgggttcgtggtctcgctgacttcaggagtgaagctgcagaccttcacgctagacacaaaagttctccatgtccccttctccctctctgatttaaagcagatcaaggcagacctggggaagttttcagatgatcctgataggtacaaagatgtcctacagggtctagggcaaacattcgatctcgcttggagagatgtcatgctattgttagatcaaatcctagcctttattgaaaagaatgcagctttagctgcagcccgagagtttggagatacctggtatcttagtcaagtaaatgatagaatgacagccaaagaaagggacaaattccttactggtcagcaagccatccccactatggatccccactgggactttgactcagatcatggggactggagtcataaacatctgttgacctgtgttcttgaaggactaaagggaattaggaaaaagcccatgaattattcaatgatgtccactataactcagggacaagaagaaaagccttctgccttcctcgagcggctaagagaggccttaagaaaatatactcccctgtcacccgaatcactcgagggtcaattgattctaaaagataagtttattacccagtcagctgcagatatcaggagacagctccaaaagcaagccctgggccctgaacaaaatctgcaggaattattaaacctggcaaccttggtgttctataacagggaccaagaggaacaggcccaaaaggaaaagcgagatcagagaaaggctgcagccttagtcagggccctcagacaaacaaaccttggtggttcagagaggacagaatatggagcaggccaatcacccaggagggatatattagccaaagctggagctattatctacatgaatatggggaacaagttacccatttgttgtcccctacttgaggagggaatcaaccctgaagtgtgggcattggaaagacaatttggaagggcaaaaaatgcccgcccagtccaaatcaggctaaaagaccccaccacttttccttatcaaaggcaatatcccttaaggcttgaagctcataaagcattacaggatattgtaaaacatttaaaacctcaaggcttagtaaggaaatgcagcagtccctgcaacaccccagttctaggagtacaaaaaccaaatggtcagtggagattagtgcaagatcttagactcatcaatgaggcagtaattcctgtatatctagttgtagcaaacccctataccctgctctctcaaataccagaggaagcagaatggtttatggttctggacctcaaggatgccttcttctgtattcccctgcactctggctcccagtttctctttgcctttgaggatcccacagaccacatgtcccaacttatgtggatggtcttgccccaagggtttagggatagccctcatctgtttggtgaggcactggcccaagatctaggccacttctcaagtccaggcactctggtccttcagtatatggatgatttacttttggctaccagttgggaagcctcatgccagcaggctactcttgaactttctagctaa

SEQ ID NO: 10579 - DNA, 1110 bp, Homo sapiens
  SIMILAR (172)..(867): 741254mologous to multiple sclerosis associated retrovirus polyprotein,accession number AF009668,Smith-Waterman Score=884.
atgtttcggaaggatgaagaactgacttcctcacagagggatttagctgtaaggaactgggcatggagcctagcccgtggtgagcgctcagcaaacatgcacgcagtacacacctcgcttctagtggaaaggacaatactgaccacgaccaaggaaagagggtctaccttgcaatatcccttaagacctggagctcataaaggattgcaagatattgttaaacgtttcaaagctcaagccttaataaggaaatgcagcagtccctgcaacaccccaattctaggagtacaaaaaccgaatggtcagtggagactagtgcaagatcttagacttatcaatgaggcagtaattcctctatatccagttgtacccaacccctataacctgctctctcaaataccagaggaagcagaatggttcactgttctggacctcaaggatgccttcttctgtattcccctgcactctgactcccagtttctctttgcctttgaggatcccacagaccacacgtcccaacttacgtggacggtcttgcccccagggtttagggatagccctcccctgtttggtcaggcactggcccaagatctaggccacttctcaagtccaggcactctggtccttcagtatgtggatgatttacttttggccaccagttcagaagcctcttgccagcaggctactctagatctcttgaactttctagctaatcaagggtacaagacatctaaattgaaggcctacctctgcctacaacaagtcaaatatctagacctaatcttagccagaggaactagagccctcagcaaagaacaaattcagcctatactggtttatcctccccctaagacattaaaacaattggattttgccgatttcggaaccaccatcaaacaggattttcgcctgctggggcaaaccagcgtggaccgcttgctgcaactctctcagggccaggcggtgaagggcaatcagctgttgcccgtctcactggtgaaaagaaaaaccaccctggcgcccaatacgcaaaccgcctctccccgcgcgttggccgattcattaatgcagctggcacgacaggtttcccgactggaaagcgggcagtga

SEQ ID NO: 10580 - DNA, 5173 bp, Homo sapiens
  SIMILAR (755)..(3094): 971254mologous to Homo sapiens putative p150,accession number U93563,Smith-Waterman Score=3968.
cgaaggtctgcagcttcactcctgagccagcaagaccacgaaccaaccagaaggaagaaactccgaacacatctgaacatcagaaggaacaaactccggacacgccgcctttaagaactgtaacactcaccgggagggtccgcagcttcattcttgaagtcaaccgatcaaccagagagaaggttaacaaggaaatccaggacttgaactcagctccgcaacaagcgggcctaatagacatctacagaactctccaccccaaatctacagaatatacattcttctcagcaccacatcacacttattctaaaattgaccacataattggaagtaaagcactactcagcaaatgtaaaagaacagaaattacaaaaaactgtctctcagaccacaatgcaatcaaattagaactcaggattaagaaactcactcaaaactgctcaactaaatggaaactgaacaacctactcctgaatgactactgggtacataatgaaatgaaggcagaaataaagatgttctttgaaaccaacgagaacaaagacacaacataccagaatctctgggacacatttaaagcactgtgtagagggaaatttatagcactaaatgcacacaagagaaagcaggaaagatctaaaatcgacaccctaacatcacaattaaaagaactagagaagcaagagcaaacaaattcaaaagctagcagaagacaagaaataactaagatcagaggagaactgaaggagatagagacacacaaaaaacccttcaaaaaatcaatgaatccagaagttggttttttgaaaggatcaacaaaattgatagaccgctagccagactaataaagaaaaaaagagagaagaatcaaatagacacaataaaaaatgataaaggggatatcaccaccgatcccacagaaatacaaactaccatcagagaatactacaaacacctctacacaaataaactagaaaatctagaagaaatggatacattcctcgacacatacactctcccaagactaaaccaggaagaagttgaatctctgaatagaccaataacaggctctgaaattgtggcaataaccaatagcttaccaaccaaaaagagtccaggaccagaaggattcacagccgaattctaccagaggtacaaggaggaattggtaccattccttctgaaactattccaatcaatagaaaaagagggaatcctccctaactcattttatgaagccagcatcattctgataccaaagccgggcagagacacaaccaaaaaagagaattttagaccaatatccttgataaacattgatgcaaaaatcctcaataaaatactggcaaaccgaatccagcagcacatccaaaagcttatccaccatgatcaagtgggcttcatccctgggatgcaaggctggttcaatatacgcaaatcaataaatgtaatccagcatataaacagagccaaagacaaaaaccacatgattatctcaatagatgcagaaaaagcctttgacaaaattcaacaacgcttcatgctaaaaactctcaataaattaggtattgatgggacgtatttcaaaataataagagctatctatgacaaacccacagccaatatcatactgaatgggcaaaaactggaagcattccctttcaaaactggcacaagacagggatgccctctctcaccactcctattcaacatagtgttggaagttctggccagggcaatcaggcaggagaaggaaataaagggtattcaattaggaaaagaggaagtcaaattgtccctgtttgcagacgacatgattgtttatctagaaaaccccatcgtctcagcccaaaatctccttaagctgataagcaacttcagcaaagtctcaggatacaaaatcaatgtacaaaaatcacaagcattcttatacaccaacaacagacaaacagagagccaaatcatgagtgaactcccattcacaattgcttcaaagagaataaaatacctaggaatccaatttacaagggatgtgaaggacctcttcaaggagaactacaaaccactgctcaaggaaataaaagaggacacaaacaaatggaagaacattccatgctcacgggtaggaagaatcaatatcgtgaaaatggccatactgcccaaggtaatttacagattcaatgccatccccatcaagctaccaatgactttcttcacagaattggaaaaaactactttaaagttcatatggaaccaaaatagagcccgcatcgccaagtcaatcctaagccaaaagaacaaagctggaggcatcacactacctgacttcaaactatactacaaggctacagtaaccaaaacagcatggtactggtaccaaaacagagatatagatcaatggaacagaacagagccctcagaaataatgccgcatatctacaactgtctgatctttgacaaacctgagaaaaacaagcaatggggaaaggattccctatttaacaaatggtgctgggaaaactggctagccatatgtagaaagctgaaactggatcccttccttacaccttataccaaaatcaattcaagatggattaaagatttaaacgttagacctaaaaccataaaaaccctagaagaaaacctaggcattaccattcaggacataggcgtgggcaaggacttcatgtccaaaacaccaaaagcaatggcaacaaaagccaaaattgacaaatgggatctaattaaactaaagagcttctgcacagcaaaagaaactaccatcagagtgaacaggcaacctacaacatgggagaaaattttcgcaacctactcatctgacaaagggctaatatccagaatctacaatgaactcaaacaaatttacaagaaaaaaacaaataaccccatcaaaacgtgggcgaaggacatgaacagacacttctcaaaagaagacatttatgcagccaaaaaacacatgaagaaatgctcatcatcactggccatcagagaaatgcaaatcaaaaccactatgagatatcatctcacaccagttagaatggcaatcattaaaaagtcaggaaacaacaggtggaatattggtggacttgtccccaagttaaattatgatttaaagagacacttagaaaaagaggaaaagcctactaaaactgagcaggctatcagcaaagacaaaaatgcagagaagaacaaccgtttatctcttcagggagaaattattattgcaattatattgataacagaacctgggttgaaagggagaggaatcccaattttcataattgaagatggaggaacaagttatgtggttgctctgcagatactatgcaaattagttgaactaactcagaaaccagttgatcagccctttgattacatttgtggtgtgagcacagctttactcctgaagtcagcaagaccacgaacccactggaaggaagaagctccagacacatctgaacatctgaaggaacaaactccggacacaccatctttaagaactgtaacactcactgctagagtctgcggcttcattcttgaagtcagcgagaccaagaactcaccggaaggaaccaattccggacatattttgacatcccagatgggactatcacctattgccaagcggagggaaactagtgcttctgctgctgcgttggtgagtgcaactattccaatctgcagggtccagggaccattgcgggttcttgggcaagaggtgtttctgctgctgcttcgccttcctacagctccccttcctattaatgataagcctcctctaatctcccctgcccagaaggaaacaagcaaagaaatctccaaaggaccacaaaaacccctgggctatcggttatgtccccttcaagcagtagggggaggggaatttggcctaacccgggtacatgtccccttctccctctatgatttaaagcagatcaaggcagacttggggaagttttcagatgatcctgataggtacatagatgtcctacagggtctagggcaaactttctatctcacttggagagatgtcatgctattgttagatcaaaccctggcctttaatgaaaagaacgcagctttagctgcagcccgagagtttggagatatctgggaccaaggggaacagtccaaaaaggaaaagcaagatcagagaaagaccgtagccttagtcatggccctcagacaaataaaccttggtggttcagagaggacagaaaatggagcaggtcaatcagccgggtttagggatagccctcaactgtttggtcaggcactggcccaagatctaggccacttctcaagtccaggcactcttgtccttcaatatgtggatgatttacttttggctaccagtttggaagcctcatgccagcaggctactctagatctcttgaactttctagctaatcaagggtacaaggtgtctaggtcgaaggcccagctttgcctacagcaggtcaaatatctaggcctaatcttagccagagggaccagtgcccagttagcagaactactggcacttaccctagccttagaactgggaaatggaaaaagaataaatgtgtatacagatagcaagtatgcttatctaatcctgcatgatcatgctgcaatatggaaagaaagggcgttcttaacctctgggggaacccccattaaataccacaaggaaattatggagttattgcacacagtgcaaaaacccaaggaagtggcagtcttacactgccaaagccatcaacaagctcaaggctctgtggctctacaatcagcagatggaaaaggcagccaggcttttgtcattttcttcaagtcagcaggttccctctggccaaagatatgttcagaaatgccatccaggatccatggcctggaaatggaagccttcagaatccacttggtgctctattccactgtggctgaggtggaacccaaaaaacaagacaaaattcttctcactattcccacccatttttataagcacatgagtctctctccacgaccaccactggcccaggcccacagaatggagcttcctgagagtcgaactgcagtgattgtttttgctcttctggatctagccacccagtggagctaccgagctctgggctggtactggggactgtctgcaaagagtcctgtgatgtaa

SEQ ID NO: 10581 - DNA, 2049 bp, Homo sapiens
  SIMILAR (1576)..(2034): 721254mologous to Homo sapiens gag,accession number AF156961,Smith-Waterman Score=614.
atgcaggactgggcggcggccaaagcggatcggacagtgctccgagaacgggtgcgcatagaaattgcatcaacgcatatagcgctacagcacgccatagtgactggcgatgctgtcggaatggacgatatcccgcaagaggcccggcagtaccggcataaccaagcctatgcctacagcatccagggtgacggtgccgaggatgacgatgagcgcattgttagatttcatacacggtcccaggagaaaaaggaagaagctatcaccttactgaaggattccatcaaatatggtccagagtttgcagatgcatattcaagcttagcttcgttattggctgagcaggcccctgaaggcctttgtccgttgtcgtcaggactaggtcggtctcgcccaatggcgacagagtggtcacccgggaaccggatctgcgcggctccgtggcctaaagaggtggccgagcctgcttgcgtccctaggccgccttcccgggccctccacgccttaatggcctccgccgcgcggcgttcaagcggccgccatactttccggcccaccacgcccggcgccgcccaaaggcgctgcgtcccagcgactctgcgggggtttcgtcgaggcccggcaggcttgggtcgggagacgcggcggccggcggggtcccgtcggggagacgcagccgccgccatcagtcatccagccgccctcccgcggggcagggctcgggaccagcagcccgccatgcctgagcctcccaccccctccgtgggctcctgtgcggcccgagcctcccagattagcgcggccccctgctccacggcgcccagtcccatcgaccacccaagggctgaggagtgccggcgcaccgtgtgggactggcaggcagctccacctgcagcccaggtgcgggatccattgggtgaagccagctgggctcctgagtctggtggagatgtggagaacctttatgtcttgctcagggattgtaaatacaccagtcagcaccctgtgtctagctcagggtctgtgaatgcaccaatcgacactctgtatctagctactctgctcagggattgtaaatacaccaatcggcactctgtatctagctcaaggtttgtaaacacaccaatcagcaccgtgtctagctcagagtttgcgaatgcaccaatcgacactctgcatctagctactctgaaggaagaaactccgaacacatctgaacatcagaaggaacaaactccggacatgccgcctttaagaactgtaacagtcacggcgagggtccgcggcttcattcttgacgtcagtgagaccaagaacccaccaattccagacacattttggcgacccagatgggaccttcgccaatcaccaagcagaggacaggcaagggtgcaggttttcgagaatgcgtcggtaaggaccgctaaatctgactttccttggtcctccatgtggtctgggaggaaaactagtgtttctgctgctgcgttggtgagcgcaactattccgatcagcagggcccatggacgattgattgtgggttcttgggcaagaggggtttctgctgctgcgtcgcagataaaggtagacctggggaagttttcagatgatcctgataggtatatagatgtcctacagggtgtagggcaaaccttcaatctctcttggagagatgtcatgctattgttagatcaaaccctggcttttaatgaaaagaatgcggctttagctgcagcccaagagtttggagatacctggcatcttagtcaagtaaatgatagaatgacagctgaagaaagggacaaattccctaccagtcagcaagccatccccagtatggagccccactgggatctcgactcagatcatggggactggagtcacaaacatctgttgacctgtgttctacaaggactaaggagaactgggaaaaagcccatgaattattcagtgatgcccaccataactcagggaaaggaagaaaatccttccaccttcctcgagcggccatgggaggccttaagaaaatatactccccaaatcacttga

SEQ ID NO: 10582 - DNA, 2022 bp, Homo sapiens
atgaatgctcatccggagttccgtatggcaatgaaagacggtgagctggtgatatgggatagtgttcacccttgttacaccgttttccatgagcaaactgaaacgttttcatcgctctggagtgaataccacgacgatttccggcagtttctacacatatattcgcaagatgtggcgtgttacggtgaaaacctggcctatttccctaaagggtttattgagaatatgtttttcgtctcagccaatccctgggtgagtttcaccagttttgatttaaacgtggccaatatggacaacttcttcgcccccgttttcaccatgggcaaatattatacgcaaggcgacaaggtgctgatgccgctggcgattcaggttcatcatgccgtttgtgatggcttccatgtcggcagaatgcttaatgaattacaacagtactgcgatgagtggcagggcggggcgcaatatcccttaaggcctgaagctcataaaggaatacaggatattgttaaatatttaaaagctcaaggcttaggaaggaaatgcagcagtccctgcaacaccccaattctaggagtacaaaagctgaatggtcaatggagactagtgcaagatcttagactcatcaatggggattcttctagagctcgaaactgcaggctatgcaagctatgtttgcagaaaacagcatgtcttcagtttacagccccacacaggaagctgagtactggctaccgcatggaattctgcaacctgcagactgcttctttgaggcagcaagtacatcaaggagtatgtggccaagggaagctggctctctaccaccttcttactacatggaatatggattttgccgatttcggaaccaccatcaaacaggattttcgcctgctggggcaaaccagcgtggaccgcttgctgcaactctctcagggccaggcggtgaagggcaatcagctgttgcccgtctcactggtgaaaagaaaaaccaccctggcgcccaatacgcaaaccgcctctccccgcgcgttggccgattcattaatgcagctggcacgacaggtttcccgactggaaagcgggcatctggaccacgggtcccactcgtatcgtcggtctgataatagtctggacccacgatcccactcgtgttgtcggtctgatatcggtctgggaccacggtcccacttgtattgtcgatcagactatcagcgtgagactacgattccatcaatgcctgtcaagggcaatcaggcaccgtgtatgaaatctaacaatgcgctcatcgtcatcctcggcaccgtcaccctggatgctgtaggcataggcttggttatgccggtactgccgggcctcttgcgggatatcgtccattccgacagcatcgccagtcactatggcgtgctgctagcgctatatgcgttgatgcaatttctatgcgcacccgttctcggagcactgtccgaccgctttggccgccgcccagtcctgctcgcttcgctacttggagccactatcgactacgagatcatggcgaccacaccctcctgggaggatgaggaaccaatcgagcatgacagccaacaaattatagtccagacttatgccacccgagatgatctcttagaagtccccttagctaatcctgaccttaacctatatgccgatggaagttcatttgtggagaatgggatacgaagggcaggttatgccatagttagtgatgtaactgtacttgaaaactctttggcagcagtgactctccaaaaccgccaaggcctagacctcctcactgctgagaaaggaggactctgcaccttctcagggaaagagtgttgtttttacactaaccagtcagggataagttcccctctggaggacactacaactgcagggccctttcttcaccccatccagcaggaagtagctagagctatcatcggccaattcccaacagcatttggggtgtcctgtttagaggggagattgagaggtgaagccagctggacttcctgggtcgagtag

SEQ ID NO: 10583 - DNA, 2166 bp, Homo sapiens
  SIMILAR (452)..(276): 321254mologous to Homo sapiens Human prostate cancer- associated protein 83,accession number Y48297,Smith-Waterman Score= 74.
ctaggagcttggaagaaagctgcgcccagccagtcttcggggaggagctgcattacacacaggcttcggaggcttccgtggagaagcttggaggtaatggctgtcgtaaatgctagttattttcagagagttctcgaagatttggaataaaggtgagaaaagaagagagtgctgcttaggaataacgggaaaggagtgtcgttctgtgagggtcgttgtttcggggatggcttgctgaccagtagggaatttgtccctttcttcagctgtcattctatcatttacttgactaagataccagatatcttcaaactcttgggctgcagctaaaactgcattgttttcattaaaggccagggtttgatctaacaatagcatgacatctctccaagtgagatcaaaggtttgctctaggctgtgtaggacatctatatacctatcgggattgtctgaaaacttccccaggtctgccttgatctgctttaaatcagagagggagaaggggacatgtacccaggttgggccaaattcccttccccctacagcttgaaggggacataaccgatagcccaggggtttttgtggtcccttggagatttctttgcttgcttccttctgggtgggggagattagaggaggcttatcattaataggaaggggagctgtagaaaggctagtatatggaggtaagctgagaggttctgctgtgggatgtaaattgcatgctttgcatagttgtggattctccttcaatgaaaagaaagcttgggcataaggtatttcactccatttgccctcctgacacagcagcagatccccctcttgcccaagaacctgcagcagtccctggaacttgctgatcagagtagttgtgctcaccagtgcagcagcagaaatactagttttcctccgcttagtgataggtgatagtcccttcgtgtttgccaagatgtgtccagagttggttccttctggtgggttcctggtctcactgacttcaagaatgaagccacgggccttcatggtgagtgttacagctctgttgtttcctgactttttaatgattgcctttctaactggtatgagatggtatctcattgtggttttgatttgcatttctctgatggccagtaatgatgagcattttttcatgtgttttttggctgcataaatgtcttcttttgagaagtgtctgttcatatcattcgccgactttttgatggggttgtttgtttttttcttgtaaatttgtttgagttcattgtagattctggatattagccctttgtcagatgagtagattgcaaaaattttctcccattttgtaggttgcctgttcactctgatggtagtttcttttgctgtacagaagctctttagtttaattagatcccatttgtcaattttggcttttgttgccattgctcttggtgttttagatgtgaagtccttgcccatgcctatgtcctgaatgatattgcctaagttttcttctagggtttttatggttttaggtctaacatgtaagtctttaatccatcttgaattaattttagtataaggtgtaaggaagggatccagtttcagctttctacatatggctagccagttttcccagcactgtttattaaatagggaatcgtttccccattgcttgtttttctcaggtttgtcaaagatcagatagttgtagatatgcggcattatttctgagggctctgttctgttccattggtctatatctctgttttggtaccagtaccatgctgttttggttaccgtagccttgtagtatagtttgaagtcaggtggcgtgatgcctccagctttgttcttttggcttaggattgacttggcgatgcgggctcttttttggttccatatgaactttaaagtagttttttccaattctgtgaagaaagtcattgggagcttgatggggatggcattgaatctataaattaccttgggcagtatggccattttcacgatattgattcttcctacccatgagcatggaatgttcttccatttatttgtgtcctcttttatttcattgagcagtggtttgtagttctccttgaagaggtccttcacatcccttgtaagttggattcctaggtattttattctctttgaagcaattgtgaatgggagttcactcat

SEQ ID NO: 10584 - DNA, 2151 bp, Homo sapiens
  SIMILAR (30)..(254): 371254mologous to Sus scrofa FOSB protein,accession number AF120155,Smith-Waterman Score=79.
atgagtggaactctcaaaggcatgttgcccaagcgagacttgcccatctatcctatctatcctgacctttgccccctgggtcctaatgcctgtgagacaaacttcctctcgcctctcttctctgagaaggaaataagcaaagaaatctccaaaggtccacaaaaacccctgggctatcgattatgtccccttcaagctataggggcaggggaatttggcccaacccgggtacatgtccccttctccctctctgatttaaagcagatcaaggcagacctggggaagttttcagatgatcctgataggcacatagatgtcctacagggtctagggcaaacctttgacctcgcttggagagatgtcatgctactgttagatcaaaccctggccttttatgaaaagaatgtggctttagctgcagcccgagagtttggagatacctggtatcttagtcaagtatgtttaactattgagggccaggaaattgacttcctcctggacagtggcacggccttctcagtgttaatctcctgtcctggacaactgtcctcaaggtctgttaccatccgaggaatcctgggacagcctgtaaccaggcctgaagctcataaaggattacagaatactgttaaacatttgaaagctcaaggcttagtaaggaaatgcagcagtcccggcaacaccccaattctgggagtacaaaaacccaatcgtcagtgcagactagtgcaagatcttagactcatcaatgaggcagtgattccactatatccagttgtacccaacccctataccctgctctctcaaataccagaggaagcagaatggttcatggttctggacctcaaggatgccttcttctgtattcccctgcactctgattcccagttcctctttgcttttgaggatcccacagaccacacgtcccaacttatgtggatggtcttgccccaggggtttagggatagccctcatctgtttggtcaggcactggcccgagatctaggccacttctcaagtctaggcactctggtccttcaatatgtggatgatttacttttggctaccagttcggaagccttgtgccagcaggctactctagatctcttgaactttctagctaatcaagggtacaaggtgtctaggtcgaaggcccagctttgcctacagcaggatggggaaccaatcgagcatgactgccaacaaattatagtccagacttatgccacccgagatgatctcttagatgtccccttaactattcctgaccttaacctatataccgatggaagttcagttgtggagaatgggatacaaaggacaggttacaccatagttagtgatgtaaccatacttgaaagtcccgtggcagccatcttgctgttacttgcctttggggcctgtatttttaaccttcttgtcaaatttgtttcctctagaatcgaggccttcgagctacagatggtcttacaaatggaaccccaaatgagttcaactaacaacttctaccgaggacccatggaccgacccgctggcacttcccctggcctagagagttcccctctgaaggacactacaactgcaggagctgtaacactcaccacggaggtctgcagcttcactcctgagccagcgagaccacgaacccaccagaaggaagaaactccgaacacatctgaacatcagaaggaacaaactccagacacgctgcctttaagaactgtaacactcaccgcaagcgtccacggcttcattcttgaagtcaatggttcaggaaaaactggaaaggcaactatagtgtggcaagatgccacgcagaactggcagcacaaaatccaggaacgttttaaaactacgcaacaggcggagttagaagaggtatcagctcttgaaggcttacttctcaatactggctgcgagagcaagatgcccacgacgaccttgggaactacaagtccgccatacagcgggagcgcccggagtagggacgaccgacaccagcccgtacccaccctcgtgcgcgacggccccttccgccggtcaacccggaagagttcgcggtggccgcggcagacggaagccgaacgagttcttcggcggctgcaggatggggactccaaagtgaaagtggcggtcggatacgacccatga

SEQ ID NO: 10585 - DNA, 3887 bp, Homo sapiens
  SIMILAR (1152)..(2048): 751254mologous to multiple sclerosis associated retrovirus polyprotein,accession number AF009668,Smith-Waterman Score=1186.
gaggccaggtgagggtgcaggttttcgagaatccattgctaaaggccattaaatccgaccttcctcggtcctccctgtggtctgggaggaaaactagtgtttctgctgctgcgttgaaggaaataagaaaagaaatctccaaaggaacacaaatccccctgggctatcggttatgtccccttcaagctgtagggggaggggaatttggcccaaccaagatacatgtccccttctccctctctgatttaaagcagatcaaagcagacctggggaagttttcagatgatcctgataggtacatagatgtcctacagggtctagggaaaacctttgacctcacttggagagatgtcatgctactgttagatcaaaccctggcctttaatgaaaagaatgcggctttagctgcagcctcagagtttggaggtatctggtatcttagtcaagtaaatgatagaatgacagctgaagaaagggaccaattccctactggtcagcaagccatccccagtatggatccccactgggaccttgactcagatcatggggactggagtcataaacatctgttgacttgtgttctagaaggactaaggggaattaggaaaaagcccatgaattattcaatgatgtccaccataattcagggaaaggaagaaaatccttctgccttcctccagcagctatggaagtccttaagaaaatatactcctctgtcacccaactcactagtgggtcaattgatcctaaaagataagtttattacccaatcaaccacagatatcagaagaaagctccaaaatagggaccaagaggaacaggcccaaaaggaaaagcgagatcagagaaaggccatagccttagtcatggccctcagacaaaccttggtggttcaaagaggacagaaaatggagcaggccaatcacctggtggggcttgttaccagtgtggtttgcaaggacaccttaaaaaagattgtccaacgagaaacaagccgccccatcgtccatgtccactatacggaggcaatcactggaagtcacactacccagagggcaaagcttctctgggccagaagcccccaaccagatgatccaatgacaggactgaggatgactgcggcaagcacccgttcatgtcatcaccccctcactgagccctgggtatgtttaatcattgagggccaggaaattgacttcctcctggacactggcacgaccttctcagtgttaatcccctgtcttggacgactgtcctcaaggtccgttaccatccaaggaatcctgggacagcctgtaaccaggtatttctcccacctcctcagttgtaattgggagactttgctcttttcacatgcctttcttgttatgcctgaaagtcccacacccttattagggagggatatattagccaaagctggagctattatctccatgaagacagggaacaagttacccatttgttgtcccctacttgagggaatcaaccctgaagtctgggcattggaaggacaatttggaagggcaaaaaatgcccatccactccaaatcaggctaaaagaccccatcagttttccttatcaaaggcaatatcccttaaggcctgaagctcataaaggattacaggatattgttaaacatttaaaagctcaagactcagtaagaaaatgcagcagtccctgcaacaccccaattctaggagtacaaaaactgaacagtcagtggagactagtgcaagatcttagactcatcaatgaggcagtaattcctctatatccagttgtacgcaacccctatacccttctctctcaagtaccagaggaagcagaatggttcactgttctggacctcaaggatgccttcttctgtattcccctgcactctgactcccagtttctttttgcctttgaggatcccacagaccacacatcccaacttatgtggatggtcttgccccaaaggtttagagatagccctcatctgtttggtcaggcacaggcccaagatctaggccacttctcaagtccaggcactctggtccttcaatacagcgagatagccaagaccctctatactctaatcaaggagatggagagggcaaatactcacctagtagaatgggaaccagaggcagaaacagccttcgaaaccttaaagcaggccctagtacaagctccagctttaagccttcccacaggacaaaacttcgctttatatgtcatagagagagcagggatagctcttggagtccttactcagactcacaggacaaccccacaaccagtggcatacctaagtaaggaaattgatgtagtagcaaaaggctggcctcactgtttaaggacagttgtggcagtggctgtcttagtgtcagaggctatcaaaataatacaaggaaaggatttcactgtctggactactcatgatgtgaatggcatactaggtgccaaaggcggtttatggccatcagacaactgcctacttagataccaggcactactccttgaggaaccagtgcttcaaatacatatgtgcatagccatcaaccctgccacttttctcccagaagatggggaaccaatcaagcatgactgccagcaaattatagtccagacttatgccacccaagatgatctcttagaagtccccttagctaatcctgactttaacctatataacagtggaagttcatttgtagagaatgggatacaaagggcaggttatgccatagttagtgatgtaactgtacttggaagtaagcctctttccccagggactagcacccagttagcagaactagtggcacttacccgagccttagaactgggaaaaggaaaaagaataaatgtgtatacagatagcaagtatgcttatctaatcctacatgcccatgctgcaatatggaaagaaagggagttcctaacctctgggggcacccccattaaataccacaaggaaattatggagttattgcacacagtgcaaaaacccaaagaggtggcagtcttacactgccaaagccatcagaaggggagtgcaaggaggatcttctgtctcaccagaattcccgggaccagagtatgcaaaaacccccatgtctccctgagtggcatctctgagtggccactgagagaccacacacctctgtgcttcagacccaaggccctgctggcatgggttcatgaggagatctgctccatgggttgcaaagatccaggttggaacagtttgaaggtctcagaagaagataggaagatgcaggaaagtttggaaacttctagagacttgctgaatggttttgaccaaaatgttgataatgatatggacagtaaagtccaggctgagggagcctcagatggagatgaggaacttattgggaaatggcgtaaaggattgtcaatgctatggaagatactctctatagagaatatgatgaatgtctggaaggatggcaccataaaagatgccatcattgttatagaaaaagcagtgaaagccatcaagcctgaaacaataaattcctgccagagaaatctgtgtccagatgttgtacatgacttcacaaggtttacaacagagccaataaaggacataaaagagattggagatttggcaataaaattgggaatttttgagtcctctaatagcacccaattccttaatcagtttgtacctgatgatcggttatccccccataataaattactgaagttttacaaaccggaattttattcatcatacccccttgtttcctgccttgaccattatgtggatcaagttggagccagaatcagcatgagtttctgtgtgacaacagtgacagaggcctctggcagcggcagctggacatgtggtgtgagccagcttaagctgtcctatgccgactaa

SEQ ID NO: 10586 - DNA, 1298 bp, Homo sapiens
  SIMILAR (807)..(1100): 771254mologous to Homo sapiens gag,accession number AF156961,Smith-Waterman Score=411.
atgaaaacaggttataataccacaaaaagatgtaaagataacttcaggttcctgcagctagacaaaatacttgatgtcgtttctaaaggaggacaggcaaaggtgcaggttttcaagaaagcatcagtaagggccactaaatccgaccttcctcggtcctccctgtggtgtaggaggaaaactagtgtttctgctgctgcgtcagtgagcacaactattctgatcaacagggtccagggaccgttgtgggttcttgagcaagaagggtttctgctgctgcgtcgggaaaaatggccacctgagggaggtataaataacaatactatcctgcagcttgacctttgctgtaagagggaaggcaaacggagtgaaataccttatgtccaagctttcttttcattgaagaaggaaataagcaaagaaatctccaagagaccaaaaaaacccccgggctatcagttatgtcccccttcaaagctgtagggggaggggaatttggcccaacccaggtacatgtcccccttcctcactctctgatttaaagcagatccaaggcagacctggggaagttttccagatgatccctgatatgtaccatagatgtccctacaggggctagggcaaaccttcaatcctcacttggagaaatgtcatgctattgttagatcaaacccttgcctttaatgaaaagaatgtggctttagctgcagcccaagagtttgaagatacctggtatcttggtcaagtaaatgatagaatgacagccaaagaaagggacaaattccctactgaccagcaagccatccccagtatgcaatccccactgggacctagactcagatcacggggactggattcataaacatctgctgacctgtgttctagaaggactaaggagaattaggaaaaagcccatgaattactcaatgatgtccaccataactcagggaaaggaagaaaatccttctgccttcctcaagtggctacgggaggccttaagaaaatatactcccctgtcacccaactcactacggggtcaattgattctaaaagatacatttattacccaatcagctgcagatatcaggagaaagctccaaaagcaagccctgggccctgaacaaaatctggaggcattattaaaccaggcaacctcagtgttctataatagggaccaagaggaacaggcccaaaaggaaaagcaatcactggaaggcacactgccccagagtacgatggttctctgggccagaagctcccaaccagatgatccaacaacagaacttatggtgcccagg

SEQ ID NO: 10587 - DNA, 2165 bp, Homo sapiens
  SIMILAR (1160)..(2164): 731254mologous to multiple sclerosis associated retrovirus polyprotein,accession number AF009668,Smith-Waterman Score=1269.
cttcactcctgagccagcgagaccacgaaccccaccagaaggaagaaactccgaacacatccgaacatcagaaggaaaaaactccggacacgccgcctttaagaactgtaacactcaccgtgagggtccacggcttcattcttgaagtcagctttgaccaagaacccaccaattccagacacattttggtgaccacaaagggaccactgattatcgccaagtggaggaaaactaatgtttctgctgctgtgctggtgagctcaactattctgatcagcagggtccagggactgttgcaggttcttgggcagggttgtttctgctgctgcatcggtgagcgcaactattccaatcagcagggtccagggaccattgcaggttcttgggcaggggttgtttctactgctgcatcaaatgcgactttagctgcagccccaaagtttggagatacttggtatcttagtcaagtaaatgatagaatgacagctgaagaaagggacaaattccctactggtcagcaagccatccccagtatggatctccactgggacctcaactcagatcatggggactggagtcgtaaacatctgttgtcctgtgttctagaaggactaagaagaattaggaaaaaagccatgaattactcaatgttgtccaccgtaactcagggaaaggaaaaaaatccttctgccttccttgaacagctatggggggccttaagaaaatatactcccctgtcacccaaatcactagagggtcaattgattctaaaagataagtttattacccaatcagccgcagatatcaggagaaagctccaaaagcaagccctgggccctgaacaaaatctggaggcattattaaacctggcaacctcggtgttctataatagggaccaagaggaacaggcccaaaaggaaaagcgagatcagagaaaggccgcagccttagtcatggccctcagacaaacaaacctttggtggttcagaaaggacagaaaatggagcaggccaatcacccggtagggcttgttatcagtgtggtttacaaagacattttaaaaaagattgtccaacgagaaacaagccaccccctcatccatgtccgctatgccgaggcaatcactggaaggcgcactgccccggaggacaaaggttctctggggagggatatgttagccaaagctggagctattatctacatgaatatggggaacaagttacccatttggtgtcacctacttgaggaaggaatctaccttgaagtctgggcattggaaggacaatttggaagggcaaaaaatgcctgcccagtccaaatcaggttaaaagatcccaccacatttccttatcaaaggcaatatcccttaaggcctgaagctcataaaggattacaggatattgttaaacatgtaaaagctcaaggcttagtaaagaaatgcagcagtccctgcaacaccccaattctaggagtacaaaaaccgaacggtcagtggagtctagtgcaagatcttagactcatcagtgaggcagtaattcctctatatccagttgtacccaacccctataccctgctctctcaaataccagaggaagcagaatggttccctgttctggacctcaaggatgccttcttctgtattcccctgcactatgactcccatgactcccagtttctctttgcctttgaggatcccacagaccacacatcccaacttatatggaccgtcttgccccaagggtttagggatagccctcatctgtttggtcaggcactggcccaagatctaggccacttctcaagtccaggcactctggtccttcagtatgtggatgatttacttttggctaccagttcggaagcctcatgccagcaggctactctagatctcttgaattttctagctaatcaagggtacaaggcatctaggtcaaaggcccagctttgcctacagcaggtcaaatatctaggcctaatcttagccagagggaccaggacccttggcaaggaacgaatacagcctatactggcttatcctcaccctaagactttaaaacagttgtgggggttccttgaaatcactggcttttgctgactatggatcccaggatacagcaagatagccaggcccctctatactctaatcaaggagacccagagagcaa

SEQ ID NO: 10588 - DNA, 403 bp, Homo sapiens
  SIMILAR (2)..(337): 931254mologous to Homo sapiens HBV pX associated protein-8; XAP-8,accession number AF227948,Smith-Waterman Score=575.
tgaagggtctggcagtgaaaaatcctctgcagcttcagaagaggaggaagaaaaggaaagtgaagaagccatcctagcagatgatgatgaaccatgcaaaaaatgtggccttccaaaccatcctgagctaattcttctgtgtgactcttgcgatagtggataccatactgcctgccttcgccctcctctgatgatcatcccagatggagaatggttctgcccaccttgccaacataaactgctctgtgaaaaattagaggaacagttgcaggatttggatgttgccttaaagaagaaagagcgtgccgaacgaaggagccagacttttctgaagatcaagaagaaaagaaaaaagattcaaaaaaatccaaagcaaacttgcttgaaaggaggtcaacaagag

SEQ ID NO: 10589 - DNA, 1038 bp, Homo sapiens
  SIMILAR (418)..(882): 901254mologous to Homo sapiens putative p150,accession number U93565,Smith-Waterman Score=747.
gtaaaacccaaaggcaaagttcgatggactggttctcggacacgtggcagatggaaatattccagcaatgatgaaagtgaagggtctggcagtgaaaaatcatctgcagcttcagaagaggaggaagaaaaggaaattgcttcaaagagaataaaatatctaggaatccaacttacaagggacctgaaggacctcttcaaggagaactacaaaccactgctcaatgaaataaaagaggatacaaacaaatggatggatgaacattccatgctcatgggtaggaagaatcaatatcgtgaaaatggccatactacccaagaattggaaaaaactactttaaagttcatatggaaccaaaaaagagcccgccttgccaagtcaatcctaagccaaaagaacaaagctggaggcatcacacatatctacaactatctgatctttgacaaacctgacaaaaacaagaaatggggaaaggattccctatttaataaacagtgctgggaaaactggctagccatatgtagaaagctgaaactggatcccttccttacaccttatacaaaaattaattcaagatggattaaagacttaaatgttaggcctaaaaccataaaaaccctagaagaaaacctaggcaataccattcaggacataggcatggtcaaggacttcatgtctaaaacagcaaaagcaatggcaacaaaagccaaaattgacaaattgcatctaattaaactaaagagcttctgcacagcaaaagaaactaccatcagagtgaacaggcaacctgcagaatgggagaaaatttttgcaatctactcatctgacaaaggcctaatatccagaatctacaatgaactcaaacaaatttacaagaaaaaacaaccccatcaaaaagtgggtgaaagatataaacagatacttctcaaaaggagacatttatgcagccaaaagacacatgaaaaaatgctcatcatcactggccatcagagaaatgcaaatgaaaaccacaatgagataccatctcacaccagttag

SEQ ID NO: 10590 - DNA, 1131 bp, Homo sapiens
  SIMILAR (19)..(561): 661254mologous to Plasposon NKBOR Tn10 transposase,accession number AF310136,Smith-Waterman Score=541.
atgtgcgaactcgatattttacacgactctctttaccaattctgccccgaattacacttaaaacgactcaacagcttaacgttggcttgccacgcattacttgactgtaaaactctcactcttaccgaacttggccgtaacctgccaaccaaagcgagaacaaaacataacatcaaacgaatcgaccgattgttagcgtcggcaaaggagccatgggttctagcaactaacttacctgttgaaattcgaacacccaaacaacttgttaatatctattcgaagcgaatgcagattgaagaaaccttccgagacttgaaaagtcctgcctacggactaggcctacgccatagccgaacgagcagctcagagcgttttgatatcatgctgctaatcgccctgatgcttcaactaacatgttggcttgcgggcgttcatgctcagaaacaaggttgggacaagcacttccaggctaacacagtcagaaatcgaaacatcgggctggtggtcatcctggcttccacggtggtggccatgtcggccgtggcccagctgtgggaggacgagtgggaggtgctgctgatctccctgcagggcacagcgccattcctgcatgtgggggctgtggcagcagtcaccatgctctcctggatcgtggcaggacagttcgcccgcgcagagcggacctcctcccaggtgaccattctctgtaccttcttcaccgtggtgtttgccctctacctggcccctctcaccatctcctctccctgcatcatggagaagaaagacctcggccccaagcctgctctcattggccaccgcggggcccccatgagcaggcgtttgcgaagaaagaccccaaagaaaaaatattccgatgatgatgaagaggaggaatctgaggagaatagtagagactctgaaagtgacttcagtgatgattttagtgatgattttgtagaaactcggcgaaggcggtcaaggagaaatcagaaaagacaaattaactacaaagaagactcagaaagtgacggttcccagaagagtttgcgacgtggtaaagaaataaggcgagtacacaagcgaagactttccagctcagagagtgaaggttatttcttcatcaagagctag

SEQ ID NO: 10591 - DNA, 4582 bp, Homo sapiens
  SIMILAR (1)..(2385): 671254mologous to Homo sapiens HBV pX associated protein-8; XAP-8,accession number AF227948,Smith-Waterman Score=2341.
atgaaaagtgaggagcagcctatggatttagaaaaccgttctacagccaatgttctagaagagactactgtgaaaaaagaaaaagaagatgaaaaggaacttgtgaaactgccagtcatagtgaagctagaaaaacctttgccagaaaatgaagaaaaaaagattatcaaagaagaaagtgattccttcaaggaaaatgtcaaacccattaaagttgaggtgaaggaatgtagagcagatcctaaagataccaaaagtagcatggagaagccagtggcacaggagcctgaaaggatcgaatttggtggcaatattaaatcttctcacgaaattactgagaaatctactgaagaaactgagaaacttaaaaatgaccagcaggccaagataccactaaaaaaacgagaaattaaactgagtgatgattttgacagtccagtcaagggacctttgtgtaaatcagttactccaacaaaagagtttttgaaagatgaaataaaacaagaggaagagacttgtaaaaggatctctacaatcactgctttgggtcatgaagggaaacagctggtaaatggagaagttagtgatgaaagggtagctccaaattttaagacagaaccaatagagacaaagttttatgagacaaaggaagagagctatagcccctctaaggacagaaatatcatcacggagggaaatggaacagagtccttaaattctgtcataacaagtatgaaaacaggtgagcttgagaaagaaacagcccctttgaggaaagatgcagatagttcaatatcagtcttagagatccatagtcaaaaagcacaaatagaggaacccgatcctccagaaatggaaacttctcttgattcttctgagatggcaaaagatctctcttcaaaaactgctttatcttccaccgagtcgtgtaccatgaaaggtgaagagaagtctcccaaaactaagaaggataagcgcccaccaatcctagaatgtcttgaaaagttagagaagtccaaaaagacttttcttgataaggacgcacaaagattgagtccaataccagaagaagttccaaagagtactctagagtcagaaaagcctggctctcctgaggcagctgaaacttctccaccatctaatatcattgaccactgtgagaaactagcctcagaaaaagaagtggtagaatgccagagtacaagtactgttggtggccagtctgtgaaaaaagtagacctagaaaccctaaaagaggattctgagttcacaaaggtagaaatggataatctggacaatgccccagacctctggcatagaggagccttctgagacaaagggttctatgcaaaaaagcaaattcaaatataagttggttcctgaagaagaaaccactgcctcagaaaatacagagataacctctgaaaggcagaaagagggcatcaaattaacaatcaggatatcaagtcggaaaaagaagcccgattctccccccaaagttctagaaccagaaaacaagcaagagaagacagaaaaggaagaggagaaaacaaatgtgggtcgtactttaagaagatctccaagaatatctagacccactgcaaaagtggctgagatcagagatcagaaagctgataaaaaaagaggggaaggagaagatgaggtggaagaagagtcaacagctttgcaaaaaactgacaaaaaggaaattttgaaaaaatcagagaaagatacaaattctaaagtaagcaaggtgaaaacccaaaggcaaagttcgatggactggttctcggacacgtggcagatggaaatattcccagcaatgatgaaagtgaagggtctggcagtgaaaaatccatctgcagcttcagaagaggaggaagaaaaggaaagtgaagaagccatccctagcagatgatgatgaacccatgcaaaaaatgtggcctttccaaacccatcctgagcttaatttcttctgtgtgactcttgccgatagtggatacccatactgccttgctttcgcccctcctctgatgatcatccccagatggaagaatggttcttgcccactttgccaacataaactgctcctgtgaaaaatttacaggaacagacgcaggatttgggatgttgccttaaagaaggaaagagcgttgccggaacgaaggaaaagaacgcttggtgtatgttggtatccagtattgaaaacatcattcctccacaagagccaaacttttttcgaccatccgacacgacacgtattgaagcattgcggacgatgccccccttacttgtttgaacggaggacagcacccaacaaggaattgtataacctacagatttgatgattttgatgaaccaattgatgaagctattgaagatgacactcaaagaatccgatggaggaggagttggccgacgaaaagatatctccaccatcacaggccatcgtgggaaagacatctctactattttggatgaagaaagaaaagaaaataaacgaccccagagggcagctgctgctcgaaggaagaaacgccggcgattaaatgatctggacagtgatagcaacctggatgaagaacagagcgaggatgaattcaagatcagtgatggatctcaagatgagtttgctgtgtctgatgaaaacccagatgaaagtgaagaagatccgccatctaatgatgacagtgacactgacttttggagccgtaaactgaggcgacacccctctcggccaatgaggcagagcaggcgtttgcgaagaaagaccccaaagaaaaaatattccgatgatgatgaagaggaggaatctgaggagaatagtagagactctgaaagtgacttcagtgatgattttagtgatgattttgtagaaactcggcgaaggcggtcaaggagaaatcagaaaagacaaattaactacaaagaagactcagaaagtgacggttcccagaaagagttttgcgacgtggtaaagaaataaggcgagtacacaagcgaagactttccagctcagagagtgaagagagctatttgtccaagaactctgaagatgatgagctagctaaagaatcaaagcggtcagttcgaaagcggggccgaagcacagacgagtattcagaagcagatgaggaggaggaggaagaggaaggcaaaccatcccgcaaacggctacaccggatttgagacggatgagggaggagagtttttgacattgctcattggagatgcaaatcagcctgcccgtgacagccagcctagggtcctgccctcagaacaagagagcaccaagaagccctaccggatagaaagtgatgtggaagaggactttgaaaatgtaggcaaagtggggagcccattggactatagcttagtggacttaccttcaaccaatggacagagccctggcaaagccatttgagaacttgattggcaagcctacttgagaagtctcagacccccaaggacaaccagcacagccagtgcaagccttagcctccaaatgggacaagttggtggggcaggaagcaggagcaccagaagaggaggaagatgagcttttgagagtgactgacctttgttgattatgtctgtaacagtgaacagttataagactttttttccatttttgtgctaatttattccacggtagctctcacaccagcgggccagttattaaaagctgtttaatttttcctagaaaactccactacagaatgacttttagaagaaaaatttcaacaaatcctgaagtctttctgtgaagtgaccagttctgaactttgaagattaaataaattgctgtaaattccttttgattttctttttccaggttcatggtccttggtaatttcattcatggaaaaaaatcttattataataacaacaaagatttgtatatttttgactttatatttcctgagctctcctgacttttgtgaaaaagggtggatgaaaatgcattcccgaatctgtgagggccccaaaacagaatttaggggtgggtgcaaagcacttgtgctttagctttttcaaatttaaatatatattatatttaaacattccatggcatagatgatgatttacagacaatttaaaagttcaagtctgtactgttacagtttgagaattgtagataacatcatacataagtcatttagtaacagcctttgtgaaatgaacttgtttactattggagataaccacacttaataaagaagagacagtgaaagtaccatcataattaacctaaatttttgttatagcagagtttcttgtttaaaaaaaaataaaatcatctgaaaagcatttgtacagtaaaatgtataatgaagctttgccaaccagactgtgctagcaacaaatttttttaaataagctttatgcagtggtaataaggtggcctcaaatatattgtgtctgatggagagttattagtgaaatgaatgtggtctttcttaaggcctggatggactgtgtagcaattccttgatgtccagtttggaaagatgtactcttctcaacaagaaaaacttaaatccgtcgtgcccaaatatagttgtgcttttatttccaaaaa

SEQ ID NO: 10592 - DNA, 462 bp, Homo sapiens
  SIMILAR (256)..(447): 1001254mologous to Homo sapiens Polypeptide fragment encoded by gene 150,accession number W89013,Smith-Waterman Score=321.
gaaagaaaagaaaagaaacaagaagaaaaaaaccattggttcaccaaaaaggattcagagtcctttgaataacaagctgcttaacagtcctgcaaaaactctgccaggggctgtggagtccccagaagttaattgatgggtttctaaaacatgaaggacctcctgcagagaaacccctggaagaactctctgcttctacttcaggtgtgccaggcctttctagtttgcagtctgacccagctggctgtgtgagacctccaagttgtgaaatactgtactgatctaatagaagaaaaagatttggaaaaactggatctagttataaaatacatgaaaaggctgatgcagcaatcggtggaatcggtttggaatatggcatttgactttattcttgacaatgtccaggtggttttacaacaaacttatggaagcacattaaaagttacataaatattaccagag

SEQ ID NO: 10593 - DNA, 435 bp, Homo sapiens
  SIMILAR (83)..(3): 1001254mologous to Homo sapiens alpha integrin binding protein 80,accession number AJ131720,Smith-Waterman Score=133.
gactctgcttgctggacagcacagacttgctctacttgttcccggagatcaggtggaagtgcttctaaaacagactgatccagctataaaatgccaaacatatgagtaggaagttaaagcatgctcggagatgaggtgtttgggagttaacacgccactttaaatttcaatttgaatactgtggataatcaatgtaaggtacagaccatcaagctaggaaagccacctccaaatcagcacatttttggaacgtcttggccttttgtcattgaagcctgaagtactatgtgtagtctggaaagaagtgtatatatactaccagccactatcacatgaccaggtaagtccaaatatactcacagaatgtcctgcaattggggccaacagatatgaatagccttggtgaagctcaaattagatcccaccccagggagg

SEQ ID NO: 10594 - DNA, 638 bp, Homo sapiens
  SIMILAR (439)..(636): 1001254mologous to Homo sapiens Polypeptide fragment encoded by gene 150,accession number W89013,Smith-Waterman Score=336.
  misc_feature (1)...(638): n = a,t,c or g
cagggtgtgcccaggccctttctagtttgcagtcttgaccccagctggctgtgtgagaccctccagcacccaatctagctggagctgttgaattcaatgatgtgaagaccttgctcagagaatggataactacaatttcaggttggcttggcctgtgttnagatggnccaaggctgagatgtagtcgtctcatgatttgagaacataaacagactaaactatgcagatttaacccatttctctaactctgataagcttaaagcagctacccccaaatcttttaaattctgggacttgctttgaaaagtaacaaagcccattcctttgatagctgttagtgacatagttgtagaaatgcagttttcctttatccatgcagatctctgactttctccttcaaaaagactggtcctcatttgaagtttttcccccttcctagatccaatggaagaagacattctccaagttgtgaaatactgtactgatctaatagaagaaaaagatttggaaaaactggatctagttataaaatacatgaaaaggctgatgcagcaatcggtggaatcggtttggaatatggcatttgactttattcttgacaatgtccaggtggttttacaacaaacttatggaagcac

SEQ ID NO: 10595 - DNA, 891 bp, Homo sapiens
  SIMILAR (1)..(399): 811254mologous to Homo sapiens Human secreted protein clone bf157_16 protein sequence SEQ ID NO:94,accession number Y94944,Smith-Waterman Score=535.
atgatgaatgaaaagaacttggagaaaggactgggcgtggacagtgtggacaaggatgccatgaacgcggccatccagcaggccatcaaggcccagccgtccatgtctcccaagaaggcgcccccagcgcctgcaaaggaggccaggaatgtcgtggccgtgggtactggtggccgtgggacccacgaccgagacccgagtgagaaaccaccccggctccagtggtttgaacagcaggcgaagaagttggcaaagcagcaggaggaggacagcgaggaggaggaagaggacctggatggagacgttctggaaattgggaagtccaaaatcaaggtgctggcagagtcagtgtctgattgggaagatattgattctgatgaagaattggaatgtgaggatactgaagcaatggacgatgtggtggagcaggatgcagaggaggaagaggctgaggaaggcccaccccttggtgccatccctatcacggactgcttattttgttcccatcattccagctcgctgatgaagaatgtggctcacatgaccaaagaccacagtttctttattcctgatatagaatatctttcagatattaagggactgattaaatacttgggaactcattcatcatcgtcaaatgtctgtaaaggtctatgggacctggagaaaaggccgtccattgacctaaagttagaacataatatagcactaaaaggcatttacacgtactttatctgcttcttctcactttattctttgccagtggttcagcgtgctgagtcagtccacgcgtccacggaccaggagatccaggagatgcatgatgatcagtcaaacccacagaatgctgtggtacgggagcactgtgtgggatggggttggggcgtctag

SEQ ID NO: 10596 - DNA, 1548 bp, Homo sapiens
  SIMILAR (1)..(720): 891254mologous to Homo sapiens Human secreted protein clone bf157_16 protein sequence SEQ ID NO:94,accession number Y94944,Smith-Waterman Score=1094.
atggcgacgtacacctgcataacttgccgggtggcgttccgcgacgcggacatgcagcgggcccactataagacggactggcaccgctacaacctgcggcggaaggtggccagcatggccccagtgaccgccgagggcttccaggagcgagtgcgggcgcagcgggccgtcgcggaggaggagagcaagggctcggccacctactgcaccgtttgcagtaagaagtttgcctctttcaacgcctacgagaaccacctcaagtcccggcgtcacgttgagctggagaagaaggccgtgcaggcagtgaatcggaaagtggagatgatgaatgaaaagaacttggagaaaggactgggcgtggacagtgtggacaaggatgccatgaacgcggccatccagcaggccatcaaggcccagccgtccatgtctcccaagaaggcgcccccagcgcctgcaaaggaggccaggaatgtcgtggccgtgggtactggtggccgtgggacccacgaccgagacccgagtgagaaaccaccccggctccagtggtttgaacagcaggcgaagaagttggcaaagcagcaggaggaggacagcgaggaggaggaagaggacctggatggagacgttctggaaattgggaagtccaaaatcaaggtgctggcagagtcagtgtctgattgggaagatattgattctgatgaagaattggaatgtgaggatactgaagcaatggacgatgtggtggagcaggatgcagaggaggaagaggctgaggaaggcccaccccttggtgccatccctatcacggactgcttattttgttcccatcattccagctcgctgatgaagaatgtggctcacatgaccaaagaccacagtttctttattcctgatatagaatatctttcagatattaagggactgattaaatacttgggagagaaagttggtgttggcaagatttgcttgtggtgcaacgagaaagggaagtccttctactccacagaagctgtacaggcacatatgaatgacaaaagccactgtaagctcttcacagatggcgatgctgctttggaatttgcagacttctatgattttagctggagacttgcagttggtggacatgactgggtggagaggctgactgcttctcactacttctatggctactacccaggtgccagagtgggtcatcgctccttgatgagatactacaaacagcgatttggcttgtcaagagctgtggcagttgccaaaaatcggaaggccgtgggccgagtacttcagcagtacagagccctgggatggactggcagcacaggagcggctcttatgcgagagcgagacatgcagtatgtccaaaggatgaaatcaaaatggatgctgaagacaggaatgaagaacaatgccaccaagcagatgcactttcgggtccaagggtcccaaaaagaaattcagatattccacagttctgagattgatggcattgccacagctgtagaagatgattttgcttctccaactccaaccaaggatgcaaagaactag

SEQ ID NO: 10597 - DNA, 944 bp, Homo sapiens
attgggaagatattgattctgatgaagaattggaatgtgaggatactgaagcatatggacgatgttggtggaccaaggatccagaggaggaagagcctgaggaaggccccaccccttgctcgctgatgaagaatgtggctcacatgaccaaagaccacagtttctttattcctgatatagaatatctttcagatattaagggactgattaaatacttgggagagaaagttggtgttggcaagatttgcttgtggtgcaacgagaaagggaagtccttctactccacagaagctgtacaggcacatatgaatgacaaaagccactttgagaaactcagtttaacagagtttaacacatccttggtggaaaagaagaaccttagacccagactgaagtatgacttgtctctgtttttgttctgggttaaacatcaagagttcagttttgccagtatacccctgaacagagctggagacttgcagttggtggacatgactgggtggaggagtagctatccagatcacaaggaaggggaggaccccaataaggctgaggagttgccctcagaaaagaacttggaatatgatgatgaaaccatggaattgattctgccttctggtgccagagtgggtcatcgctccttgatgagatactacaaacagcgatttggcttgtcaagagctgtggcagttgccaaaaatcggaaggccgtgggccgagtacttcagcagtacagagccctgggatggactggcagcacaggagcggctcttatgcgagagcgagacatgcagtatgtccaaaggatgaaatcaaaatggatgctgaagacaggaatgaagaacaatgccaccaagcagatgcactttcgggtccaactgactcaaggtgaagacaacaaggatgaagcccttcaggatgatccacttctacttaatgaatag

SEQ ID NO: 10598 - DNA, 2430 bp, Homo sapiens
  SIMILAR (1)..(1227): 811254mologous to Homo sapiens fumarylacetoacetate hydrolase,accession number M55150,Smith-Waterman Score=1637.
atggcgacgtacacctgcataacttgccgggtggcgttccgcgacgcggacatgcagcgggcccactataagacggactggcaccgctacaacctgcggcggaaggtggccagcatggccccagtgaccgccgagggcttccaggagcgagtgcgggcgcagcgggccgtcgcggaggaggagagcaagggctcggccacctactgcaccgtttgcagtaagaagtttgcctctttcaacgcctacgagaaccacctcaagtcccggcgtcacgttgagctggagaagaaggccgtgcaggcagtgaatcggaaagtggagatgatgaatgaaaagaacttggagaaaggactgggcgtggacagtgtggacaaggatgccatgaacgcggccatccagcaggccatcaaggcccagccgtccatgtctcccaagaaggcgcccccagcgcctgcaaaggaggccaggaatgtcgtggccgtgggtactggtggccgtgggacccacgaccgagacccgagtgagaaaccaccccggctccagtggtttgaacagcaggcgaagaagttggcaaagcagcaggaggaggacagcgaggaggaggaagaggacctggatggagacgattgggaagatattgattctgatgaagaattggaatgtgaggatactgaagcaatggacgatgtggtggagcaggatgcagaggaggaagaggctgaggaaggcccaccccttggtgccatccctatcacggactgcttattttgttcccatcattccagctcgctgatgaagaatgtggctcacatgaccaaagaccacagtttctttattcctgatatagaatatctttcagatattaagggactgattaaatacttgggagagaaagttggtgttggcaagatttgcttgtggtgcaacgagaaagggaagtccttctactccacagaagctgtacaggcacatatgaatgacaaaagccactgtaagctcttcacagatggcgatgctgctttggaatttgcagacttctatgattttagctggagacttgcagttggtggacatgactgggtggaggtagaggggaggattagaggctgtggcagtagagaagacaatgaatgtctgctggtgtgcaatttctctgttataggagtagctatccagatcacaaggaaggggaggaccccaataagggctgaggagttgccctcagaaaagaacttggaatatgatgatgaaaccatggaattgattctgccttctggtgccagagtgggtcatcgctccttgatgagatactacaaacagcgatttggcttgtcaagagctgtggcagttgccaaaaatcggaaggccgtgggccgagtacttcagcagtacagagccctgggatggactggcagcacaggagcggctcttatgcgagagcgagacatgcagtatgtccaaaggatgaaatcaaaatggatgctgaagacaggaatgaagaacaatgccaccaagcagatgcactttcgggtccaaatggactgtcgaggtatcgcagtgcttgtgttcaaggcaccctcattttacctaataatggccccaaagcacaagagtggtgatgctggtgattcaaatatgccaaagggaagccgtaaagtgcttcctttaagtgaaaaggtaaaagttcttaaggaaaaaaaattatatgctgaggttgctaagatccatggagtgaagctgcagaccttcggggtgagtgttacagctcacaaaggcagtgtggacccaaagagtgagcagcagcaagatttattgcaaagagttaaagaacaaagcttccacagtgtagaagcggacccagcagctgagggagccggctccggcctcagccagctcaggaaggggctcccacagtgcagcagccggctgaacggctcctcaagtgccaccaaagtgggagcccaggcagaggaggcgccgagagcaagcgagggctgtgagggctgccagcacgctgtcacctctcaatatgttaaattggcttatgcaagtgtggggctggcaagtctaacaactgcagggcaggtcaggaggctggagacccagggaagagttgatgctgcagtctctagtctgaaggcagtgcagaggcagaattccctctttctcggaggatctcaggctttttctcctaagtccttcaaccaagtggatgaggccacccgcattagagaagttataaaaccgtgtgcagaggaccgggtcatattttccaacagcgaaagtccatcagcagctacggtgttaaatgcagagcgaaggacccataaactggcagccgtgtgtgaagcaattagatgtggcactgcccccgcagccacgttccagcagccgcctctgttggagctttcaaggctcagcaactcttag

SEQ ID NO: 10599 - DNA, 885 bp, Homo sapiens
  SIMILAR (1)..(111): 831254mologous to Homo sapiens PRO1546,accession number AF116638,Smith-Waterman Score=156.
atggcaccaaggggtgggccttccctatcacggactgcttattttgttcccatcattccagctcgctgatgaagaatgtggctcacatgaccaaagaccacagtttctttattcctgatatagaatatctttcagatattaagggactgattaaatacttgggagagaaagttggtgttggcaagatttgcttgtggtgcaacgagaaagggaagtccttctactccacagaagctgtacaggcacatatgaatgacaaaagccactgtaagcttcttcacagatggcgatgctgctttggaatttgcagacttctatgattttaggagtagctatccagatcacaaggaaggggaggaccccaataaggctgaggagttgccctcagaaaagaacttggaatatgatgatgaaaccatggaattgattctgccttctggtgccagagtgggtcatccgctccttgatgagatactacaaacaagcgatttggcttgtcaagaacctgtggcagttgccaaaaatccggaaggccgtgggccgagtacttcagcagtacagaagccctgggatcggactcggcagcacaggagcggctcttatgcgagagcgagacatgcagtatgtccaaaggatgaaatcaaaaatgggatgctgaagacacggaatgaacgaacaatgccaccaacgcagatgcactttcgggtccaagtgagattctgagagtctgcttgggattgagcaatccatctcctgcccaagtttcctcctttgccctggagggaccagtgaaaagacagattcataggagagacccttttgctgctacttcattcgttctgacctaataataaaagttagaaccataaaaaaaaaaaaaaaaaa

SEQ ID NO: 10600 - DNA, 378 bp, Homo sapiens
  SIMILAR (1)..(129): 861254mologous to Homo sapiens reverse transcriptase,accession number L27428,Smith-Waterman Score=189.
atgaatcccttagctaactcaactctcacagatgtccatccccactttatttttaagcaaatggcagaactagacagggatatggatgaagctggaaaccatcattctcagcaaactaacacaagaacagaaaaccaaacaccacatgttctcactcataagtgggagttgaacaatgagaacacacggacacagggcagggaacatcacacatcagaggaattcatcgcaattcaacctgaatattatcagaaagaaaaatctaattctgacattaatttagaaggcacaagctactggactgaaaatcattgcagtggaatttataaagtgataaactgtcttgaaagtgaaatacatagtgaagaaaatcaagag

SEQ ID NO: 10601 - DNA, 2933 bp, Homo sapiens
  SIMILAR (1)..(111): 831254mologous to Homo sapiens PRO1546,accession number AF116638,Smith-Waterman Score=159.
atgcatgaagctggaaaccatcattgccagcaaagtaacacaagaaaagaaaaccaaacaccagatgttctcactcataagtgggagggctttgaccagcttcgacttgaaggattgctttgtgatgtgaccctgatgccaggtgacacagatgatgctttccctgtgcatagagtcatgatggcatctgctagtgattacttcaaggctatgttcacaggtggaatgaaagaacaagatttaatgtgcattaaacttcatggtgtgagcaaagtcggtctaaggaaaattattgatttcatttatactgcaaagctttctcttaatatggacaaccttcaagacacgctggaagctgccagtttcctacagattctgccagttttggacttctgtaaagtgtttctcatatctggggtcactttagacaactgtgttgaagttggacggattgccaacacctacaatctaaccgaagtggataaatacgttaacagtttcgtcttgaagaattttcctgcattgctgagcacaggggagttcttgaaactcccttttgagcgtcttgccttcgtgctttccagtaatagccttaagcactgtactgaacttgagctctttaaggctacctgtcgttggcttcgcctggaagagcctcggatggactttgctgcaaaattaatgaagaacatacgatttccactgatgacaccacaggagctcattaattacgtgcaaacggtggatttcatgagaactgacaatacttgtgtgaatttgcttttggaagccagcaattaccaaatgatgccatatatgcagccagttatgcagtcagacaggactgccattaggtctgacaccactcacttggttacactaggaggagtgctgaggcagcagctggttgtcagtaaggaattgcgcatgtatgatgaaaaggcccatgagtggaaatcgttagcccccatggatgccccaaggtaccagcatggcatcgccgtcattggaaattttctctatgtggttggcggacagagtaattatgatacaaaaggaaaaacggcagttgatacagtcttcagatttgatcctcgatacaataaatggatgcaagttgcatctttaaatgaaaagcgcaccttcttccacctaagtgccctcaaaggatatctgtatgcagttggtgggcgaaatgcagcaggtgaactgcccacagtagaatgttacaatccaagaacaaatgaatggacctatgttgccaaaatgagtgagccccactatggccatgctggaactgtgtatggaggagtgatgtatatttcaggaggaattactcatgatactttccaaaaggagctcatgtgctttgaccctgatactgacaaatggatccagaaggcgccaatgaccactgtcagaggtctgcattgcatgtgtacagtgggagaaaggctctatgtcattggtggcaatcacttcagaggaacaagtgattatgatgatgtcctaagctgtgaatactattcacctattccttgaccagtggaccccaattgctgccatgttaagaaggcagagtgatgttggggtcgctgtcttcgaaaataaaatctatgtggttggggggtattcttggaataatcgttgtatggtagagatagtgcagaaatatgatccagataaagatgaatggcataaggtttttgatctgccagaatcccttggtggcattcgtgcttgcacactcacagtttttccaccagaagaaaccacaccatcaccttctagagagtcccctctttctgcaccttaagatcatctctacaactaagatgctgtagttctatctttgcaatgtgtcataaattctcttctttttcccccttaagtagtatatatgttaggattaccctctggtaattgatacagatattggaaaaaagacaacattgatggttatttgtgctctttgtttggcctagaatgtttataaagtggtaacacaaccattctggaaatgtatcccatagaagctgatgtttaacatatgaaaaaaaaagtattgtctataaaatgtttcttcagtactttttaaatgctgtgtattgggtgtaaggtatttgtcatcttacattagtaaacccaataagccaagttgaaggtggattatagtaaatgtacaactgtgctcactaggcttcaagtaaaaagttttcctttcatctttgactgtaagatgtcaaagggaggcagcctgcttgaacaggaaccaatacacaaaaggttgccaattcgcatgagcttacctccctcttttcataaagtatttttgacatatctgtcaacccacttgactgtgtgggtgcattgagaacacaaagtttcctagacacacaggagaagtagctttaaattcacttaatattaatttaaaaagcagcatgaaccctctacttataaacaagggtttggtgtttttaaagtgtgtatacatacatacacatacacacatgcacatatgtcaaatataatttttttaaaaattgagtggcacatcaaagaaatgtgaaattaaaagggaattcttccaaaaagcagcttccattaaaatgggaattcagtatgcacatactgaatgcatatatgtagaaccatacagaatttaggtggataagggctagaaattttgagcaacaaaatttgtcacttgaccagattttatcttcaaaaactgtattctactccttctcctttgctgttgaggtaacttgcatattatatgtattctgtatactcagttcataaggttatttagcacaaagtatagcagcttcacctggagagctgcttttgctcagtaaattcaacttccatgttttatctttttttgttcaataaaaacatttaatgtcaaaaaaaaaaaaaaaaaa

SEQ ID NO: 10602 - DNA, 1228 bp, Homo sapiens
  SIMILAR (575)..(1225): 621254mologous to Mus musculus actin-associated protein palladin,accession number AF205078,Smith-Waterman Score=726.
atgaatgaaatagagtttcgcttggaacgtactcctgttgatgaatcagatgatgaaattcaacatgatgagatccccacgggcaagtgtattgctcccatctttgacaagagactcaagcacttccgggtcacagaaggctctccagttacattcacctgcaaaattgttgggatacctgttccaaaggtttactggttcaaagatgggaagcagatttctaagagaaatgagcactgcaaaatgaggcgagaaggagatgggacatgctctctgcacattgaatccactaccagtgatgacgatggcaactacaccatcatggcagccaacccccaggggagaatcagctgttctggccacttgatggtacaaagtttgcccattcgcagtcggctaacctctgctggtcagtctcacaggggaagatcccgagtgcaagaaagagacaaagagcccctacaggaacgctttttccgaccacatttcctgcaggctcctggggatatggtagctcatgaggggcgcctctgtcggctggactgtaaggtgagtggtttaccgcccccggagcatgacatggctactcaatggccaacctgtgctaccagatgcctcccacaagatgctggtcagggagaccggagtccactctctgctcattgacccactcactcagcgcgacgcagggacctataagtgcatcgctaccaacaaaaccgggcagaattcttttagtctggagctctctgtagtagccaaagaggtgaagaaagcacctgtgatcctggagaaactacagaactgcggtgttcccgaaggccaccccgtgagactggagtgccgcgtgataggcatgcccccacctgtgttctactggaagaaagacaatgagaccatcccttgcaccagagagaggatcagtatgcaccaggacacaacagggtatgcctgccttctcattcagccagccaagaaatcagacgctggatggtacacgttgtcagccaagaatgaagccggcatcgtgtcgtgcactgccaggctggatatatacgctcagtggcaccatcagatcccaccgcccatgtctgtccggcccagtggcagtcgctacggatctctcaccagtaaaggacttgacatattttctgccttttcctccatggaaagcacgatggtgtattcatgctcttctcggagtgtagtggagagtgatgaactttaa

SEQ ID NO: 10603 - DNA, 229 bp, Homo sapiens
  SIMILAR (228)..(79): 1001254mologous to Homo sapiens CGI-15 protein,accession number AF132949,Smith-Waterman Score=251.
  misc_feature (1)...(229): n = a,t,c or g
agagccaccgggcacacttcctgcattagaatcactaagagtnacanggagaagaacagaaaacagaggcttctggaagggctttgagggcaacgtggagggatattcccgagaggcngaggcgaagcccagccagttcaggaggctgatctgatcgcccagcagatgagctgccaacagcaaagtgcagacttccttaaaaatgccggcaatggagagagtgaggctg

SEQ ID NO: 10604 - DNA, 485 bp, Homo sapiens
  SIMILAR (427)..(2): 781254mologous to Homo sapiens bA394O2.1 (CGI-15 protein),accession number AL133227,Smith-Waterman Score=539.
  misc_feature (1)...(485): n = a,t,c or g
aggccaaacccagccaattcagangcttgatctgatcgcccaacaaantgagctnccaaacagcaaattgcaaaacttcctttaaaaatgccggcaatggaaaaaattgaggctggaggttctgaagacccaggaggaactcagagaagcccaaaccaaaggcgagaatcccgccaaggaagaggctcccaagtacccgcaggagcagccctgtgtcctggaaacggaagattttctcagatgtggacaaatggagaccttcaaatacagcaaagagagggaagagccccaggaacatgagtggctgcaggtggaacatggtgtcgatgggattctggaggccgagttcagccttctgcaggagcatctgggtgagggtccagcgaatgccaccgatgaacgaggcccccagcaccaagcgaagccctccacgttgaactgtgtggacagctcctccagcttgaagatcagagagaagatcaaga

SEQ ID NO: 10605 - DNA, 1391 bp, Homo sapiens
  SIMILAR (811)..(1389): 821254mologous to Homo sapiens Human epidermoid carcinoma clone HP10428-encoded membrane protein,accession number W88504,Smith-Waterman Score=751.
tttcgtggagattccggcctggagctcccagggccgagcatttttttcttgggacctgtgagcgctgcatccaattaaccatgggaagggtcagcaccagccaccagccccttaggtgaggactctgcctggggctctgctgatggttccgaatcatggagctgcagagagctcctccagcctggagacgttcttggtgaaagctgtggtctaactccaccggctcttcctgcacattgtattcaagaggggtgcctgcccccgctgactcaggagctccggtgctgtcagccgccacgaatggggaggtgggccctcgatgtggcctttttgtggaaggcggagttgaccctggggctggagcttctctactacttgcttcttcatcggcatcaacttttacaacaagtggctgacaaagagctttccattttccccctcttcatgacgatgctgcacctggccgtgatcttcctcttctccgccctgtccagggcgctggttcagtgctccagccacagggcccgtgtggtgctgagctgggccgactacctcagaagagtggctcccacagcagctctccgggaagtcgccagcctcttccgtaagcccagcgcagaggagatgctgtgcccacctgccaggcagcgtggggaagccagggagctctcccagaaccccatcatcagagcaggggaaggcaggctgcaaggccacagacaggtggccactgtgatttgtgctcctgctcctttctcggtgatgggtctgagccctgagctccagcagtgcattgtgggtaattttgcttccaggtacacaatgaccaaatcctcagctgtcctcttcatcttgatcttctctctgatcttcaagctggaggagctgcgcgcggcactggtcctggtggtcctcctcatcgccgggggtctcttcatgttcacctacaagtccacacagttcaacgtggagggcttcgccttggtgctgggggcctcgttcatcggtggcattcgctggaccctcacccagatgctcctgcagaaggctgaactcggcctccagaatcccatcgacaccatgttccacctgcagccactcatgttcctggggctcttccctctctttgctgtatttgaaggacacagggctgctcctgcgggtacttgggagcctcttccttggcgggattctcgcctttggtttgggcttctctgagttcctcctgggtcttccagaacctccagcctcactctctccattgccggcatttttaaggaagtctgcactttgctgttggcagctcatctgctgggcgatcagatcagcctcctgaactggctgggcttcgccctctgcctctcgggaatatccctccacgttgccctcaa

SEQ ID NO: 10606 - DNA, 2219 bp, Homo sapiens
  SIMILAR (1)..(909): 911254mologous to Homo sapiens Human epidermoid carcinoma clone HP10428-encoded membrane protein,accession number W88504,Smith-Waterman Score=1340.
atggggaggtgggccctcgatgtggcctttttgtggaaggcggtgttgaccctggggctggtgcttctctactactgcttctccatcggcatcaccttctacaacaagtggctgacaaagagcttccatttccccctcttcatgacgatgctgcacctggccgtgatcttcctcttctccgccctgtccagggcgctggttcagtgctccagccacagggcccgtgtggtgctgagctgggccgactacctcagaagagtggctcccacagctctggcgacggcgcttgacgtgggcttgtccaactggagcttcctgtatgtcaccgtctcgctgtacacaatgaccaaatcctcagctgtcctcttcatcttgatcttctctctgatcttcaagctggaggagctgcgcgcggcactggtcctggtggtcctcctcatcgccgggggtctcttcatgttcacctacaagtccacacagttcaacgtggagggcttcgctttggtgctgggggcctcgttcatcggtggcattcgctggaccctcacccagatgctcctgcagaaggctgaactcggcctccagaatcccatcgacaccatgttccacctgcagccactcatgttcctgggggctcttccctctctttgctgtatttgaaggtctccatttgtccacatctgagaaaatcttccgtttccagggacacagggctgctccggcgggtacttggggagcctcttccttggcgggattctcgcctttggtttgggcttctctgagttcctcctggtctccagaacctccagcctcactctctccattgccggcatttttaaggaagtctgcactttgctgttggcagctcatctgctgggcgatcagatcagcctcctgaactgggctgggcttcgccctctgcctctcgggaatatccctccacgttgccctcaaagccctgcattccagaggtaacccagagtcccttccagaagcctctggtttctgttcttctccctgtgactcttagtgattctgatgcaggaagtgtgcccggtggctctgctgccgtcactcctctaggaagatgtgggggtcatctccagagtgggtgggtggggcctgggtgactcagcacacatgcaaatcagagcaaaccaagaaaaccacgactgggcctgtaactgtggtctctctctatcccaaggtgatggtggccccaaggccttgaaggggctgggctccagccccgacctggagctgctgctccggagcagccagcgggaggaaggtgacaatgaggaggaggagtactttgtggcccaggggcagcagtgaccagccagggcaaatggcttataagcaggccactccccagccctgctgccagcactcactgtgctcaagcccgccagggctcatcatggtaacctgggaagctgtggacgggaagttccccaggtggtggggccaaagccaagggactcatgacttttgcccctcccttcagagccctggtcacacaaggggcgagcacccaggccagccctgggactggccaaaagctgggccccaaactgcgctggaatcgcaagcaggagaggggagtgggctggttcttccccaccacttccccaggctctgacaagccgagactcatttcccaaggcacagcagctttctaaagggactgaatttggaactgggttttggaccctcccaggggctggagcttcatcaccctgggcagtgtcttttctcagagagcaggtttctttatagtttggaaataaatggttcacggtccactggccgcccttgtgttgctggaaacgtgggggcagggaggggacagtgtgggcctggcctctcctttcctttccctgcctggagccttttttcaaatgtctggtcttaagccaggcctccttcattttctcgctcctgttagaacaccaggtcccctccccagtggggccccactgcacctgctggcaggaaataaatgaatgtttactgagtactgcattctggagaccttacatgttttcacagcctagtttgaatactggctttgtcactagctgtgtgaccctaagcaaatgacctaacctgtctgtgccgtagttttttaatctgtgaaatggggataatgtctatctcagagtccttttgaagattgagtcattattagtaacagattaaatgttatataagca

SEQ ID NO: 10607 - DNA, 1029 bp, Homo sapiens
  SIMILAR (337)..(660): 951254mologous to Homo sapiens Human secreted protein, SEQ ID NO: 6436,accession number G02355,Smith-Waterman Score=548.
atggccttcacagcaacctggatggaatttgagactattattctaagtggagtaactcaggaatggaaaaccaaacatctgactcgcacagcaccatgcatttactcatcacttgtgttaattagatccagtccaggtttggcgggaaatgctgttgctggattgcaaccccgaggtgagattcgggctcacagagcccgagcttttgtcttgcaggctcaagcttctagattcgtcttctcgttaatgcggggacggaccactgggcgctgcctggtcagagctggttgtgaagggcggggaggtttccagcccggaggggcgcgggactggacaaaggtggatggtctgaagcatttgctggagacaggggcctcggtcaacgcacccccggatccctgcaagcagtcgcctgtccacttagccgcaggaagcggccttgcttgctttcttctctggcagctgcaaacgggcgctgacctcaaccagcaggatgttttaggagaagctccactacacaaggcagcaaaagttggaagcctggagtgcctaagcctgcttgtagccagtgatgcccaaattgatttatgtaataagaacgggcaaacagctgaagatctcgcttggtcatgtggatttccagactgtgccaagtttcttacaacaattaaatgtatgcagacaataaaagcaagtgaacaccctgacaggaatgattgtgttgccgtgctcagacagaaacggagtctcggaagtgtagaaaataccagtgggaaaaggaagtgctggggaggacagagtggttttaccacttcggagttggaggagacagaggaggacagtgacctgtcagattatggtgatgatgtggatgggaggaaagacgccttggctgaaccatgtttcatgttgattggggagatttttgaacttcgaggaaagcctcagtaccagctagagatatggcaggtgcccacgggcacacctgaccacctcgaagaggaagcaaatgagaagagcaagggttag

SEQ ID NO: 10608 - DNA, 2869 bp, Homo sapiens
  SIMILAR (1174)..(2223): 961254mologous to Homo sapiens MSTP043,accession number AF113223,Smith-Waterman Score=1748.
ggctcagactgaaagtaattagaactggaaattagtaaccacttttttctaaacttttcccctttatttttattttcaatgtaaagtaggactttgctataaaacacgtgaccctagggaaacttttgaagttagcggtatagagagtaccaccaccagacgccaccatgcctgcggaaggaggaaaaacggacatggaaaggattggcctctttagtgagatggaatatattactgtgggtgataaatatgtgtcacaatttaatcgaccctttaatgaggctgcaagcaaaaataaacagatgctacctggagggtccaaagaaatgtcagatcttcaggcaggttattttgatccccattttgtaaggatttttgaaggtgaaggctacataaatctgaatcaaaaagcgaatgaagagcaccatcgtttacttaaaggagcaccatttaagttaaatcttcacccaagggactattttgacgctaatccttatttttctgaggaatctttaccaccaattaaaaaagaagagaagaagaaaacaatttcaaatacttttaaaccgtcttctcctggtaaaaagaatgaaattccacaattagttggtgaaatttatcagaatttctttgtggagagcaaagaaatatctgtggaaaaatcactttacaaagaaattcagcagtgtcttgtaggaaataaaggtattgaagtattctacaaaatccaggaagatgtttatgagaccctaaaggataggtattacccttcatttattgtcagtgacctgtatgagaaattgttgataaaagaggaagaaaaacatgcctcacagatgatttccaacaaggatgagatgtcctactggtcctctgaggatcaggacagcagacctgactttcgtgggtaccgcttgaaagcctggggaaggcagattttacgaatcggctggattagtgtccgatgttggatgttccagttggaatcagcaaagggcctcttggattggagccgcatgaggaagacagacacagagagagagagagagagagaagagaggatgagggaggaggaggggacaaagggcccaagagatgaggctggtgaggaagccgtggatgatggtaccaatcagatcaatgaacaagccagttttgctgtaaacaaactcgcgagaactaaatgagagacttgaatataaaaggcaagcgctaaattctattcaaaatgcaccaaaacctgacaagaagattgtttccaagttgaaggatgaaataatcctaatagagaaagaacgcacagaccttcagctgcacatggcaagaacggattggtggtgtgaaaaccttggcatgtggaaagcctccatcaccagtggagaggttacagaagagaatggtgagcaattgccatgttactttgtcatggtaagcctacaagaagttggaggagttgaaactaagaactggacggtccccaaaaggctcagcgagtttcataatttacaccggaaactcagtgagtgcgttccttctttaaaaaaagaccagttgccttctcttagcaagctgcctttcaaatctatagatcacacgtttatggaaaagtttgagaatcaattaaataagtttttacagaatctgctttcagatgaaagactgcgtcagagtgaagcactttatgccttcttgagcccttctcctgactacctctagggtatcgacgtgcagggaaaaaaaaattctttttcattatcctcatttttggaaagacttcctcgcgacttcttctcccaccaggaggaggagacagaggaggacagtgacctgtcagattatggtgatgatgtggatgggaggaaagacgccttggctgaaccatgtttcatgttgattggggagatttttgaacttcgaggaatgtttaaatgggtgagaagaacattaattgccctcgttcaggtcacttttggaagaaccatcaacaaacaaatccgggacacagtcagctggattttcagtgagcaaatgttggtttactacatcaatattttccgggatgctttttggccaaatgggaagttggcaccaccgaccacaatcagaagcaaagagcaaagtcaggaaacaaaacagagagcacagcaaaagctgcttgaaaacattccagatatgcttcagagccttgttggacagcaaaatgcccgccacggtattattaaaaatattccaatgcactgcaagaaacaagagccaacaagcatctgttatatgcgctgatggaactgctgctaattgaactgtgtcctgagctgagagttcatttagatcaactttaaagctgggccaagtttgagactacacaaataaaccaccaggaaaaatgtctggtggtaataataggacatggaaacattttcctctttttccacagaggggctttaactgaggaaccgtattgatttttattttagttacctcccctctagttttatgtgaaaattagtagaaatcagggaggacgggacttatgctgtggtaggcaacagaaaaaaacttctattgattttaatttaatatgaatactttaaagatcaacataccgattgaaatacaaatgttaatatgtgagaacctaggaagtattttaaatatttatgaaaatattttgttttaaaatgaactatgaatattgtacagttaatttcctcactgaggactgtgaacattcttatattatttcatgtatattgaagaacattgttatgcaatgctttgtgtaaagttattgtgaagattttattgtctttatttttaccaaagatttcccatagtttgagcattcaaagcaataaaatataaaaatgaa

SEQ ID NO: 10609 - DNA, 410 bp, Homo sapiens
  SIMILAR (251)..(325): 481254mologous to Homo sapiens Human 5' EST related polypeptide SEQ ID NO:1495,accession number Y65334,Smith-Waterman Score=59.
taagctcagggtcaagttctgagcaaaaagtgtcaaggagcctttttgcaacctcctataatattgaaacagattctgtgccctttaaaggagataataactaacatctggggagcgctttacaatttaaaaaaggcctttcacacacaggcctgtttcatcttcacaacaatcttataaaacagatatattgttcccatttcccaaataatgaaacggaagcgccgaaaagtaagtattgtgctcaatgtcacaggctactaagtggcatgggaaaccaggtctcctgaatctagcctccgggtttctgctctccaccagcccaacctcagaaaattctaataggtgcagggggctttggcaaatagacccatgggaagaaggggaaacttatgtctagttaagtcgct

SEQ ID NO: 10610 - DNA, 985 bp, Homo sapiens
  SIMILAR (1)..(81): 851254mologous to Homo sapiens ribosomal protein L6,accession number X69391,Smith-Waterman Score=123.
  misc_feature (1)...(985): n = a,t,c or g
atggtgggtgaaaaggttgagaagccagatcctaaagagaagaaaccagaagccaagaaggctgatgctggtggcaagatcctctacaaagaacacgccagaaatctgtcactgccacctcaaccaaaattgataatcagcaatgtaaaaatcccaaaacatcctgctgacgcttacttcaagaagcagcagctgtggaagcccagaaacaggaagctggctggcaagctcagcacgccggctgcccgggacgccccgagggcgcgccctccgcacgaggccccgcccccacccccacctcccgagctgcggtaccgggttccgccccggcccgcgccctctagctggcgccacccaagcggcaagggacgtcgcggccctcccgggattggtgggaggatcgtgggggagcggcagctcaggacggaatacggcaatgaccgccccggtcgcgagggtgaccctgccccgggctgctgtgggggcgcaagaaccctttcactttacggcgagattaagctcagggtcaagttctgagcaaaaagtgtcaaggagcctttttgcaacctcctataatattgaaacagattctgtgccctttaaaggagataataactaacatctggggagcgctttacaatttagaaaaggcctttcacacacaggcctgtttcatcttcacaacaatcttataaaacagatatattgttcccatttcccaaataatgaaacggaagcgccgaaaatatctcctatagggctcttcaaactgtggtcaacttagtaaatgatgttgacagtggaagtgtgatcattttattttcctgcctttggaattgaagattgtaattttgcaaaaattttgttgaagatgatgtagctttggttcaaagagctggagtacaatggcannnnnnnnnnnnnnnnnnnnnnnnnnnnnnnnnnnnccaagtctcttcttcggcctctcagacatggtaccatc

SEQ ID NO: 10611 - DNA, 585 bp, Homo sapiens
  SIMILAR (293)..(583): 891254mologous to Homo sapiens neoplasm-related C140 product,accession number S71022,Smith-Waterman Score=418.
agagtctcattctgtaggccaggccggaggacgggaatgagaaaggccatgtacaagaggaagtagtcagccgctaaatccgagatggcgggtgaaaaagttgagaagccagatactaaagagaagaaacccgaagccaagaaggttgatgctggtggcaaggtgaaaaagggtaacctcaaagctaaaaagcccaagaaggggaagccccattgcagccgcaaccctgtccttgtcagaggaattggcaggtattcccgatctgccatgtattccagaaaggccatgtacaaaaaggaagtactcagccgctaaatccaaggttgaaaagaaaaagaaggagaaggttctcgcaactgttacaaaaccagttggtggtgacaaggtcggcgggacccgggggggtaaaacttcgcaaaaatgcctagaatataatcctactgaagatgtgcctcgaaagctgttgagccacggcaaaaaacccttcagtcagcacgtgagaaaactgcgagccagcattacccccgggaccattctgatcatcctcactggacgccacaggggcaagagggtggttttcctgaa

SEQ ID NO: 10612 - DNA, 285 bp, Homo sapiens
  SIMILAR (145)..(282): 821254mologous to Homo sapiens alpha-catenin,accession number D13866,Smith-Waterman Score=195.
atgcatcgccctctactgccacctgctcaacatctgcagcaaggtcaaggccgagatgcagaatctcggcagggagttcattgtccctggaatggacagcgctacgtccctgatctgggcaaccaaggacttatgaatgctgtgatagaggcaccagagaaaaagcccttgttgaagagagagaaacaggatgagtcacagagcgagattaaatgggcatctcagaagaagcacttgaacccggtgcaggccctcagcgagttcaaagccatggacagcatctaa

SEQ ID NO: 10613 - DNA, 3526 bp, Homo sapiens
  SIMILAR (5)..(2797): 1001254mologous to Homo sapiens alpha2(E)-catenin,accession number U03100,Smith-Waterman Score=4682.
ggaaatgactgctgtccatgcaggcaacataaacttcaagtgggatcctaaaagtctagagatcaggactctggcagttgagagactgttggagcctcttgttacacaggttacaacccttgtaaacaccaatagtaaagggccctctaataagaagagaggtcgttctaagaaggcccatgttttggctgcatctgttgaacaagcaactgagaatttcttggagaagggggataaaattgcaaaagagagccagtttctcaaggaggagcttgtggttgctgtagaagatgttcgaaaacaaggtgatttgatgaaggctgctgctggagagttcgcagatgatccctgctcttctgtgaagcgaggcaacatggttcgggcagctccagctttgctctctgctgttacccggttgctcattttggctgacatggcagatgtctacaaattacttgttcagctgaaagttgtggaagatggtatattgaaactgaggaatgctggcaatgaacaagacttagggaatcagtataaagccctaaaacctgaagtggataagctgaacattatggcagcaaaaagacaacaggaattgaaagatgttgggcatcgtgatcagatggctgcggctagaggaatcctgcagagcaacgttccgatcctctatactgcatcccaggcatgcctacagcaccctgatgtcgcagcctataaggccaacagggacctgatatacaagcagctgcagcaggcggtcacagggatttccaatgcagcccaggccactgcctcagacgatgcctcacagcaccagggtggaggaggaggagaactggcatatgcactcaataactttgacaaacaaatcattgtggaccccttgagcttcagcgaggagcgctttaggccttccctggaggagcgtctggaaagcatcattagtggggctgccttgatggccgactcgtcctgcacgcgtgatgaccgtcgtgagcgaattgtggcagagtgtaatgctgtccgccaggcctgcaggacctgcgtttcggagtacatgggcaatgctggacgtaaagaaagaagtgatgcactcaattctgcaatagataaaatgaccaagaagaccagggacttgcgtagacagcttcgcaaagctgtcatggaccacgtttcagattctttcctggaaaccaatgttccacttttggtattgattgaagctgcaaagaatggaaatgagaaagaagttaaggaatatgcccaagttttccgtgaacatgccaacaaattgattgaggttgccaacttggcctgttccatctcaaataatgaagaaggtgtaaagcttgttcgaatgtctgcaagccagttagaagccggttgtcctcaggttattaatgctgcaacctgggctttagcaccaaaaccacagagtaaactggcccaagagaacatggatctttttaaagaacaatgggaaaaacaagtccgtgttctcacagatgctgtcgatgacattacttccattgatgacttcttggctgtctcagagaatcacattttggaagatgtgaacaaatgtgtcattgctctccaagagaaggatgtggatggcctggaccgcacagctggtgcaattcgaggccgggcagcccgggtcattcacgtagtcacctcagagatggacaactatgagccaggagtctacacagagaaggttctggaagccactaagctgctctccaacacagtcatgccacgttttactgagcaagtagaagcagccgtggaagccctcagctcggaccctgcccagcccatggatgagaatgagtttatcgatgcttcccgcctggtatatgatggcatccgggacatcaggaaagcagtgctgatgataaggacccctgaggagttggatgactctgactttgagacagaggattttgatgtcagaagcgagacgagcgtccagacagaagacgatcagctgatagctggccagagtgcccgggcgatcatggctcagcttccccaggagcaaaaagcgaagattcgggaacaggtggccagcttccaggaagaaaagagcaagctggatgctgaagtgtccaaatgggacgacagtggcaatgacatcattgtgctggccaagcagatgtgcatgattatgatggagatgacagactttacccgaggtaaaggaccactcaaaaatacatcggatgtcatcagtgctgccaagaaaattgctgaggcaggatccaggatggacaagcttggccggaccattcgagaccattgccccgactcggcttgcaagcaggacctgctggcctacctgcaacgcatcgccctctactgccaccagctgaacatctgcagcaaggtcaaggccgaggtgcagaatctcggcggggagcttgttgtctctgggaactgtgacacctgcggggcactgcaagggctgaaaggctggcctcctcccctttgcctggccactcactgggtggacagcgccatgtccctgatccaggcagccaagaacttgatgaatgctgtggtgcagacagtgaaggcatcctacgtcgcctctaccaaataccaaaagtcacagggtatggcttccctcaaccttcctgctgtgtcaatgaagatgaaggcaccagagaaaaagccattggtgaagagagagaaacaggatgagacacagaccaagattaaacgggcatctcagaagaagcacgtgaacccagtgcaggccctcagcgagttcaaagctatggacagcatctaagtctgcccaggccggccgcccccacccctctggctcctgaatatcagtcactgttcgtcactcaaatgaatttgctaaatacaacactgatactagattccacagggaaatgggcagactgaaccagtccaggtggtgaattttccaagaacatagtttaagttgattaaaaatgcttttagaatgcaggagcctacttctagctgtattttttgtatgcttaaataaaataaaattcataaccaagagatccacattagcttgttagtaatgctctgaccaagccgagatgccattctcttagtgatggcggcgttaggtttgagagaaggaattggctcaacttcagttgagagggtgcagtccagacagcttgactgcttttaaatgaccaaagatgacctgtggtaagcaacctggcatcttaggaagcagtccttgagaaggcatgttccagaaaggtctctgaggacaaactcactcagtaaaacataatgtatcatgaagaaaactgattctctatgacatgaaatgaaaattttaatgcattgttataattactaatgtacgctgctgcaggacattaataaagttgcttttttaggctacagtgtctcgatgccataatcagaacacactttttttcctctttctcccagcttcaaatgcacaattcatcattgggctcacttctaataactgcagtgtttccgccttgcgttgcag

SEQ ID NO: 10614 - DNA, 3828 bp, Homo sapiens
  SIMILAR (1560)..(2855): 761254mologous to Homo sapiens alpha1(E)-catenin,accession number L23805,Smith-Waterman Score=1532.
gtcctcctcctagccggactggagggagacaaagcagcgcccgtctgcttcgggcctctggaatttagcgctcgcccagctagccgcagaaatgactgctgtccatgcaggcaacataaacttcaagtgggatcctaaaagtctagagatcaggactctggcagttgagagactgttggagcctcttgttacacaggttacaacccttgtaaacaccaatagtaaagggccctctaataagaagagaggtcgttctaagaaggcccatgttttggctgcatctgttgaacaagcaactgagaatttcttggagaagggggataaaattgcgaaggagagccagttttctctaggaatagcttttggctgctgtagaatacgttcgaaaacaaggtgatttgatgaagactgctgcgggagagttcgcagatgatccctgttcttctgtggagcaaggcaacatggttcaggcagcttgaactttgctctctgctgttacctgcttgctgattttggctgaacatgggaaatgtctacacattacttattcagctgaaagttgtggaagatgatatcttgaaattgaggaatgctggcaatgaacaagacttaggaatatagtataaagccctaaaacccgaagtgaataaggtgaacattatggcagtcaaaagacaacaggaactgaaagatgttggccatcgtgatcagatggctgcagctagaggaatcctgcagaagaatgttctgatcttctatacggcatcccgggcatgcctacagcaccctgatgttgcagcctataaggccaacagggacctgatatacaagcagctgcagcaggccatcacaggcatttccaatgtagcccaggccactgcctcagacgatgcctcccatcaccagggtggaggaggagtagaactagcatatgtactcaataactttgacaaacaaatcattgtggaccccttgagcttcagcgaggagcgctttaggccttccctggaggagcgtctggaaagcatcattagtggggctgccttgatggccgactcgtcctgcacgcgtgatgaccgtcgtgagcgaattgtggcagagtgtaatgctgtccgccaggccctgcaggacctgcgtttcggagtacatgggcaatgctggacgtaaagaaagaagtgatgcactcaattctgcaatagataaaatgaccaagaagaccagggacttgcgtagacagcttcgcaaagctgtcatggaccacgtttcagattctttcctggaaaccaatgttccacttttggtattgattgaagctgcaaagaatggaaatgagaaagaagttaaggaatatgcccaagttttccgtgaacatgccaacaaattgattgaggttgccaacttggcctgttccatctcaaataatgaagaaggtgtaaagcttgttcgaatgtctgcaagccagttagaagccggttgtcctcaggttattaatgctgcaacctgggctttagcaccaaaaccacagagtaaactggcccaagagaacatggatctttttaaaagaacaatgggaaaaacaagtccatgttctcacagatgctgctgatgatattacttccattgatgacttcttggctgtctcagagaatcacattttggaagatgtgaacaaatgtgtcattgctctccaagagaaggatgtggatggcctggaccgcacagctggtgcaattcgaggccgggcagcccgggtcattcacgtagtcacctcagagatggacaactatgagccaggagtctacacagagaaggttctggaagccactaagctgctctccaacacagtcatgccacgttttactgagcaagtagaagcagccgtggaagccctcagctcggaccctgcccagcccatggatgagaatgagtttatcgatgcttcccgcctggtatatgatggcatccgggacatcaggaaagcagtgctgatgataaggacccctgaggagttggatgactctgactttgagacagaggattttgatgtcagaagcgagacgagcgtccagacagaagacgatcagctgatagctggccagagtgcccgggcgatcatggctcagcttccccaggagcaaaaagcgaagattcgggaacaggtggccagcttccaggaagaaaagagcaagctggatgctgaagtgtccaaatgggacgacagtggcaatgacatcattgtgctggccaagcagatgtgcatgattatgatggagatgacagactttacccgaggtaaaggaccactcaaaaatacatcggatgtcatcagtgctgccaagaaaattgctgaggcaggatccaggatggacaagcttggccggaccattcgagaccattgccccgactcggcttgcaagcaagcccggcctgctcgactcagcctgccctgacttggcctgctggcctacctgcactgcatcgccctctactgccacccagctgaacatctgcagcaaggtcaaggccgaggtgcagaatctcggcggggagcttgttgtctctggggtggacagcgccattgtccctgatctgggcaaccaaagaacttgatgaaatgctgtggtgcagacagtgaaggcatcctacgtcgcctctcccaataacaaaaagtcacagggtatggcttcccctcaaccttcctgctgtgtcatggaagatgaaggcaccagagaaaaagccattggtgaagagagagaaacaggatgagacacagaccaagattaaacggggcatctcagaagaagcacgtgaacccggtgcaggccctcagcgagttcaaagctatggacagcatctaagtctgcccaggccggccgcccccacccctcggggctccctgaatattcagttcactgtttcgttcactcaaatggaattttgcttaaattacaacactggatactagggttccacaggggaaatgtggcagacttgaaccagtccaggtggtgaattttccaagaacatagtttaacgttgattaaaaatgcttttacgaatgcaggagcctacttctagctgtattttttgtatgcttaaataaaaataaaaattcataaccaaacgagaatcccacattaagcttgttagtaatgctctgaccaagccgagatgcccattctcttagtgatggcggcgttaggggtttgagagaagggaatttggctcaacttcagttgagagggtgcagtccagacagcttgactgcttttaaatgaccaaagatgacctgtggtaagcaacctgggcatcttaggaagcagtccctggagaaggcatgttccccagaaaggtctctggagggacaaactcactcagtaaaacataatgtatcatcatgaagaaaactgattctctatgacatgaaatgaaaattttaatgcattgttataattactaatgtaccgctgctgcaggacattaataaagttgcttttttaggctacagtgtctcgatgccataatcagaacacactttttttcctctttctcccagcttcaaatgcacaattcatcattgggctcacttctaataactgcagtgtttcccgccttgggcttgcagcagaaaaacctgacaacatagagtttgctaaggcagtaatttagactttaccttatttgtgattactgtagtgattgattgattgattactattaactacaaggtataatttactatcaccttatttaaattttatgaattaatttgaatgtttttttacactaactaacttttcccaataaagtccactatgaaaccacgac

SEQ ID NO: 10615 - DNA, 4548 bp, Homo sapiens
atgaggccgcggaccctcgcggtgagtgttacagctcttaaggtggcgcgtctagagtctgtcccttctgatgttcagatgtgttcggagtttcttccttctggtgggctcgtggtctcgctgggctcaggagtgaagctgcagatcttcgtggtgagtgttacagctcataaaagcagcgtggacccaaagaactcaggagcccagctggcttcagctagtggatcccgcaccagggctgcaggtggagctgcctgccagtcctgcgccgtgcgctcgcattccttagcccttaggtggtcgatgggactgggcgccgtggagcagggggcggtgctcgtcagggaggctccggccgcacaggagcccatggagtgggtgggaggctcaggcatggcgggctgcaggtcccgagccttgctccacgggaaggcagctaaggcccagcgagaaacagagcacagcgccgaaaaggaaattgcagccgaaaagaaaaccaccaatggaaatccagatctaccccctcgtgattgtgatcgcaggatgccagaccagtttgaccaggcggttgtgctgaaccagctgcggtactcagggatgctggagactgtgagaatccgcaaagctgggtataaagtgctgatgaggaatctggctctgcctgaggacgtccgagggaagtgcacgagcctgctgcagctctatgatgcctccaacagcgagtggcagctggggaagaccaaggtctttcttcgagaatccttggaacagaaactggagaagcggagggaagaggaagtgagccacgcggccatggtgattcgggcccatgtcttgggcttcttagcacgaaaacaatacagaaaggtcctttattgtgtggtgataatacagaagaattacagagcattccttctgaggaggagatttttgcacctgaaaaaggcagccatagttttccagaagcaactcagaggtcagattgctcggagagtttacagacaattgctggcagagaaaagggagcaagaagaaaagaagaaacaggaagaggaagaaaagaagaaacgggaggaagaagaaagagaaagagagagagagcgaagagaagccgagctccgcgcccagcaggaagaagaaacgaggaagcagcaagaactcgaagccttgcagaagagccagaaggaagctgaactgacccgtgaactggagaaacagaaggaaaataagcaggtggaagagatcctccgtctggagaaagaaatcgaggacctgcagcgcatgaaggagcagcaggagctgtcgctgaccgaggcttccctgcagaagctgcaggagcggcgggaccaggagctccgcaggctggaggaggaagcgtgcagggcggcccaggagttcctcgagtccctcaatttcgacgagatcgacgagtgtgtccggaatatcgagcggtccctgtcggtgggaagcgaattttccagcgagctggctgagagcgcatgcgaggagaagcccaacttcaacttcagccagccctacccagaggaggaggtcgatgagggcttcgaagccgacgacgacgccttcaaggactcccccaaacccagcgagcacggacactcagaccagcgaacaagtggcatccggaccagcgatgactcttcagaggaggacccatacatgaacgacacggtggtgcccaccagccccaacggcgactacgactacgaccaggatgactatgaggacggtgccatcacttccggcagcagcgtgaccttctccaactcctacggcagccagtggtcccccgactaccgctgctctgtggggacctacaacagctcgggtgcctaccggttcagctctgagggggcgcagtcctcgtttgaagatagtgaagaggactttgattccaggtttgatacagatgatgagctttcataccggcgtgactctgtgtacagctgtgtcactctgccgtatttccacagctttctgtacatgaaaggtggcctgatgaactcttggaaacgccgctggtgcgtcctcaaggatgaaaccttcttgtggttccgctccaagcaggaggccctcaagcaaggctggctccacaaaaaaggggggggctcctccacgctgtccaggagaaattggaagaagcgctggtttgtcctccgccagtccaagctgatgtactttgaaaacgacagcgaggagaagctcaagggcaccgtagaagtgcgaacggcaaaagagatcatagataacaccaccaaggagaatgggatcgacatcattatggccgataggactttccacctgattgcagagtccccagaagatgccagccagtggttcagcgtgctgagtcaggtccacgcgtccacggaccaggagatccaggagatgcatgatgagcaggcaaacccacagaatgctgtgggcaccttggatgtggggctgattgattctgtgtgtgcctctgacagccctgatagacccaactcgtttgtgatcatcacggccaaccgggtgctgcactgcaacgccgacacgccggaggagatgcaccactggataaccctgctgcagaggtccaaaggggacaccagagtggagggccaggaattcatcgtgagaggatggttgcacaaagaggtgaagaacagtccaaagatgtcttcactgaaactgaagaaacggtggtttgtactcacccacaattccctggattactacaagagttcagagaagaacgcgctcaaactggggaccctggtcctcaacagcctctgctctgtcgtccccccagatgagaagatattcaaagagacaggctactggaacgtcaccgtgtacgggcgcaagcactgttaccggctctacaccaagctgctcaacgaggccacccggtggtccagtgccattcaaaacgtgactgacaccaaggccccgatcgacacccccacccagcagctgattcaagatatcaaggagaactgcctgaactcggatgtggtggaacagatttacaagcggaacccgatccttcgatacacccatcaccccttgcactccccgctcctgccccttccgtatggggacataaatctcaacttgctcaaagacaaaggctataccacccttcaggatgaggccatcaagatattcaattccctgcagcaactggagtccatgtctgacccaattccaataatccagggcatcctacagacagggcatgacctgcgacctctgcgggacgagctgtactgccagcttatcaaacagaccaacaaagtgccccaccccggcagtgtgggcaacctgtacagctggcagatcctgacatgcctgagctgcaccttcctgccgagtcgagggattctcaagtatctcaagttccatctgaaaaggatacgggaacagtttccaggaaccgagatggaaaaatacgctctcttcacttacgaatctcttaagaaaaccaaatgccgagagtttgtgccttcccgagatgaaatagaagctctgatccacaggcaggaaatgacatccacggtctattgccatggcggcggctcctgcaagatcaccatcaactcccacaccaccgctggggaggtggtggagaagctgatccgaggcctggccatggaggacagcaggaacatgtttgctttgtttgaatacaacggccacgtcgacaaagccattgaaagtcgaaccgtcgtagctgatgtcttagccaagtttgaaaatgcgttgaccggaaagctgttgactgtctcctttcaggcccacgaagcggttatccatggccaccatccagccccggaagaaaacctccaggttcttgctgccctgcgactccagtatctgcagggggattatactctgcacgctgccatcccacctctcgaagaggtttattccctgcagagactcaaggcccgcatcagccagtcaaccaaaaccttcaccccttgtgaacggctggagaagaggcggacgagcttcctagaggggaccctgaggcggagcttccggacaggatccgtggtccggcagaaggtcgaggaggagcagatgctggacatgtggattaaggaagaagtctcctctgctcgagccagtatcattgacaagtggaggaaatttcagggaatgaaccaggaacaggccatggccaagtacatggccttgatcaaggagtggcctggctatggctcgacgctgtttgatgtggagtgcaaggaaggtggcttccctcaggaactctggttgggtgtcagcgcggacgccgtctccgtctacaagcgtggagagggaagaccactggaagtcttccagtatgaacacatcctctcttttggggcacccctggcgaatacgtataagatcgtggtcgatgagagggagctgctctttgaaaccagtgaggtggtggatgtggccaagctcatgaaagcctacatcagcatgatcgtgaagaagcgctacagcacgacacgctccgccagcagccagggcagctccaggtga

SEQ ID NO: 10616 - DNA, 2637 bp, Homo sapiens
  SIMILAR (58)..(1227): 951254mologous to Homo sapiens Human homologue of UNC-53 (Hs- UNC-53/2) sequence,accession number Y85565,Smith-Waterman Score= 1874.
atggcaggacttgggatgggagaggaagggattcctggtggagagcgctgggagcacaagcgcagggcacacatcgtgagcaatcacagaattacgcgtacgggcacacacccatacacgcacagtccatacccgcacaaagacaacgttcacacagcccgcagggagcacaagacacaggatttaggcacaatacgttccgtgggacacagttcagaacacacccagcatacaaccccagacaccgttccgccgctggtggttatagtatgccgcgtttgttaccgccccccgcacggggagacccgcgccgagtacacccggcaccgcgggcagaacaggaggaccaaattctgggtcggcatcaaggaggaaaagaacctggcgcagcaggaacgaactgaagagcaactggcaaacatcgcgcgcggtggttatgtgctgaaagactgcgccggtcagccggaactgattttcatcgctaccggttcagaagttgaactggctgttgctgcctacgaaaaactgactgccgaaggcgtgaaagcgcgcgtggtgtccatgccgtctaccgacgcatttgacaagcaggatgctgcttaccgtgaatccgtactgccgaaagcggttactgcacgcgttgctgtagaagcgggtattgctgactactggtacaagtatgttggcctgaacggtgctatcgtcggtatgaccaccttcggtgaatctgctccggcagagctgctgtttgaagagttcggcttcactgttgataacccactagcttcgcgcgcggttcggttgcgtttgccgttcaacaacgatcaggtggaagcggcggtgggctggaagctggcggttgagcgccacaacggaccgacggcactgatcctctcaaggcagaatctggcccaggtggaacgtacgccggatcaggttaaagagattgctcgtggcggttatgtgctgaaagacagcggcggtaagccagatattattctgattgccaccggttcagagatggaaattaccctgcaagcggcagagaaattagcaggagaaggtcgcaatgtacgcgtagtttccctgccctcgaccgatattttcgacgcccaggatgaggaatatcgggagtcggtgttgccttctaacgttgcggctcgcgtggcggtggaagcaggtattgccgattactggtacaagtatgttggtctgaaaggggcaattgtcgggatgacgggttacggggaatctgctccggcggataagctgttcccgttctttggctttaccgccgagaatattgtggcaaaagcgcataaggtgctgggagtgaaagccgggtcacatattcctcggaagaagtatgatgtgcccggcaagaagagcttttctcccgtgaaatatagcacaattgggagccccagtccagagagaccagtgagtataaccaccatacccaactcgtttgtgatcatcacggccaaccgggtgctgcactgcaacgccgacacgccggaggagatgcaccactggataaccctgctgcagaggtccaaaggggacaccagagtggagggccaggaattcatcgtggtggagaagctgatccgaggcctggccatggaggacagcaggaacatgtttgctttgtttgaatacaacggccacgtcgacaaagccattgaaagtcgaaccgtcgtagctgatgtcttagccaagtttgaaaaagagccagttggtaagcatttaccaacatatgatggccagatcgccatgggcttagaaagtacagcttctgtcaccaggaaacattcatcaccttcgtcattgcagaatgctctaagttgtgagactgctacttcgcttattgaacgccgtgtacgaatggcgcttggcaccggcgatcgtcgcggcctgaatacctggctggcgcgtctgcctatggaagcgaaagagaaagatgaatggcgttactggcaggcggatttattgctggaacgcggacgtgaagctgaagcaaaagagattttgcatcaactcatgcaacagcgtggtttctacccgatggttgcagcacaacgcatcggcgaagagtatgagctgaagattgataaagcgccgcagaatgttgacagcgccctgactcaggggccggagatggcgcgcgtgcgcgagttgatgtactggaatctcgataataccgcgcgtagcgagtgggccaatctggtgaagagcaagtcaaaaacagagcaggctcaactggcgcggtatgctttcaacaaccaatggtgggatcttagcgttcaggcaacgatcgccgggaagctgtgggatcatctggaagagcgattcccgctggcttacaacgatcttttcaaacgctacaccagcggtaaggagatcccgcaaagctatgcgatggcgattgctcgtcaggagagcgcctggaatccgaaagtgaaatcaccggtaggggccagcggcttgatgcagattatgcctggtacagcgacccatacggtgaagatgttctctattcccggttatagcagtcctgcgcaattgctggatccggaaacgaatatcaacattggcaccagttacctgccatatgttatcagcagttcggcataa

SEQ ID NO: 10617 - DNA, 2943 bp, Homo sapiens; identical to SEQ ID NO: 3172
  SIMILAR (52)..(177): 971254mologous to Homo sapiens nel homolog,accession number U57523,Smith-Waterman Score=247.

SEQ ID NO: 10618 - DNA, 404 bp, Homo sapiens
  SIMILAR (1)..(342): 941254mologous to Homo sapiens Human RNA-associated protein- 13 (RNAAP-13),accession number Y70232,Smith-Waterman Score=577.
gatacgggaacagtttccaggaagcgagatggaaaaatacgctctcttcacttacgaatctcttaagaaaaccaaatgccgagagtttgtgccttcccgagatgaaatagaagctctgatccacaggcaggaaatgacatccacggtctattgccatggcggcggctcctgcaagatcaccatcaactcccacaccaccgctggggagtttgcggtcggggtccccacccttttcgggactggcccccccgacgccagtgccctctgccactgccgactggagacggccactggcaatcattcagtctccgtcgggctccaaaaacaaggaagagttcacagtgagcagtggaccgtgctcatgcgcacccgggcatctgccttggcacagcagctggctttgc

SEQ ID NO: 10619 - DNA, 549 bp, Homo sapiens
  SIMILAR (241)..(342): 1001254mologous to Homo sapiens Human RNA-associated protein- 13 (RNAAP-13),accession number Y70232,Smith-Waterman Score=179.
atggtgcccacaccgatggagaccacacaccttgacaccgacagcagcgcctgcggtaacaaaaagcccagaggctacgcacctgtacggccaggtttcctggaattcacagaacctgcacctcgaaggacagctgcagtcagcttccttacagggttcttttatgttgaagtaatagggggatcctctagattttggatgtcccctccgaggcctctttttgagagactcaaggcccgcatcagccagtcaaccaaaaccttcaccccttgtgaacggctggagaagaggcggacgagcttcctagaggggaccctgaggcggagcttccggacaggatccgtggtccggcagaaggtcgaggaggagcagatgctggacatgtggattaaggaagaagtctcctctgctcgagccagtatcattgacaagtggaggaaatttcagggaatgaaccaggaacaggccatggccaagtacatggccttgatcaaggagtggcctggctatggctcgacgctgtttgatgtggagggaacagacacctaa

SEQ ID NO: 10620 - DNA, 558 bp, Homo sapiens
  SIMILAR (112)..(507): 521254mologous to Homo sapiens myosin X,accession number AF132021,Smith-Waterman Score=294.
atgcaaaactacagaattatagacaagacgagaagagaaacccgcaacagcaaaaaaacaaacaaagaaggaagagaaaaaacagaaagagagggagcagaaaacagacaacagaggacgaaccaagggaagaaagtacaacaggaagcacagcggagaggcatacgatgggaccgagaagacacgggaacaccgccaggaccgacaagtgacaaaaaagacaacgaagaaagcgaagaccggaacaacgcaaggaacaaaagagaacacaacgagaaggaaggaacaacggtcggaccgtgggttggcgttgacgtgcgtgtgctgggcacccctgccattgcaggctactggaacgtcaccgtgtacgggcgcaagcactgttaccggctctacaccaagctgctcaacgaggccacccggtggtccagtgccattcaaaacgtgactgacaccaaggccccgatcgacacccccacccagcagctgattcaagatatcaaggaagaaacttacctttccttctacggcgttccttccaaccccaaaggggcttaa

SEQ ID NO: 10621 - DNA, 627 bp, Homo sapiens
  SIMILAR (172)..(627): 1001254mologous to Homo sapiens myosin X,accession number AF132022,Smith-Waterman Score=784.
gtggtggagaagctgatccgaggcctggccatggaggacagcaggaacatgtttgctttgtttgaatacaacggccacgtcgacaaagccattgaaagtcgaaccgtcgtagctgatgtcttagccaagtttgaaaatgcgttgaccggaaagctgttgactgtctcctttcaggcccacgaagcggttatccatggccaccatccagccccggaagaaaacctccaggttcttgctgccctgcgactccagtatctgcagggggattatactctgcacgctgccatcccacctctcgaagaggtttattccctgcagagactcaaggcccgcatcagccagtcaaccaaaaccttcaccccttgtgaacggctggagaagaggcggacgagcttcctagaggggaccctgaggcggagcttccggacaggatccgtggtccggcagaaggtcgaggaggagcagatgctggacatgtggattaaggaagaagtctcctctgctcgagccagtatcattgacaagtggaggaaatttcagggaatgaaccaggaacaggccatggccaagtacatggccttgatcaaggagtggcctggctatggctcgacgctgtttgatgtggag

SEQ ID NO: 10622 - DNA, 7234 bp, Homo sapiens
atgcctgagcctcccacccactccatgggctcctgtgcggccggagcctccctgacgagcaccgccccctgctccacggcgcccagtcccatcgaccacctaagggctaaggaatgcgagcgcacggcgcaggactggcaggcagctccacctgcagccctggtgcgggatccactagctgctctggtgaggacgtggagaacctttatgtctagctcaaggattgtaaatacaccaatcggcaccctgtgtttagctcaaggtttccagtggttcagcgtgctgagtcaggtccacgcgtccacggaccaggagatccaggagatgcatgatgagcaggcaaacccacagaatgctgtgggcaccttggatgtggggctgattgattctgtgtgtgcctctgacagccctgatagacccaactcgtttgtgatcatcacggccaaccgggtgctgcactgcaacgccgacacgccggaggagatgcaccactggataaccctgctgcagaggtccaaaggggacaccagagtggagggccaggaattcatcgtgagaggatggttgcacaaagaggtgaagaacagtccaaagatgtcttcactgaaactgaagaaacggtggtttgtactcacccacattcctggattactacaagagttcagagaagacgcgctcaactggggacctgatgagaagatattcaaagagacagaactggtgaatgatatggacaagattaatggaaggatagagagggcagaagcatcaacttgcgagttaggacttcttagaattatccaggttgtcagcccctttcactcctctgtgcatttgtttacaaatgtgggtcctcaggtccggaaccgcattgctgcttgcgagagggctggaatgatggaatacagaagtgcttccctctctctgctgaatgcctcggtggctgaaggatatgtacgggaagaaaaggaaattgcagccgaaaagaaaaccaccaatggaaatccagatctaccccctcgtgattgtgatcgcaggatgccagaccagtttgaccaggcggttgtgctgaaccagctgcggtactcagggatgctggagactgtgagaatccgcaaagctgggtataaagtgctgatgaggaatctggctctgcctgaggacgtccgagggaagtgcacgagcctgctgcagctctatgatgcctccaacagcgagtggcagctggggaagaccaaggtctttcttcgagaatccttggaacagaaactggagaagcggagggaagaggaagtgagccacgcggccatggtgattcgggcccatgtcttgggcttcttagcacgaaaacaatacagaaaggtcctttattgtgtggtgataatacagaagaattacagagcattccttctgaggaggagatttttgcacctgaaaaaggcagccatagttttccagaagcaactcagaggtcagattgctcggagagtttacagacaattgctggcagagaaaagggagcaagaagaaaagaagaaacaggaagaggaagaaaagaagaaacgggaggaagaagaaagagaaagagagagagagcgaagagaagccgagctccgcgcccagcaggaagaagaaacgaggaagcagcaagaactcgaagccttgcagaagagccagaaggaagctgaactgacccgtgaactggagaaacagaaggaaaataagcaggtggaagagatcctccgtctggagaaagaaatcgaggacctgcagcgcatgaaggagcagcaggagctgtcgctgaccgaggcttccctgcagaagctgcaggagcggcgggaccaggagctccgcaggctggaggaggaagcgtgcagggcggcccaggagttcctcgagtccctcaatttcgacgagatcgacgagtgtgtccggaatatcgagcggtccctgtcggtgggaagcgaattttccagcgagctggctgagagcgcatgcgaggagaagcccaacttcacactttccaagcccagaccccctaaccgcaagaggcaggaggtcgatgagggcttcgaagccgacgacgacgccttcaaggactcccccaaccccagcgagcacggccactcagaccagcgaacaagtggcatccggaccagcgatgactcttcagaggaggacccatacatgaacgacacggtggtgcccaccagccccagtgcggacagcacggtgctgctcgccccatcagtgcaggactccgggagcctacacaactcctccagcggcgagtccacctactgcatgccccagaacgctggggacttgccctccccagacggcgactacgactacgaccaggatgactatgaggacggtgccatcacttccggcagcagcgtgaccttctccaactcctacggcagccagtggtcccccgactaccgctgctctgtggggacctacaacagctcgggtgcctaccggttcagctctgagggggcgcagtcctcgtttgaagatagtgaagaggactttgattccaggtttgatacagatgatgagctttcataccggcgtgactctgtgtacagctgtgtcactctgccgtatttccacagctttctgtacatgaaaggtggcctgatgaactcttggaaacgccgctggtgcgtcctcaaggatgaaaccttcttgtggttccgctccaagcaggaggccctcaagcaaggctggctccacaaaaaaggggggggctcctccacgctgtccaggagaaattggaagaagcgctggtttgtcctccgccagtccaagctgatgtactttgaaaacgacagcgaggagaagctcaagggcaccgtagaagtgcgaacggcaaaagagatcatagataacaccaccaaggagaatgggatcgacatcattatggccgataggactttccacctgattgcagagtccccagaagatgccagccagtggttcagcgtgctgagtcaggtccacgcgtccacggaccaggagatccaggagatgcatgatgagcaggcaaacccacagaatgctgtgggcaccttggatgtggggctgattgattctgtgtgtgcctctgacagccctgatagacccaactcgtttgtgatcatcacggccaaccgggtgctgcactgcaacgccgacacgccggaggagatgcaccactggataaccctgctgcagaggtccaaaggggacaccagagtggagggccaggaattcatcgtgagaggatggttgcacaaagaggtgaagaacagtccaaagatgtcttcacttgaaactgaagaaacggtggtttgtactcacccacaattccgtgcattactacaagagttcagagaagaaccgccgctcaaactgggggaccctggtcctccaacagcctctgctctggtcgtccccccagatgagaagatattcaaagagacaggctactggaacgtcaccgtgtacgggcgcaagcactgttaccggctctacaccaagctgctcaacgaggccacccggtggtccagtgccattcaaaacgtgactgacaccaaggccccgatcgacacccccacccagcagctgattcaagatatcaaggagaactgcctgaactcggatgtggtggaacaaatttacaatgcggaaccccgatccttcgatacacccatcaccccttgcactccccgctcctgccccttccgtatggggacataaatctcaacttgctcaaagacaaaggctataccacccttcaggatgaggccatcaagatattcaattccctgcagcaactggagtccatgtctgacccaattccaataatccaggtcatcctacagacagggcatgacctgcgacctctgcgggacgagctgtactgccagcttatcaaacagaccaacaaagtgccccaccccggcagtgtgggcaacctgtacagctggcagatcctgacatgcctgagctgcaccttcctgccgagtcgagggattctcaagtatctcaagttccatctgaaaaggatacgggaacagtttccaggaaccgagatggaaaaatacgctctcttcacttacgaatctcttaagaaaaccaaatgccgagagtttgtgccttcccgagatgaaatagaagctctgatccacaggcaggaaatgacatccacggtctattgccatggcggcggctcctgcaagatcaccatcaactcccacaccaccgctggggaggtggtggagaagctgatccgaggcctggccatggaggacagcaggaacatgtttgctttgtttgaatacaacggccacgtcgacaaagccattgaaagtcgaaccgtcgtagcgtgatgtcttagccaagtttgaaaagctggctgccacatccgaggttggggacctgccatggaaattctacttcaaactttactgcttcctggacacagacaacgtgccaaaagacagtgtggagtttgcatttatgtttgaacaggcccacgaagcggttatccatggccaccatccagccccggaagaaaacctccaggttcttgctgcccgtgcaactccagtatctgcagatggattatactctgcaggctgccatcccacctctcgaagaggtttattccctgcagagactcaaggcccgcatcagccagtcaaccaaaaccttcaccccttgtgaacggctggagaagaggcggacgagcttcctagaggggaccctgaggcggagcttccggacaggatccgtggtccggcagaaggtcgaggaggagcagatgctggacatgtggattaaggaagaagtctcctctgctcgagccagtatcattgacaagtggaggaaatttcagggaatgaaccaggaacaggccatggccaagtacatggccttgatcaaggagtggcctggctatggctcgacgctgtttgatgtggagtgcaaggaaggtggcttccctcaggaactctggttgggtgtcagcgcggacgccgtctccgtctacaagcgtggagagggaagaccactggaagtcttccagtatgaacacatcctctcttttggggcacccctggcgaatacgtataagatcgtggtcgatgagagggagctgctctttgaaaccagtgaggtggtggatgtggccaagctcatgaaagcctacatcagcatgatcgtgaagaagcgctacagcacgacacgctccgccagcagccagggcagctccaggtctaaacacagatctgcagctgtctccactgctcttgtagacactgagtgtgacttcaagaaagcaaaagaagggactgaaatacaaactaccatcagagaatactataaacacctctacgcaaataaagtagaaaatctagaagaaatggataaattcctcgacacatacactctcccaagactaaaccaggaagaagttgaatctctgaatagaccaataacagactctgaaattgaagcaataattaatagcttaccaaccaaaaaaagtccaggaccagatggattcacagccgaattctaccagaggtacaaggaggagctggtaccattccttctgaaactattccaatcaatagaaaaagtgggaatcctccctaactcattttatgaggccagcatcatccgataccaaagcctggcagagacacaaccaaaagagaattttagaccaatatccctgatgaacatcgatgcaaaaatcctcagtaaaatactggcaaaccaaatacagcagcacatcgaaaagcttatccaccacgatcaagtgggcttcatccctgggatgcaaggctggttcaacatatgcaaatcaataaacataatccagcatataaacagaaccaatgacaaaaaccatatgattatctcaatagatgcagaaaaggcctttgacaaaattcaacaacgcttcatgctaaaaactctcaataaattagtgttggaagtcctggccagggcaatcaggcagcagaaggaaataaagggtattcaactaggaaaagaggaaatcaaattgtccctgtttgcagatgacatgattgtatatctagaaaaccccatcgtctcagcccaaaatctccttaagctgataggcaacttcagcaaagtctcaggatacaaaatcaatgtgcaaaaatcacaagcattcttatacaccaataacagacaaacagagagccaaatcatgagcaaactcctattcacaattgcttcaaagagaataaaatacctaggaatccaacttacaagggacgtgaagggcctcttcaaggagaactacaaaccactgcttaacgaaatcaaagaggatacaaacaaatggaagaatattccatgctcatgggtaggaagaatcaatatcgtgaaaatggccatactgcccaaggtaatttatagattcaatgccatccccaatgactttcttcacagaattggaaaaaactactttaaagttcatatggaaccaaaaagagcccacattgccaagtcaatcctaagccaaaagaacaaagctggaggcatcacgctacctgacttcaaactatactataaggctacagtaaccaaaacagcatggtactggtaccaaaacagagatatagaccaatggaacagaacagagccctcagaaataacgctgcatatctacaaccatctgatctttgacaaacctgacaaaaacaagaaatggggaaaggattccctatttaataaatggtgctgggaaaactggctagccacatgtagaaagctgaaactggatcccttccttacaccttatacaaaaattaattcaagatggattaaagacttaaatgttagacctaaaaccataaaaaccctagaagaaaacctaggcattaccattcaggacataggcatgggcaaggacttcatgtctaaaacaccaaaagcaatgggaacaaaagccaaaattgacaaatgggatctaattaaactaaagagcttctgcacagcaaaagaaactaccatcacagtgaaaaggcaacctacagaatgggagaaaatttttgcaatctactcatctgacaaagggctaatatccagaatctacaatgaactcaaacaaattcacaagaacaaccaaccccatcaaaaagtgggcgaaggatatgaacagacacttctcaaaagaagacatttatgcagccaaaagacatga

SEQ ID NO: 10623 - DNA, 5713 bp, Homo sapiens
  SIMILAR (1)..(642): 1001254mologous to Homo sapiens myosin X,accession number AF234532,Smith-Waterman Score=1153.
attgattctgtgtgtgcctctgacagccctgatagacccaactcgtttgtgatcatcacggccaaccgggtgctgcactgcaacgccgacacgccggaggagatgcaccactggataaccctgctgcagaggtccaaaggggacaccagagtggagggccaggaattcatcgtgagaggatggttgcacaaagaggtgaagaacagtccaaagatgtcttcactgaaactgaagaaacggtggtttgtactcacccacaattccctagattactacaagagttcagagaagaacgcgctcaaactggggaccctggtcctcaacagcctctgctctgtcgtccccccagatgagaagatattcaaagagacaggctactggaacgtcaccgtgtacgggcgcaagcactgttaccggctctacaccaagctgctcaacgaggccacccggtggtccagtgccattcaaaacgtgactgacaccaaggccccgatcgacacccccacccagcagctgattcaagatatcaaggagaactgcctgaactcggatgtggtggaacagatttacaagcggaacccgatccttcgatacacccatcaccccttgcactccccgctcctgccccttccgtatggggacagtaaatctcaacttgctcaaagacaaaggctataccacccttcaggatgaggccatcaagatattcaattccctgcagcaactggagtccatgtctgacccaattccaataatccagggcatcctacagacagggcatgacctgcgacctctgcgggacgagctgtactgccagcttatcaaacagaccaacaaagtgccccaccccggcagtgtgggcaacctgtacagctggcagatcctgacatgcctgagctgcaccttcctgccgagtcgagggattctcaagtatctcaagttccatctgaaaaggatacgggaacagtttccaggaaccgagatggaaaaatacgctctcttcacttacgaatctcttaagaaaaccaaatgccgagagtttgtgctttcccgagatgaaatagaagctctgatccacaggcaggatatgacatccacggtctattgccatggcggcggctcctgcaagatcaccatcaactcccacaccacctgctggggaggtggtggagaagctgatccgaggcctggccatggaggacagcaggaacatgtttgctttgtttgaatacaacggccacgtcgacaaagccattgaaagtcgaaccgtcgtagctgatgtcttagccaagtttgaaaagctggctgccacatccgaggttggggacctgccatggaaattctacttcaaactttactgcttcctggacacagacaacgtgccaaaagacagtgtggagtttgcatttatgtttgaacaggcccacgaagcggttatccatggccaccatccagccccggaagaaaacctccaggttcttgctgcccatgcgacatccagtatcatgcagggggattatacatctgcacgcatgccatcccacctcatcgaagaggtttattccctgcagagactcaaggcccgcatcagccagtcaaccaaaaccttcaccccttgtgaacggctggagaagaggcggacgagcttcctagaggggaccctgaggcggagcttcccggacaggatccgtggtccggcagaaggtcgaggaggagcagatgctggacatgtggattaaggaagaagtctcctctgctcgagccagtatcattgacaagtggaggaaatttcagggaatgaaccaggaacaggccatggccaagtacatggccttgatcaaggagtggcctggctatggctcgacgctgtttgatgtggaggtgagaactggctgccatgtgttggggtgggctgggtgctggcatctgagaacatggatcacggccaagttcatgtggagagaagacaagatggagcattttgctctctcaacctctttttttcgagcccccaaaattgtaccattaacgcctcccttctcctcacagtttctcttctcctgtgtagtaaatgcatctgtaatattaggaatgaatgcaaaattaagatgtcatctattcttctacccttccttagggaagctatagatctaattttttaaacactgataaaaatctacatttaaaaaaatgttatagctgtatatacaaattagaaactttggatatacttgcattttactttgttttttctttacagccatctgtttgaaaggaagaatgtctatctcgtaatggaatttagccattggcatcaacccagtactgatttttgttttgttttaagtagaccgcttattgaaaagaaatcttactaattgtctagatgagagtttggcaaactggtctgtgggtcagatcttgcctgcctcctttttttctaaacaaagttttattggaacacagccaagctcattcctttagatatattccctggctgtttttgtacagagttgagtagttgtgacagagaccatgtgatccacaaagtctaaaaatctttactatgcagcccttaacagataagtgtgccagctcatcgtctagattagcttccattttttatgatcacagtaattcagcgtatatctgatgactttatattgaggctgtataaaattctaaatattataaattctagaatccgtgggtggcttttcattaggtgatgtttttgattggtttggttggttcaattatgcctgtttttaagtataaaaaaatcaggtgctttgtacaaagccataattccatttctccctgacaaggaatagataatagcagttaaactcttggcttcctgcaaaacgtgagctgtgaattagcatagaaagctactggcttggccgggcgcggtggctcactcctgtaatcccagcactttgggaggccaaggcgggcggatcatgaggtcaggagatcgagaccatcctggctaacacggtgaaaccccatctctactaaaaatacaaaaaaaaaaattagacttgcgtggtggcatgcacctgtaatcccagctactcgagaggctgagacaggagaatcgcttgaactcaggaggtggaggttgcagtgagccaggatcacgccactgcactccagcctgggcgacagagtgagactccgtcaaaaaaaaaaagaaaaaaagaaagctactggcttttgcatggaggatgcagagaatgtctggttattagggatataaactagagactcttttcagcgtctccaatttatagccctcctgcttgtccaggtttggatcagccctgtgttgttagccccttcatatggggtcttattttcttccaccaatctgtacaggaaagtctacagttaaactggtaaagtccctgttcccactctgcatatggaaggccattgctgctccttgtgaagaggagccagaactgctcagcatgcgtgatttggagaattttcctctgtgatcctagattttgtatttgaagactaaccatccgcaaagaggattggaggcagaactggagatattaatacaagagtagacttggcttgggttgcagggaagctttcttaagtcccccggccaagcatgtacgtttccaggccacttccacgtagctaatccaaacagctagtagaataatgctgagaagtggagagtcaaagcaagatgttagactctgccagttagtgaggttttcccaaaagcgtgagattaactagttagaaatcaagatagccagagaggtgccatttttcatatttcaggcccctccatgcatgcatgcacatcgaatatatttaatcttctgcacagaggacttcactcaaagcctgtcttatggtttagatgctttctgttgccaaccacttcatgacttaactcttctgttgactcttgcccaccagtgcaaggaaggtggcttccctcaggaactctggttgggtgtcagcgcggacgccgtctccgtctacaagcgtggagagggaagaccactggaagtcttccagtatgaacacatcctctcttttggggcacccctggcgaatacgtataagatcgtggtcgatgagagggagctgctctttgaaaccagtgaggtggtggatgtggccaagctcatgaaagcctacatcagcatgatcgtgaagaagcgctacagcacgacacgctccgccagcagccaagggcagctccaggtgaaggcgggacagagcccacctgtcttttgctacctgaacgcaccaccctctgggcctaggctggctccagtgtgccatgcccagccaaaacaaacacagagctgcccaggctttctggaagcttctggtctgagggaggtgtctccgaggatccttttgcctgccgccttcattgatcctgtattaagctgtcaactttaacaagtctgcacagttttcaaaagctttacttacttcttaggaggacacatggccttaaaaaaagggagggggaggaaccacggttgccaccaaagcagccggaagtggccttaacttgtggaaccaacactaaatcgaccgtaactgtgctactgaaggggaactgcctttcccccttctggggaagaacttaacagagcgtggaaggggggcattctctgtcaatgatgcactaacctcccaacctgattttccccgaatctggagggaaggtgaggggagtgggaagggggatggagagctcgaggggacagtgtgtttgagctggaggtctgcgggcagcctttctcatggaatgacatgaatcaacttttttctttgtttcatcttttaagtgtaccgtgcttgcctgttcggtgcatgtgttcataaactccaacaccttaatccatggtttccatggagcattaaaaagcaaagggaaaaaggatgtgtaatggtgtacacagtctgtatattttaataatgcagagctactacgtctcaattgttactttataaggtggttttattaacaaacccaaatcctggattttcctgtctttgctgtattttgaaaaacacgttgtttgactccattgttttacatgtaagcaaagtctgccatctgtgtctgctgtattataaccagataagcagcctacaggataactgtatttataaacccactcttccaaccagctggctcccagtgctggtttttagaaccaggaatgaagtcattttggagtcttttccatgtctaaaaagatttaagttaaaaaaccaaagtgttacttggaaggttagcttctatccattctgggataagattacagatataaataacccatgttgacctatgggggagagacgctgcattcccaggaaacggtctttaaccacttggagggaatcttcaaaggacccttgacattaaatgctgaggctttaatacaccacatattttatcccccaagtttataaatggtggtctgaacaaggcacctgtaaataaatcagcatttatgaccagaagaaaaataatctggtcttggactttttatttttatatggaaaagttttaaggacttgggccaactaagtctacccacacgaaaaaagaaatttgccttgtccctttgtgtacaaccatgcaaaactgtttttttggtccccggaagttctgacaataaaagatactagctaaaaaaaaaaaaaaaaa

SEQ ID NO: 10624 - DNA, 672 bp, Homo sapiens
  SIMILAR (395)..(484): 1001254mologous to Homo sapiens Human PRO873 protein sequence,accession number Y41723,Smith-Waterman Score=173.
cctgaaagatgctacgaaaccgtatgaatggacatagttcaagatgccactttcgtgtatgccacactgcagactgctcactaccaccgagatgccggcctccctgtctacctgtatgaatttgagcaccacgctcgtggaataatcgtcaaaccccgcactgatggggcagaccatggggatgagatgtacttcctctttgggggccccttcgccacaggtgcaaaggtcccacctgataccccaactgggtgtccagtctcccacctctggatgcagacccacccctccattggctggccacagggagctcaccagttcctaatctgttatgctctcccaaatgaaagtcttctgctccggaagcagcagaagcagcaggagtagggtgggagaaaccccaatgatgggaatctgccctgctggccacgctacaacaaggatgaaaagtacctgcagctggattttaccacaagagtgggcatgaagctcaaggagaagaagatggctttttggatgagtctgtaccagtctcaaagacctgagaagcagaggcaattctaagggtggctatgcaggaaggagccaaagagggtttgcccccaccactccaaagtctatacacaggggtggtctcttcaataaagaagtgttgattagacctgaaaaaaa

SEQ ID NO: 10625 - DNA, 816 bp, Homo sapiens
  SIMILAR (190)..(441): 501254mologous to Homo sapiens carboxylesterase,accession number L07765,Smith-Waterman Score=216.
cttgagttcgctgaccctagtgcagtgtggtggaattcgacccacccctccattggctggccacagggagctcaccagttcctaatctgttatgctctcccaaatgaaagtcttctgctccggaagcagcagaagcagcaggagtagggtgggaggtcagtgtcccctgctctgtccgaaatcccacatcccattctgcccccaggcctttccatgggtaaggagaaggcacttagcctccagatgatgaaatactgggccaactttgcccgcacaggaaaccccaatgatgggaatctgccctgctggccacgctacaacaaggatgaaaagtacctgcagctggattttaccacaagagtgggcatgaagctcaaggagaagaagatggctttttggatgagtctgtaccagtctcaaagacctgagaagcagaggcaattctaagggtggctatgcaggaaggagccaaagaggggtttgcccccaccatccaggccctggggagactagccatggacatacctggggacaagagttctacccaccccagtttagaactgcaggagctccctgctgcctccaggccaaagctagagcttttgcctgttgtgtgggacctgcactgccctttccagcctgacatcccatgatgcccctctacttcactgttgacatccagttaggccaggccctgtcaacaccacactgtggctcagctctccagcctcaggacaaactcttttttttccccttcttcaaaatcctcccaaccttccaatgtctccttgtgaatcccttctttatgggaggttg

SEQ ID NO: 10626 - DNA, 1532 bp, Homo sapiens
  SIMILAR (19)..(345): 941254mologous to Homo sapiens Human PRO873 protein sequence,accession number Y41723,Smith-Waterman Score=552.
ccgctacctggtgcccgcaggtgcctgcatgagttctggggccagctggcctcgatgtacgtcagcacgcgggaacggtacaagtggctgcgcttcaacgaggactgtctgtacctgaacgtgtacgcgccggcgcgcgcgcccggggatccccaactgccagtgatggtctggttcccgggaggcgccttcatcgtgggcgctgcttcttcgtacgagggctctgacttggccgcccgcgagaaagaggggctggtgtttctgcaacacaggctcggcatcttcagcttcctgagcacggacgacagccacgcgcgcgggaactgggggctgctggaccagatgggcggctctgcgctgggtgcaggagaacatcgcagcctttcgggggagacccagggaaattttgaccctgttcggccagtcggcgggggccatgagcatctcaggactgatgatgtcacccctagcctcgggtctcttccatcgggccatttcccagagtggcaccgcgttgttcagacttttcatcactcgtaacccactgaaagtggccaagaaggttgcccacctggctggatgcaaccacaacagcacacagatcctggtaaactgcctgagggcacttatcagggaccaaggtgatgcgtgtgtccaacaagatgagattcctccaactgaacttccagagagacccggaagagattatctggtccatgagccctgtggtggatggtgtggtgatcccagatgaccctttggtgctcctgacccaggggaaggtttcatctgtgccctaccttctaggtgtcaacaacctggaattcaattggctcttgccttatatcatgaagttcccgctaaaccggcaggcgatgagaaaggaaaccatcactaagatgctctggagtacccgcaccctgttggccaaaaactcctggggggctgagcatggatccaagtcactggtgggcccacctctggcccagctggcacccaggcctcagaatatcaccaaggagcaggtaccacttgtggtggaggagtacctggacaatgtcaatgagcatgactggaagatgctacgaaaccgtatgatggacatagttcaagatgccactttcgtgtatgccacactgcagactgctcactaccaccgagatgccggcctccctgtctacctgtatgaatttgagcaccacgctcgtggaataatcgtcaaaccccgcactgatggggcagaccatggggatgagatgtacttcctctttgggggccccttcgccacaggcctttccatgggtaaggagaaggcacttagcctccagatgatgaaatactgggccaactttgcccgcacaggaaaccccaatgatgggaatctgccctgctggccacgctacaacaaggatgaaaagtacctgcagctggattttaccacaagagtgggcatgaagctcaaggagaagaagatggctttttggatgagtctgtaccagtctcaaagacctgagaagcagaggcaattctaa

SEQ ID NO: 10627 - DNA, 2614 bp, Homo sapiens
  SIMILAR (1204)..(3564): 831254mologous to Homo sapiens Human calcium channel subunit alpha-1 partial sequence,accession number W79161,Smith-Waterman Score=3304.
ccggtaccgaattgcagtttcgacctagacccacgcgggcgaaaataacatgaaacatgagatagcgttctgcatgaagtgaaatgaaaaatagatgctgggaaggatgtctaactgggagatagcttgcgatgtaaatatgtaaatatattatgaatgaccagtgggcaaggcaaaattgcctacacagccctacctatggcccctctgaaaatgttctttcttcagcagaatcgaagccagaaattcaacttagtccctcctgccctctgattttctccagtcagcaagctctcagccaacatgtgtggctgagtcatctctctcagctgttttcaagtttatgggcaggaaaatcctctccacctgggaaaacactatccagaagatcagaaacaacagcaggatccattctgctttagtggcaaagcagaatggattcaagagggagaagactccagactcctgtttgggagagtaagcaaaaatggcacttcaaaggcactttccagcccacctgaagaacaacagccagcacagtccaaggaagacaacacagtggtggatatagggtccagccctgaacggagggcagatctagaggaaacagacaaagtattgcatggtttagaagtctcaggatttggagaaatcaaatatgaagagtttgggccaggctttatcaaggagtcaaacctccttagcctccagaagacacaaactggggagacaccttacatgtacactgagtggggagacagctttggcagtatgtcagtcctcatcaaaaacccaaggacacactctgggggaaagccttatgtgtgcagggaatgtgggcgaggctttacgtggaagtcaaacctgatcacacatcagaggacacactcaggggagaaaccttatgtgtgcaaggattgtggacgaggctttacttggaagtcgaacctctttacacatcagcggacacactcagggctcaagccttatgtgtgcaaggaatgtgggcagagctttagcctgaagtcaaacctcattacccaccagagggcgcacactggggagaagccttatgtttgcagggaatgtgggcgtggctttcgccagcattcacacctggtcagacacaagaggacacattcaggagagaagccttacatttgcagggagtgtgagcaaggctttagccagaagtcacacctcatcagacacttaaggacacacacaggagagaagccttatgtatgcacagaatgtgggcgtcactttagctggaaatcaaacctcaaaacacaccagaggacacactcaggggttaaaccttatgtctgcctggagtgcgggcagtgctttagcctgaagtcaaaccttaacaaacaccaagaggtcacacacgggggagaagccatttgtatgtacggagtgtgggcgaggctttacccggaaatcaaccctgatcacgcaccagaggacacactcaggggagaagccatttgtatgtgctgagtgtggacgaggctttaatgataagtccaccctcatttcacaccagaggacacattcaggggaaaagccttttatgtgcagggagtgtggcagaaggtttcggcagaagcctaacctgtttaggcacaagagggcacactcaggtgcctttgtgtgcagggagtgtgggcaaggcttttgtgctaagttaactctcattaaacaccagagagcacacgcaggggggaagcctcatgtgtgcagggagtgtgggcaaggctttagccggcagtcacacctcattagacaccagaggacacattcaggagagaagccttatatttgcagaaagtgtggacggggctttagtcggaagtccaaccttatcagacatcagaggacacactcaggatagaaactttatgtgtatagggaatgtggtacagcctttagccaggagtcatacttcatcagacaccagaggacacacacagtgctgtggctttttcagccattgctagataccaaagtggagacattctgtgtgtgattatgcatgagaactgtactggtaagacttgtatctccatccacctgaaggagaatttgctggctcattttcaggagccctgcccttcctcactgtgggatggtgggttgtggaaacccggtcaggtaatgatagtggcaggaggcagtcaaaatgcccagggcagataggggtgtggtatcctgtgtggaaaccccaacctctaaagcttgaaggacaagtcccgggctaacatcctcaatactgaatttgaggaacctgtcttccccatttggtgggctttccctccgattgatccccccccccttcacctattttacgtatacctgccctttcctaattggtttttacactgctgtgcccaccttttgagtggtgcctttgcatacttacaaatcagtcaacgtgtattcccctattctgagcccataaaagacccagactcagctgcagtgaggagagaaatcaccctgctgtgggggttggggaccactccctgcatcccctctccactgagagctgttcttttgctcaataaaattcttttctacccatcctccccaaaaaaaaaaaaaaaaa

SEQ ID NO: 10628 - DNA, 451 bp, Homo sapiens
  SIMILAR (7)..(171): 831254mologous to Paralichthys olivaceus ribosomal protein L17,accession number AF220552,Smith-Waterman Score=242.
  misc_feature (1)...(451): n = a,t,c or g
aactttccaacagccagggtatggaggttggtttaccccctttaccccttaaaaatttttattttccctaaaggctttaaattttggagggaggttgggccaatatggccccccccaaaaagaagggttctttccaaaaaatcccagggaggtttttaaatggccccctataaggaaaaaaatattaccttgccagcccgggtaaaatttgggccccccaagggttctttaaaacgggcgccccnnnnnnnnnnnnnngaggttattttcacaagacatagctataatttgtaaaacattcagactattgaaagatcacattcaaattatatttctaagaatagagccatatatgaacagagagcaaaacaagctaatacattaatgaatattcactgaattcttcatactgcacaggacacaaatttggtatttgcacatgttgtcaatt

SEQ ID NO: 10629 - DNA, 422 bp, Homo sapiens
  SIMILAR (380)..(421): 1001254mologous to Homo sapiens Human secreted protein sequence encoded by gene 5 SEQ ID NO:116,accession number Y91395,Smith-Waterman Score=74.
  misc_feature (1)...(422): n = a,t,c or g
cttcctgggcttgtgccatccaccctactggttatctgatagaacaagctggtggctgatgggtgactgctaggcgtgactgaggtaatagatgaaaagtgttctatgttatcacattggttttcctgtacctttggttactctacgtcatgaccagctgctgcctatgacaaaattgatgtttacaggcctgctttttgcttataattgacaacatgtgcaaaaataccaaatttgtgtcctgtgcagtatgaagaattcagtgaatattcattaatgtattagcttgttttgctctctgttcatatatggctctattcttagaaatataatttgaatgtgatctttcaatagtctgaatattttacaaattatagctatgtcttgtgaaaataacctcaaaaagaaaaatacgactctgn

SEQ ID NO: 10630 - DNA, 4260 bp, Homo sapiens
  SIMILAR (264)..(4): 961254mologous to Homo sapiens putative ribosomal protein (AA 1-184),accession number X53777,Smith-Waterman Score=423.
atgttacgacgctaccgccctgacatcaccagttgccatggtagcaccgccgagagtaaaggaggggtggtgctagacgtttcgggcagagctcggccgctgcggaggacaaggaactctccctctcccactagtctgacttcttccaaaatgagcggcctggatgggggcaacaagctccctctcgcccaaaccggcggcctggctgctcccgaccatgcctcaggagatccggaccgagaccagtgccaagggctccgtgaagaaaccgaggcgacacaggtgatggcgaacacaggtgggggcagcctggagaccgttgcggaggggggtgcatcccaggatcctgtcgactgtggccccgcgctccgcgtcccagttgccgggagtcgcggcggtgcagcgaccaaagccgggcaggaggatgctccaccttctacgaaaggtctggaagcagcctctgccgccgaggctgctgacagcagccagaaaaatggctgtcagcttggagagccccgtggccctgctgggcagaaggctctagaagcctgtggcgcagggggcttggggtctcagatgataccggggaagaaggccaaggaagtgacgactaaaaaacgcgccatctcggcagcagtggaaaaggagggagaagcaggggcggcgatggaggaaaagaaggtagtgcagaaggaaaaaaaggtggcaggaggggtgaaagaggagacacggcccagggccccgaagatcaataactgcatggactcactggaggccatcgatcaagagttgtcaaacgtaaatgcccaggctgacagggccttccttcagcttgagcgcacagtttggccgcatgcgaaggctccacatgcagcgcataagtttcattatccagaatatcccaggtttctgggttactgcctttcgaaaccacccccagctgtcacctatgatcagtggccaagatgaagacatgctgaggtacatgatcaatttggaggtggaggagcttaaacaccccagagcaggctgcaaattcaagttcatctttcagggcaacccctacttccgaaatgaggggcttgtcaaggaatatgaacgcagatcctctggccgggtggtgcctttttccactccaatcccgctggcacctgagggcaagaacccccaggctcatatccacagaaaccgggaagggaacactatccctagtttcttcaactggttttcagaccacagccttctagaattcgacagaattgcagagattatcaaaggagaactgtggcccaatcccctacaatactacctgatgggtgaagggccccgtagaggaattcgaggcccaccaaggcagccagtggagagcgccagatccttcaggttccagtctggctaatctctgtcctgtgagaagcttctgcacaagtttccttaccacctcctcttggacctatgcttggccaacagcatgcagtcttccatctgctttctcttcatactgtggattatcttttcctttggttctaaatcttcagtaatcggttgcaagattgttggcttacctgcctgtgccattcttcctctgggccttcatgcttttctgcattgtgttaacatgtttcaagtgcatggccttctacggcttctatgccaagcgtatgatactatagatatagtgtaccatactgcctttctttgcatggcttggaccctatctgtgaccatgctcttctcccaatttaagtggttctgtaccacaaagaatcttgatacattttcacaaataactgattgggcttcatactttatgctggctgtgtcctgatacccatgtacttatggtaagctatttgggtattaccactgcaagacaaaactgatatcttaacccggccatcaacccaaattggacattccagactaccaccaactggatcccagctgccttcctgggcttgtgccatccaccctactggttatctgatagaacaagctggtggctgatgggtgactgctaggcgtgactgaggtaatagatgaaaagtgttctatgttatcacattggttttcctgtacctttggttactctacgtcatggaccagctgctggtgagtatgaagcctgtgctatagcccacccctactcactctcaccttctggttgaactttgcttaggccaccattgtctgcctcatcaggaactatctgtagacgtagctcccagggagctcacagcaacaccccctacccccaggatgggcagtaatatgtgacagagcccaaagcaaggctgggaacgcagtcccttccagcttagtctttctgactcctagccaacaaaccatccttaatgtgagcaacttctttaggcatttcctcttttccccgcctgcacccactctgaacatgacaaaagttgccagagttggggcattgaggaagagatatttctggaatgtgagacttgttatgcctctgtctctttctctccctcctcctcccctctccctccccctctccctcccatcccttttcttccctttcactctgaagcagttttagcttattaacagaaaacaaaactggcaaagcaggctttttgtttaatttgctctttccctgattgtgttcagagagaaaggttatgattaaatgggctccagatctcttattgcccttattcctccaccccacttcttttagcaaggtctgaaagtttcaaagggagacctataggttaattgtttagttataggcagtgttaaattaggcagattttgacatatttatctttttaccccatccattctaccaaaacctgtgtatttcttgagtttttagtttgagaagctggaaagagagagaagggcctcacagtgatgggttcaggacgggtcaaaactctaaggcctttgtggatgtgagcaaaggcaaccaaaacttagcctcactccacttttctaaagatggaaattccttttttgggccttggactgcttctagggtaacatctcgtaggacactcttctactttgtactactttgcacctgccctgatgtcccttgggcctccatcctactgcctggctttcttggccctcatttctcagcttctgcatttccttccctgctcccaacaaaatgaagaagcaggcttgcagcctaggtttttgttgggaagatctccagcctccttgtaggggataaggggatgtgcagcatctgtgtggattttcacggacaagttccagtaggtgggacagtgatgccgtcaaggcttaagttatgatcatgtgtgggtgataaagaccatccaccatcacccttttcccctttgggttttgaagggccttgcccttaaggttacctgagggtttagggaggtcttgaacacaacacagttggagaggtttaatctaagggttggggaaactgagtaaaagtccagagcaggaattgagcctgctgtggcgtgggtttgtgaaaggcttcacaggaaagaacctgcaggatcaggggtgggaggggaggcccctggaggtgctcttccagggaagaggggctggggtttaaaattagcatgcttggaggaagattttccttcaatttttcctaaagtccttgaatttcaccagtagattttttgtaaacaaaaatgaaaggtgatgttttctcccaaattatcctaggagtgacctttatatgtgtggaagattaatggtatatgctccttatgtcactgtttttgagtaaaatccatttcctttctctgtttcagcctatgacaaaattgatgtttacaggcctgctttttgcttataattgaccaaccatgtgccaaaaatccccaaatttgtgtccctgtgccagtaatgaagaattcagtgaatattccattaatgtattagcttgttttgctctctgttcatatatggctctattcttagaaatataatttgaatgtgatctttcaatagtctgaatattttacaaattatagcctatgtccttgtgaaaataaccctcaaaaagaaaaatacgacctctgttgtccttaccttgatatttccttgcccctaggaatggtacttgaccatttatgttcctaagcagtgtaagtaccagtagaatttctctgtcaaactcgaatgatcatttagtacttttgtcttctcccatgtgcttgaaggaaaaataaagtgtcactaccgtatattcttgatttcatcaaaaaataaaaataatttaaaaaattc

SEQ ID NO: 10631 - DNA, 463 bp, Homo sapiens
  SIMILAR (448)..(395): 881254mologous to Homo sapiens Human secreted protein, SEQ ID NO: 5263,accession number G01182,Smith-Waterman Score=82.
catcgagacctctagaattgacggcgtatgcaagcgcgctccgggcgggcttctttttagtgctggggcttttgggtcattctcacggaggattccccaacaccatcagcataggtggacttttcatgagaaacacagtgcaggagcacagcgctttccgctttgccgtgcagttatacaacaccaaccagaacaccaccgagaagcccttccatttgaattaccacgtagatcacttggattcctccaatagtttttccgtgacaaatgcttgtcctgctgaaagggactacctgccttggccaggaagcatcagggaaaacaattggacagctctgccgtgctgcaaagatcatgggctgctgcacctaaaatgttcaccaggtggggcccgccaaaactgggcctattgtatctggggcgttacaggtgaactgtaagatgagaacaagatcacaagtcc

SEQ ID NO: 10632 - DNA, 3283 bp, Homo sapiens
  SIMILAR (156)..(1403): 991254mologous to Homo sapiens hypothetical protein,accession number AL049846,Smith-Waterman Score=2096.
cggacaggagccattgtgggcgagagcaagttaaggggagggggtgtaagagccagcgaataagagagagagtaagagggagagagaagaagaggaagaagaggaggcggcggcagcggaggaggaggaggactagtgtggggtggaaaggaagagtgagcgagagcaagttaaggggagggggtgtaagagccagcgaattctttttctttttctattattattttgacgactcctgagttgcgcccatgctcttgtcagcttcgttttaggcgtagcatggccaggcagaagaaaatggggcaaagcgtgctccgggcggtcttctttttagtcctggggcttttgggtcattctcacggaggattccccaacaccatcagcataggtggacttttcatgagaaacacagtgcaggagcacagcgctttccgctttgccgtgcagttatacaacaccaaccagaacaccaccgagaagcccttccatttgaattaccacgtagatcacttggattcctccaatagtttttccgtgacaaatgctttctgctcccagttctcgagaggggtgtatgccatctttggattctatgaccagatgtcaatgaacaccctgacctccttctgtggggccctgcacacatcctttgttacgcctagcttccccactgacgcagatgtgcagtttgtcatccagatgcgcccagccttgaagggcgctattctgagtcttctgggtcattacaagtgggagaagtttgtgtacctctatgacacagaacgaggattttccatcctccaagcgattatggaagcagcagtgcaaaacaactggcaagtaacagcaaggtctgtgggaaacataaaggacgtccaagaattcaggcgcatcattgaagaaatggacaggaggcaggaaaagcgatacttgattgactgcgaagtcgaaaggattaacacaattttggaacaggttgtgatcctagggaaacactcaagaggttatcactacatgctcgctaacctgggttttactgatattttactggaaagagtcatgcatgggggagccaacattacaggtttccagattgtcaacaatgaaaaccctatggttcagcagttcatacagcgctgggtgaggctggatgaaagggaattccctgaagccaagaatgcaccactaaagtatacatctgcattgacacacgacgcaatactggtcatagcagaagctttccgctacctgaggaggcaacgagtagatgtgtcccggagaggaagtgctggagactgcttagcaaatcctgctgtgccctggagtcaaggaattgatattgagagagctctgaaaatggtgcaagtacaaggaatgactggaaatattcaatttgacacttatggacgtaggacaaattataccatcgatgtgtatgaaatgaaagtcagtggctctcgaaaagctggctactggaacgagtatgaaaggtttgtgcctttctcagatcagcaaatcagcaatgacagtgcatcctcagagaatcggaccatagtagtgactaccattctggaatcaccatatgtaatgtacaaaaagaaccatgagcaactggaaggaaatgaacgatatgaaggctattgtgtagacctagcctatgaaatagccaaacatgtaaggatcaaatacaaattgtccatcgttggtgacgggaaatatggtgcaagggatccagagactaaaatatggaacggcatggttggggaacttgtctatgggagagctgatatagctgttgctccactcactataacattggtccgtgaagaagtcatagatttttcaaagccattcatgagcctgggcatctccatcatgataaagaagcctcagaaatcaaaaccaggcgtattctcatttctggatcccctggcttatgaaatctggatgtgcattgtctttgcttacattggagtcagcgtagttcttttcctagtcagcaggttcagtccttatgaatggcacttggaagacaacaatgaagaacctcgtgacccacaaagtcctcctgatcctccaaatgaatttggaatatttaacagtctttggttttccttgggtgcctttatgcagcaaggatgtgatatttctccaagatcactctccgggcgcattgttggaggggtttggtggttcttcaccctgatcataatttcttcctatactgccaatctcgctgctttcctgactgtggagaggatggtttctcccatagagagtgctgaagacttagctaaacagactgaaattgcatatgggaccctggactccggttcaacaaaagaatttttcagaagatccaaaattgctgtgtacgagaaaatgtggtcttacatgaaatcagcggagccatctgtgtttaccaaaacaacagcagacggagtggcccgagtgcgaaagtccaagggaaagttcgccttcctgctggagtcaaccatgaatgagtacattgagcagagaaaaccatgtgatacgatgaaagttggtggaaatctggattccaaaggctatggtgtggcaacccctaaaggctcagcattaggaaatgctgttaacctggcagtattaaaactgaatgagcaaggcctcttggacaaattgaaaaacaaatggtggtacgacaaaggagagtgcggcagccaaggactccgggagtaaggacaagaccagcgctctgagcctgagcaatgtggcaggcgttttctatatacttgtcggaggtctggggctggccatgatggtggctttgatagaattctgttacaaatcacgggcagagtccaaacgcatgaaactcacaaagaacacccaaaactttaagcctgctcctgccaccaacactcagaattatgctacatacagagaaggctacaacgtgtatggaacagagagtgttaagatctagggatcccttcccactggaggcatgtgatgagaggaaatcaccgaaaacgtggctgcttcaaggatcctgagccagatttcactctccttggtgtcgggcatgacacgaatattgctgatggtgcaatgacctttcaataggaaaaactgattttttttttccttcagtgccttatggaacactctgagactcgcgacaatgcaaaccatcattgaaatctttttgctttgcttgaaaaaaaataattaaaataaaaaccaacaaaaatggacatgcatcaaacccttgatgtattaatatttattatagttttcatta

SEQ ID NO: 10633 - DNA, 1386 bp, Homo sapiens
  SIMILAR (945)..(1673): 881254mologous to Homo sapiens hypothetical protein,accession number AL049846,Smith-Waterman Score=1040.
atggccaggcagaagaaaatggggcaaagcgtgctccgggcggtcttctttttagtcctggggcttttgggtcattctcacggaggattccccaacaccatcagcataggtaagcgcaagcgagccagccgtcggtccaggctctccctcacccgagaccactgccccggcaaggctttccctgcggttttccgagccgagaggagcaccggaggcgagcaggaggctgggatgctgcaagggggtgaagagtcgaggcttttcggctcgctgctctggactttgccatggcgtgcgtgcagctcctggaagttgtcccagggtgatgccgactgtctggccgcgccagggcgcataacccgggcccggggtgctcagtccgtggtctccggctgtcgggagacaggctggtggacttttcatgagaaacacagtgcaggagcacagcgctttccgctttgccgtgcagttatacaacaccaaccagaacaccaccgagaagcccttccatttgaattaccacgaaacatcgccgattcccttgaagtcccctcctgtgtctttctgctgtgcacttgtagtgcactccacactacaccgccccagcctctgcagtgtcagctcattagcacacagatctcatattccctctccgcactgtcattgcaaaaattgctgttgtacacctttacagccaacaaatgtgcttgtggattacgcactgtttgcaagaagcagggaaaaggcaaatgtaaccttaaagctgcctttgaccgaagtcatacccttctgatggtagtgggcctgctgcctgttctgtgtgtggtgtttgctgcaataggtgatttcagcttcaggattttccacagttactgtggaaaattttcagagcccacgtcaggcaagggctgcatcactgatggcagctcagatatcgtcgcatttcctgaattatatcccgtcagctgccactgtggcctggacagtgtacatcaaggttcaccctctttcctcaatcttgaagtgccccctttccacccttccgctgaaggagacctatggccagaagcagcttcccctcaccttgtcacccccacaggtcctgctgaaagggactacctgccttggccaggaagcatcagggaaaacaattggacagctctgccgtgctgcaaagatcatgggctgctgcacctaaaatgttcaccaggtgggcccgccaaaactgggcctattgtatctgggataaggattctggggcacaaagaagttaagtcacttgcccagtcacataactgtacagtacagcactatgatgtcagcatcattagcgtggagaagacaggaaatgttgctgtcagttttagtgtagttactctcttctga

SEQ ID NO: 10634 - DNA, 3232 bp, Homo sapiens
  SIMILAR (813)..(58): 671254mologous to Homo sapiens putative p150,accession number U93569,Smith-Waterman Score=880.
  misc_feature (1)...(3232): n = a,t,c or g
gagtgcggaaccgccgcctcggccatgcggctcccggccggggggcctgggctggggcccgcgccgccccccgcgctccgcccccgctgagcctgagcccgacccggggcgcctcccgccaggcaccatggtgcagaagtcgcgcaacggcggcgtataccccggcccgagcggggagaagaagctgaaggtgggcttcgtggggctggaccccggcgcgcccgactccacccgggacggggcgctgctgatcgccggctccgaggcccccaagcgcggcagcatcctcagcaaacctcgcgcgggcggcgcgggcgccgggaagccccccaagcgcaacgccttctaccgcaagctgcagaatttcctctacaacgtgctggagcggccgcgcggctgggcgttcatctaccacgcctacgtgttcctcctggttttctcctgcctcgtgctgtctgtgttttccaccatcaaggagtatgagaagagctcggagggggccctctacatcctggaaatcgtgactatcgtggtgtttggcgtggagtacttcgtgcggatctgggccgcaggctgctgctgccggtaccgtggctggagggggcggctcaagtttgcccggaaaccgttctgtgtgattgacatcatggtgctcatcgcctccattgcggtgctggccgccggctcccagggcaacgtctttgccacatctgcgctccggagcctgcgcttcctgcagattctgcggatgatccgcatggaccggcggggaggcacctggaagctgctgggctctgtggtctatgcccacagcaaggagctggtcactgcctggtacatcggcttcctttgtctcatcctggcctcgttcctggtgtacttggcagagaagggggagaacgaccactttgacacctacgcggatgcactctggtggggcctgatcacgctgaccaccattggctacggggacaagtacccccagacctggaacggcaggctccttgcggcaaccttcaccctcatcggtgtctccttcttcgcgctgcctgcaggcatcttggggtctgggtttgccctgaaggttcaggagcagcacaggcagaagcactttgagaagaggcggaacccggcagcaggcctgatccagtcggcctggagattctmcgccaccaacctctcgcgcacagacctgcactccacgtggcagtactacgagcgaacggtcaccgtgcccatgtacagttcgcaaactcaaacctacggggcctccagacttatccccccgctgaaccagctggagctgctgaggaacctcaagagtaaatctggactcgctttcaggaaggaccccccgccggagccgtctccaagtaaaggcagcccgtgcagagggcccctgtgtggatgctgccccggacgctctagccagaaggtcagtttgaaagatcgtgtcttctccagcccccgaggcgtggctgccaaggggaaggggtccccgcaggcccagactgtgaggcggtcacccagcgccgaccagagcctcgaggacagccccagcaaggtgcccaagagctggagcttcggggaccgcagccgggcacgccaggctttccgcatcaagggtgccgcgtcacggcagaactcagaagaagcaagcctccccggagaggacattgtggatgacaagagctgcccctgcgagtttgtgaccgaggacctgaccccgggcctcaaagtcagcatcagagccgtgtgtgtcatgcggttcctggtgtccaagcggaagttcaaggagagcctgcggccctacgacgtgatggacgtcatcgagcagtactcagccggccacctggacatgctgtcccgaattaagagcctgcagtccagagtggaccagatcgtggggcggggcccagcgatcacggacaaggaccgcaccaagggcccggccgaggcggagctgcccgaggaccccagcatgatgggacggctcgggaaggtggagaagcaggtcttgtccatggagaagaagctggacttcctggtgaatatctacatgcagcggatgggcatccccccgacagagaccgaggcctactttggggccaaagagccggagccggcgccgccgtaccacagcccggaagacagccgggagcatgtcgacaggcacggctgcattgtcaagatcgtgcgctccagcagctccacgggccagaagaacttctcggcgcccccggccgcgccccctgtccagtgtccgccctccacctcctggcagccacagagccacccgcgccagggccacggcacctcccccgtgggggaccacggctccctggtgcgcatcccgccgccgcctgcccacgagcggtcgctgtccgcctacggcgggggcaaccgcgccagcatggagttcctgcggcaggaggacaccccgggctgcaggccccccgaggggaacctgcgggacagcgacacgtccatctccatcccgtccgtggaccacgaggagctggagcgttccttcagcggcttcagcatctcccagtccaaggagaacctggatgctctcaacagctgctacgcggccgtggcgccttgtgccaaagtcaggccctacattgcggagggagagtcagacaccgactccgacctctgtaccccgtgcgggcccccgccacgctcggccaccggcgagggtccctttggtgacgtgggctgggccgggcccaggaagtgaggcggcgctgggccagtggacccgcccgcggccctcctcagcacggtgcctccgaggttttgaggcgggaaccctctggggcccttttcttacagtaactgagtgtggcgggaagggtgggccctggaggggcccatgtgggctgaaggatgggggctcctggcagtgaccttttacaaaagttattttccaacaggggctggagggctgggcagggcctgtggctccaggagcagcgtgcaggagcaaggctgccctgtccactctgctcaaggccgcggccgacatcagcccggtgtgaagaggggcggagtgatgacgggtgttgcaacctggcaacaagcngggggttgnccagccganccaagggaagcacanaaggaagctgtnccctaagacctncccnaaaggcggcctgtttggtaagactgcgccttggtccggtgggttccggcagcaaaagcgggttttgccgcccctgtcgtg

SEQ ID NO: 10635 - DNA, 3195 bp, Homo sapiens
  SIMILAR (1)..(969): 921254mologous to Homo sapiens p40,accession number U93564,Smith-Waterman Score=1563.
cggagcgaggtggccgcagcgtctccgcgcgcggcccaagcccggcaggagtgcggaaccgccgcctcggccatgcggctcccggccggggggcctgggctggggcccgcgccgccccccgcgctccgcccccgctgagcctgagcccgacccggggcgcctcccgccaggcaccatggtgcagaagtcgcgcaacggcggcgtataccccggcccgagcggggagaagaagctgaaggtgggcttcgtggggctggaccccggcgcgcccgactccacccgggacggggcgctgctgatcgccggctccgaggcccccaagcgcggcagcatcctcagcaaacctcgcgcgggcggcgcgggcgccgggaagccccccaagcgcaacgccttctaccgcaagctgcagaatttcctctacaacgtgctggagcggccgcgcggctgggcgttcatctaccacgcctacgtgttcctcctggttttctcctgcctcgtgctgtctgtgttttccaccatcaaggagtatgagaagagctcggagggggccctctacatcctggaaatcgtgactatcgtggtgtttggcgtggagtacttcgtgcggatctgggccgcaggctgctgctgccggtaccgtggctggagggggcggctcaagtttgcccggaaaccgttctgtgtgattgacatcatggtgctcatcgcctccattgcggtgctggccgccggctcccagggcaacgtctttgccacatctgcgctccggagcctgcgcttcctgcagattctgcggatgatccgcatggaccggcggggaggcacctggaagctgctgggctctgtggtctatgcccacagcaaggagctggtcactgcctggtacatcggcttcctttgtctcatcctggcctcgttcctggtgtacttggcagagaagggggagaacgaccactttgacacctacgcggatgcactctggtggggcctgatcacgctgaccaccattggctacggggacaagtacccccagacctggaacggcaggctccttgcggcaaccttcaccctcatcggtgtctccttcttcgcgctgcctgcaggcatcttggggtctgggtttgccctgaaggttcaggagcagcacaggcagaagcactttgagaagaggcggaacccggcagcaggcctgatccagtcggcctggagattctacgccaccaacctctcgcgcacagacctgcactccacgtggcagtactacgagcgaacggtcaccgtgcccatgtacagttcgcaaactcaaacctacggggcctccagacttatccccccgctgaaccagctggagctgctgaggaacctcaagagtaaatctggactcgctttcaggaaggaccccccgccggagccgtctccaagccagaaggtcagtttgaaagatcgtgtcttctccagcccccgaggcgtggctgccaaggggaaggggtccccgcaggcccagactgtgaggcggtcacccagcgccgaccagagcctcgaggacagccccagcaaggtgcccaagagctggagcttcggggaccgcagccgggcacgccaggctttccgcatcaagggtgccgcgtcacggcagaactcagaagaagcaagcctccccggagaggacattgtggatgacaagagctgcccctgcgagtttgtgaccgaggacctgaccccgggcctcaaagtcagcatcagagccgtgtgtgtcatgcggttcctggtgtccaagcggaagttcaaggagagcctgcggccctacgacgtgatggacgtcatcgagcagtactcagccggccacctggacatgctgtcccgaattaagagcctgcagtccagagtggaccagatcgtggggcggggcccagcgatcacggacaaggaccgcaccaagggcccggccgaggcggagctgcccgaggaccccagcatgatgggacggctcgggaaggtggagaagcaggtcttgtccatggagaagaagctggacttcctggtgaatatctacatgcagcggatgggcatccccccgacagagaccgaggcctactttggggccaaagagccggagccggcgccgccgtaccacagcccggaagacagccgggagcatgtcgacaggcacggctgcattgtcaagatcgtgcgctccagcagctccacgggccagaagaacttctcggcgcccccggccgcgccccctgtccagtgtccgccctccacctcctggcagccacagagccacccgcgccagggccacggcacctcccccgtgggggaccacggctccctggtgcgcatcccgccgccgcctgcccacgagcggtcgctgtccgcctacggcgggggcaaccgcgccagcatggagttcctgcggcaggaggacaccccgggctgcaggccccccgaggggaccctgcgggacagcgacacgtccatctccatcccgtccgtggaccacgaggagctggagcgttccttcagcggcttcagcatctcccagtccaaggagaacctggatgctctcaacagctgctacgcggccgtggcgccttgtgccaaagtcaggccctacattgcggagggagagtcagacaccgactccgacctctgtaccccgtgcgggcccccgccacgctcggccaccggcgagggtccctttggtgacgtgggctgggccgggcccaggaagtgaggcggcgctgggccagtggacccgcccgcggccctcctcagcacggtgcctccgaggttttgaggcgggaaccctctggggcccttttcttacagtaactgagtgtggcgggaagggtgggccctggaggggcccatgtgggctgaaggatgggggctcctggcagtgaccttttacaaaagttattttccaacaggggctggagggctgggcagggccctgtggctccaggagcagcgtgcaggagcaaggctgccctgtccactctgctcagggccgcggccgacatcagcccggtgtgaggaggggcgggagtgatgacggggtgttgccagcgtggcaacaggcggggggttgtctcagccgagcccaggggaggcacaaagggcaggcctgttccctgaggacctgcgcaaagggcgggcctgtttggtgaggacctgcggccttgggtc

SEQ ID NO: 10636 - DNA, 7413 bp, Homo sapiens
  SIMILAR (956)..(579): 481254mologous to Homo sapiens Human pre-mRNA cleavage factor I 68 kDa subunit,accession number X67337,Smith-Waterman Score=295.
  misc_feature (1)...(7413): n = a,t,c or g
ccccgctgagcctgagcccgacccggggcgcctcccgccaggcaccatggtgcagaagtcgcgcaacggcggcgtataccccggcccgagcggggagaagaagctgaaggtgggcttcgtggggctggaccccggcgcgcccgactccacccgggacggggcgctgctgatcgccggctccgaggcccccaagcgcggcagcatcctcagcaaacctcgcgcgggcggcgcgggcgccgggaagccccccaagcgcaacgccttctaccgcaagctgcagaatttcctctacaacgtgctggagcggccgcgcggctgggcgttcatctaccacgcctacgtgttcctcctggttttctcctgcctcgtgctgtctgtgttttccaccatcaaggagtatgagaagagctcggagggggccctctacatcctggaaatcgtgactatcgtggtgtttggcgtggagtacttcgtgcggatctgggccgcaggctgctgctgccggtaccgtggctggagggggcggctcaagtttgcccggaaaccgttctgtgtgattgacatcatggtgctcatcgcctccattgcggtgctggccgccggctcccagggcaacgtctttgccacatctgcgctccggagcctgcgcttcctgcagattctgcggatgatccgcatggaccggcggggaggcacctggaagctgctgggctctgtggtctatgcccacagcaaggagctggtcactgcctggtacatcggcttcctttgtctcatcctggcctcgttcctggtgtacttggcagagaaaggggagaacgaccactttgacacctacgcggatgcactctggtggggcctgatcacgctgaccaccattggctacggggacaagtacccccagacctggaacggcaggctccttgcggcaaccttcaccctcatcggtgtctccttcttcgcgctgcctgcaggcatcttggggtctgggtttgccctgaaggttcaggagcaacacaggcagaagcactttgagaagaggcggaacccggcagcaggcctgatccagtcggcctggagattctacgccaccaacctctcgcgcacagacctgcactccacgtggcagtactacgagcgaacggtcaccgtgcccatgtacagacttatccccccgctgaaccagctggagctgctgaggaacctcaagagtaaatctggactcgctttcaggaaggaccccccgccggagccgtctccaagccagaaggtcagtttgaaagatcgtgtcttctccagcccccgaggcgtggctgccaaggggaaggggtccccgcaggcccagactgtgaggcggtcacccagcgccgaccagagcctcgagggccacccccagcaaggtgcccaaagagctggagcttcggggaccgcagccgggcacgccaggctttccgcatcaagggtgccgcgtcacggcagaactcagaagaagcaagcctccccggagaggacattgtggatgacaagagctgcccctgcgagtttgtgaccgaggacctgaccccgggcctcaaagtcagcatcagagccgtgtgtgtcatgcggttcctggtgtccaagcggaagttcaaggagagcctgcggccctacgacgtgatggacgtcatcgagcagtactcagccggccacctggacatgctgtcccgaattaagagcctgcagtccagagtggaccagatcgtggggcggggcccagcgatcacggacaaggaccgcaccaagggcccggccgaggcggagctgcccgaggaccccagcatgatgggacggctcgggaaggtggagaagcaggtcttgtccatggagaagaagctggacttcctggtgaatatctacatgcagcggatgggcatccccccgacagagaccgaggcctactttggggccaaagagccggagccggcgccgccgtaccacagcccggaagacagccgggagcatgtcgacaggcacggctgcattgtcaagatcgtgcgctccagcagctccacgggccagaagaacttctcggcgcccccggccgcgccccctgtccagtgtccgccctccacctcctggcagccacagagccacccgcgccagggccacggcacctcccccgtgggggaccacggctccctggtgcgcatcccgccgccgcctgcccacgagcggtcgctgtccgcctacggcgggggcaaccgcgccagcatggagttcctgcggcaggaggacaccccgggctgcaggccccccgaggggaccctgcgggacagcgacacgtccatctccatcccgtccgtggaccacgaggagctggagcgttccttcagcggcttcagcatctcccagtccaaggagaacctggatgctctcaacagctgctacgcggccgtggcgccttgtgccaaagtcaggccctacattgcggagggagagtcagacaccgactccgacctctgtaccccgtgcgggcccccgccacgctcggccaccggcgagggtccctttggtgacgtgggctgggccgggcccaggaagtgaggcggcgctgggccagtggacccgcccgcggccctcctcagcacggtgcctccgaggttttgaggcgggaaccctctggggcccttttcttacagtaactgggtgtggcgggaagggtgggccctggaggggcccatgtgggctgaaggatgggggctcctggcagtgaccttttacaaaagttattttccaacagggcactcccaggccctgtcgccattgaggtgcctccgctgggctgtctcctcacccctccctgtgctggagcctgtcccaaaaaggtgccaactgggaggcctcggaagccactgtccaggctcccactgcctgtctgctctgttcccaaaggcagcgtgtgtggcctcgggccctgcggtggcatgaagcatcccttctggtgtgggcatcgctacgtgttttgggggcagcgtttcacggcggtgcccttgctgtctcccttgggctggctcgagcctggggtccatgtccctttgccgtcccgtcatggggcagggaatccatagcggggcccacaggcaggggtatgagtgcgtcccacccaacgcagcaccagccccggccaccgctccccgtgtccccagttccgtctcagctacctggactccaggaccctggagaagggagacctggcagtggagggaggctgtgctgtgtgtccccctgcaggtgtgaccccgcctgctctttcctcccccgccaggtgtggccccgcctgctctttcctcccccaccagtatggccccacctgctctttcctncccccccaaggtgtggccccacctgttctttcctcccctgccgaggtgtgaccccacctgctctttcctccctcccagtatggccccacctgctctttcctcccccgaggtgaggccccgcctgctctttcctcccatgggagccgctgaggcgtgcgcacctgggcacaggttggggctctgcaggatgaggaagacaggccaatcccttccctcccagaagctggccgcccagcaggagggactgaggccagactcatgtccagcaaggaacgtgtggtgtgtcccctgggaagtctctgggccctgggaagagggaaggtgcacgtcctgggatggttgcggggccctgttttgggagacaaaggggtagagggtctgtcttgngcccccccagactctagcccgagcagtgcagccacctactgccccacctcagagaagtgcagcgggaaggaggctggaggtggtgcggcgctgcctcgggtgtctgcgtgaatgagcgtggccaaggaccagtgccacctcatggcaaagagctcccgcagtgtttgttagagtgcacatcctacgtgcccactggcacacacacgtgctcacatacangtcngngtacaggngtacacatgcangcttgcacacatgcacacagaccacatagcacacatgtgcactgaccacacctgtatagaccatgcacagtacacatacgtgcatacacatgcctgcatacaggcatacacatgcacgcttacatgtacacgtgcacagatcacacacatgcacacacgtgtagctcacacacagtatacacatacacaagtgcacagaccacacacagcactaacacatgcacacacaaagtgcataggccacacagcacatgcacacaggtgcacagaccacacagcacacacaagtgcacagagcacactgcacacatgcacacacacacgcgtgcatgcacactcctcgcacttccagccttggagcccttctgtctctggtctttctctttgaccctgctgagtgtaagctgcctggggaggggctacaaggagtaattgtggctttaggggtcgtggtgatgctggaatgtcaagcgccgtcgtggggtatccgactgtccgggctcctggtccgcagtggcagagcgccaggcagagccaatcagggtctcgtgctgcccttcccccccacagcctggcagccatccagaggaggggctctaccagatgccaaggtgccccggtgtctgtatgggtgtccggttgggtcctgtgtttggtctgccctggaggtggctgggccctcctgggatgggtggctcagcctcgaatcccaggccccagcccaggcaggtgctgctgcctgttgtggtttcctggcccagcttctccttctccctctgcataaaatcacagtccgtgagtcttccagctgccaccacggctgggacacgctgggggagggctcctcccatgcctcctgcacacagccgtctgagcagggcaggtgccaacaccccccaccggagacacgctgcccctcagcgatgcccctaccttttggggggcctcgtctcaagcccccccttggaggctgaaatcaccccaggcactgtgagggcttctccagggggacaccctttgagctgtgggtctgatcaccccaagtcccgcacacggaggagaggcacagccagggcgtgtggtttaatgtttgccccttcggggctggaggtctcagtgtttctagattccagaccctgctgccagagagacctgctgccggagagaaggggaggaggactccagctgggctcggtcccccacagtcagggacccccataaaggacacccccttctctctagaaagagctgggctctcagctatttctagttgcttcccagaagccgaggagcagaaggagctgtgagagctttgcagaaacgcccttgtccccgccctcctgagctatgaatgccgtacagagcagaggctggggcattggcaagatcacaggttgatgctgcacagccccattgacacaaaccctcaaagcagacgtgagagggacggttcacaaagcttggacctgccgtggagggtgcccggcagacgtggcgtgagagggacggctcacgaggcttggacctgctgtggagggtgcccagcagacgtggtgtgagaggaacggctcacgagacttggacctggtggagggtgcccagcagacgtggtgtgagagggacggctcacagggcttggaccggagagagatggctcatgagacttggacctgccgtggagggtgcccagcagacgtggtatgagagggatggctcacgaggcttggacctggtggagggtgcccggcagacgtgtgagagggacggttcacaaggcttggacctgccatggagggtgcccagcagacgtggtgtgagagggacagctcacgaggcttggacctgccgtggagggtgcccagcagggggctgagctctgaggggtgggtgctcagtgcacgggtgcccccagtgtcctctgatcctgtccggtgcctcccccaacccccacacccatgcagaactcccaggtcacatgcacgtatgtccagggcatgggggtggcgtgaagaggcctggtcagggcctttaggggctgcaggacggaatggccacctggggagcctgtgtggctgtgccgggcagccatcctgcattcccacccagcgcgcagtctccacctcggccccagcaaagcgctaagcagccggagagacagccagggcggcttcctgaaggatgtgggatggtggactccggggtcgagggaatacgcaggttcctgtcctccgggagacctagagaagctgcacacccaggagctttccatgacccgggagcatgagtgaatggggggttccagtttgctgaactttgctgtcttgtaagggtgggggctgacggccgaccctgggaggaggtgacaccgcagggggaggttgtgggcaacggtggaggaggagagacgggaggggaccatttgggatggaggggcctcttcagagttttaaaaggcgtttgtggggtggagttgagtgtgctctgggcttggacacttgccgtggtgcccctggctggccgaggagactggctctggccagggccccgtcctgagaggtcctcagcgtctgactctcggccaggcgccagcaaggaggggccggtccccggggctaccaggcaggcacgtgcacatcgccatcgccacacgccaactccgcctgggttttacaaagtcgttgccttaatgcatgtggacaggaactccctgaggtcgccccatgccccctggctgtgccaggtacggacgccctggaccctgcgaacaggtggggcgggcgaggggcccaagggacgggctccagagacacgcgcagggcaggaggggtctcacggaggggtctcgcactgaggcgcccagagctggtggtcccgctggacgccatccctctgcccgggatccacacggcccacgtgtgcccgccatgcccgcgccccacgccattgcagtcttccatcctctggccgtgacggtggctgcagcttccccatttgcgccgttgcctctggctgtctgcacttttgttcatgctccaaagaacatttcataatgccttcagtaccgacgtacacttctgaccattttgtatgtgtccttgtgccgtagtgaccaggcctttttttggtggatgtgttaccccgcacacttcaatctcaactttgtgcaccgtccattttctagggatagacgcccagggaatgaactctagttttctaacagattagctgagatattaacttactcacacggacaggttgatgccagagccgtaagaatgcgccagtgcgggtttgcgggggacttcgggtgtggggtcctgcggccgcgatggccgtggaaggttctggggatccctgctgccacggggacgagttcggacgccaggtggacctgtgcactcagtaaaacgcagtgattc

SEQ ID NO: 10637 - DNA, 2121 bp, Homo sapiens
  SIMILAR (575)..(3): 971254mologous to Escherichia coli K12 putative transport system permease protein,accession number AE000305,Smith-Waterman Score=928.
atggagctgtgcaagcagagggaggtgtcccaggactcgggaggacttatccccccgctgaaccagctggagctgctgaggaacctcaagagtaaatctggactcgctttcaggcgcgtgggtcgtacgacaaagtgtcccagcccgtcgtcctctcgagtgcctggtggtaactcaggtgctgatggcgcctgctgcctctccttcaggcccaaagcccacggctgtcagagtgccggctgtcgagagacactcttctgctctggaacctatcaggacgatctcagatcatcctggattttccgggcgggccctgagtccaacaacgagtgtccttacaaggagagggagatttggaagcacacagagtgctgggattacaggtgtgagccactgtgcctggccaacggatgggatttcgatgaggttttggacacacagtccatgctgcagagggtggagattttgggggatcttggcagggtgattcggttttactttgcagcactgtggatccgggcagctgggcggcttctcggggtaaaggcagcccgtgcagagggcccctgtgtggatgctgccccggacgctctagcacagcccagcaaggtggaggtggctgtgtcgtgctcctgtggggctctccttggcatgtgcatgccgccggtggtgctggccttggagggctgcccccgaggcgtggctgccaaggggaaggggtccccgcaggcccagactgtgaggcggtcacccagcgccgaccagagcctcgaggacagccccagcaaggtgcccaagagctggagcttcggggaccgcagccgggcacgccaggctttccgcatcaagggtgcggcgtcacggcagaactcagaagaagcaagcctccccggagaggacattgtggatgacaagagctgcccctgcgagtttgtgaccgaggacctgaccccgggcctcaaagtcagcatcagagccgtgtgtgtcatgcggttcctggtgtccaagcggaagttcaaggagagcctgcggccctacgacgtgatggacgtcatcgagcagtactcagccggccacctggacatgctgtcccgaattaagagcctgcagtccaggcaagagccccgcctgcctgtccagcaggggacaagaacggggatagatatgattgtgggtcccccgcccccttcaactccccggcacaagaagtaccccaccaaaggacccacggcccctccgagagagtcaccccagtactcacctagagtggaccagatcgtggggcggggcccagcgatcacggacaaggaccgcaccaagggcccggccgaggcggagctgcccgaggaccccagcatgatgggacggctcgggaaggtggagaagcaggtcttgtccatggagaagaagctggacttcctggtgaatatctacatgcagcggatgggcatccccccgacagagaccgaggcctactttggggccaaagagccggagccggcgccgccgtaccacagcccggaagacagccgggagcatgtcgacaggcacggctgcattgtcaagatcgtgcgctccagcagctccacgggccagaagaacttctcggcgcccccggccgcgccccctgtccagtgtccgccctccacctcctggcagccacagagccacccgcgccagggccacggcacctcccccgtgggggaccacggctccctggtgcgcatcccgccgccgcctgcccacgagcggtcgctgtccgcctacggcgggggcaaccgcgccagcatggagttcctgcggcaggaggacaccccgggctgcaggccccccgaggggaccctgcgggacagcgacacgtccatctccatcccgtccgtggaccacgaggagctggagcgttccttcagcggcttcagcatctcccagtccaaggagaacctggatgctctcaacagctgctacgcggccgtggcgccttgtgccaaagtcaggccctacattgcggagggagagtcagacaccgactccgacctctgtaccccgtgcgggcccccgccacgctcggccaccggcgagggtccctttggtgacgtgggctgggccgggcccaggaagtga

SEQ ID NO: 10638 - DNA, 777 bp, Homo sapiens
  SIMILAR (406)..(639): 741254mologous to Homo sapiens PRO0750,accession number AF111853,Smith-Waterman Score=246.
atgaggcctaagctagggcactggctgtgggatggaaaagagggggacacggaaaagaggatgaacaggatttggtggcaacgcagggagagcaggcaggagctaccccagtacagggaagggaaaggagcaggggagccctggactggggaagccgatgttggtcaagggccctggaaaacaatgcttttggcagaatacatgaaaaggaagccctccctaatgaccaccaaggccctggcaaatctgacccatttcacagccctgaccagagctggacccagggtctgctctcagtgtgctgctcatttgcccaaggctccaaatggtcgaagggccccagccaaacactgtttagtaagagaaattaagtctttattgttggttcctgggatccatgaatgtgtgaagagtggccagattcgaaatctggagtctgcccgtgtctcaatggtggccaagtcaaacagtaggtcttactcttcccccttggtctggttagaggcggaaacatggtgtgaaggaattacaagtccagaaggctcaaaatctatagtggaaggaatcatagaggaagaagaagaagatgaggaaggaagtgagtctataagcaagaggaaaaaggaagatgacatggagaatgtcaaccaagctatcatcatcaatttgtctgactgcctggacactcagatgatgtatttcacttttttgttaaaagttaagaaaccctttacttccttaaaaatcattcacaaatcttcctataggtatcactaa

SEQ ID NO: 10639 - DNA, 2034 bp, Homo sapiens
  SIMILAR (130)..(645): 981254mologous to Homo sapiens protein phosphatase methylesterase-1,accession number AF157028,Smith-Waterman Score= 891.
  misc_feature (1)...(2034): n = a,t,c or g
ccgctttatttctctgcgagcatcactaaattctgctgtcatcaagagcagatatatagtagttgactcagtaagtgtaaatgctcagaataagttaaatatgtggttacagtttttgtttaacatccaggtacagctatggatgcacttaatagcatgcagaatttcttacggggtcgtcctaaaaccttcaagtctctggagaatgctattgaatggagtgtgaagagtggccagattcgaaatctggagtctgcccgtgtctcaatggttggccaagtcaaacagtgtgaaggaattacaagtccagaaggctcaaaatctatagtggaaggaatcatagaggaagaagaagaagatgaggaaggaagtgagtctataagcaagaggaaaaaggaagatgacatggagaccaagaaagaccatccatacacctggagaattgaactggcaaaaacagaaaaatactgggacggctggttccgaggcttatccaatctctttcttagttgtcccattcctaaattgctgctcttggctggtgttgatagattggataaagatctgaccattggccagatgcaagggaagttccagatgcaggtcctaccccagtgtggccatgcagtccatgaaggatgcccctgacaaggtagctgaagctgttgccactttcctgatccggcacaggtttgcagaacccatccggtggattccagtgtgtgtttcctgggctgttagtgacctgctgtccacccctccttcaacatcgagctctgttggtaaatacgttcgcaccagaggcccactgtgnatggccactgtctcctctccatcccgcccagccatgtgacactggctcccggtagacgggcaccccgacgatgtaccaaccttttcatgtattctgccaaaagcattgttttccagggcccttgaccaacatcggcttccccagtccaggggctcccctgctcctttcccttccctgtactggggtaagctcctgcctgctcttccctgcgttgcctagggtaaaagccctccagatttgccatactgagcccctcttcctagcatcaggcgatacatctgagttcaaatgtcttcccaggctcagggacctccattccttgagattgtcttgggcatggcccaagccctgcctcatgggatgggacaatgcatggggtggtctttatttttccctttcaaataaaacactagtcaggtaccgttttatcccagtcgtactcttccaggtttggaagacccagagaggccaagatcccatccttaagccatagcgagcggtggtggtggatagcatcacaagaaaccgagccttgaaaatcaggtccagccnggtccaagcacatggccttcccatctgggagagcccacttgtcccaattccaacatgtctgggcacctgccctggggctgaggccaggcgtgctccaggggcctcctgcggccctcacctgccacaggagcaacccaggttaaatacagcccatgcacaaaagccacaggcccaaagcctatgggaattgtttttaatccatccaaattttaaccaattttcataaactgggttcctggaggttgtgcaagtgccccccttggccttcttcaaaaaccttacagcttctctttgcccatttgtggatttcacatcactcccacacagaaaacattacagccctggcaatccccagtctttgcccttccttccaagctgccctcgcacaagcactgtgggcctgtcccctattggcccagggcacgccatttaccaaggggcaggaagggggcagtgttcctggaaggcccatctttttttgttgattgtcttaggtgatgtgtagccccctccacctttccacttcaacaacctcccacccctgtcctggctggcatgggtccggagtctggggacctactttggttttttggtatttatgacctttgtttaaaagaaaataaatatctcccaaccttnnnnnnnnnnnnnngggccggcgcttttaa

SEQ ID NO: 10640 - DNA, 473 bp, Homo sapiens
cggcgagaagacaggccctcggggtggaggtctttggtttcataagagcctgagagagatttttctaagatatgtgtaacacaccaacgtactgtgacctaggaaaggctgctaaggatgtcttcaacaaaggatatggctttggcatggtcaagatagacctgaaaaccaagtcttgtagtggagtggaattttctacttctggtcatgcttacactgatacagggaaagcatcaggcaacctagaaaccaaatataaggtctgtaactatggacttaccttcacccagaaatggaacacagacaatactctagggacagaaatctcttgggagaataagttggctgaagggttgaaactggaagcttaatgtggtttgaggaaagcatcagatttgtccctggaggtgaagagaaatgaacccactatgttttggccttaaaattcttctgtgaatttcaaaaggtgtaac

SEQ ID NO: 10641 - DNA, 572 bp, Homo sapiens
  SIMILAR (1)..(228): 971254mologous to Mus musculus voltage dependent anion channel 3,accession number U30839,Smith-Waterman Score=401.
atgtgtaacacaccagcgtactgtgacctaggaaaggctgctaaggatgtcttcaacaaaggatatggctttggcatggtcaagatagacctgaaaaccaagtcttgtagtggagtggaattttctacttctggtcatgcttacactgatacagggaaagcatcaggcaacctagaaaccaaatataaggtctgtaactatggacttaccttcacccagaaatgaaatttcaaaagtgtgaactttttattcttccaaagaattgtaatcctccccacactgaagtctaggggttgcgaatccctcctgagggagatgcttaaaggcatgcctggaagttgtcatgtttgtgccacgtttcagttcagttctgaagtgttattaaatgtgttcctcagacagtgtagcgtcatgttagaggagacgatctgacccaccagtttgtacatcacgtcctgcatgtcccacaccattttttcatgaccttgtaatatactggtctctgtgctatagtggaatctttggttttgcatcatagtaaaataaaataaacccatcacatttggaacata

SEQ ID NO: 10642 - DNA, 467 bp, Homo sapiens
  SIMILAR (113)..(751): 991254mologous to Homo sapiens dJ676J13.1 (flavohemoprotein b5+b5R cytochrome b-type NAD(P)H oxidoreductase),accession number AL034347,Smith-Waterman Score=1093.
tgttgatatagatttttctggaccaaccatctatggctggtctgtgttggccttcgaagggtggcttgctgcctgtgagatgagttttgacacagccaaatccaaactgtcacagaataatttcgccctgggttacaaggctgcggacttccagctgcacacacatgtgtgagtgtttataatttattccttagtatcagtgcagctgcccaaaatattgtagccattagcatgctgagaagtgatggtactcagatttagcatgccttggtgaatatccatccttgcggcgctatcctcatagcaaaaccttgccaggaggctggtgcacgtggtgtgcaggctgtgctgctggtggtcactggcccctcagcctgcaccccaaacttgaagaagctccagcctctgtagaacaaccactgggatagagggagcccagagcatggcttacctcatggtaagatgag

SEQ ID NO: 10643 - DNA, 1062 bp, Homo sapiens
  SIMILAR (1)..(636): 901254mologous to Oryctolagus cuniculus voltage-dependent anion channel 3,accession number AF209727,Smith-Waterman Score= 1014.
atgtgtaacacaccaacttactgtgacctgggaaaggctgctgaggatgtcttcaacaaaggatatggctttggcatggggaagatagacctgaaaaccaagtcctgtagtgcagtggaattttctacttctggtcatgcttacactgatacagggaaagcatcaggcaacctagaacccgaatgtaaggtctgtaactatggacttaccttcactcaaaaacggaacacagacaatactcttgggacagaaatctctttggagaataagttggctaaagggttgaaactgagtcttgataccatattggtaccaaacacaggaaagaagagtggggaattgaaggcctcctataaatgggattgttttagtgttggcagtaatgttgatctagatttttccggaccaaccatctatggctgggctgtgttggtctttgaagggtggcttgccggctatcagatgagttttgacacagccaaatccaaattgtcacagaataatttcgccctgggttacgaggctgcagacttccagctgcacacacatgtgaccgatggcactgaatttggaggttctatctaccagaaggttaatgggattgaaatgtcaataaaccttgcttggacggctggagtaacaacacccattttggcattgctactaagtacaagctggattgtagaacttctctctctgctaaagctgtggttctggggacccgtgtgggctcttgttgagctgggggagatacttcgaatactgatatcgccccaaagctgcaactctccggccccgccacggctccttatgtacaaagagagggaatcagtcgccggtgacctcgacggccctcggatcagggatgccccgagtccgagcgggcagggtgctcagcagggccaggtgatgggaatcatggggccatcgagcacggaccctggctcccccggtggcctctctagcggccccgacgcccacccggagaagatgagcccccgctgccccccgcagcccagtcagacgcggagccgccgcgcccggggccggctcccccgctag

SEQ ID NO: 10644 - DNA, 1672 bp, Homo sapiens
  SIMILAR (877)..(1107): 741254mologous to Homo sapiens dJ676J13.1 (flavohemoprotein b5+b5R cytochrome b-type NAD(P)H oxidoreductase),accession number AL034347,Smith-Waterman Score=291.
atgagtcccctcaagggcacaggtgcggtccccagcctcttgggcccccagtcaacctcactgtccacaccgagccctcctgcgcacgcgcgctgcggagccggacagttggtggtgctggcttggcccggctgttcgtctccgcgccttgctccgaagcgcgcgaccgtggcgcgacacgccggcgcacaggcgctctcggggaggggcggcgcgcaggcgcggctgggggtgcgaggctgcgcaggcgcggacggcgttggtttgaagaccttcagcgttgccctggcggagcagagacaggccctcggggtggaggtgaggagagctgaggccgcgcgggctccagtcccggagagcgatatgtgtaacacaccaacggtactgtgacctaggaaaggctgctaaggatgtcttcaacaaaggatatggctttggcatggtcaagatagacctgaaaaccaagtcttgtagtggagtgatggaattttctacttctggtcatgcttacactgatacagggaaaagcatcaggcaacctagaaaccaaatataaggtctgtaactatggacttacccttcacccagaaatggaacacagacaatactctaagggacagaaatctctttgggagaataagttggctgaagggttgaaactgactcttgataccatatttgtaccgaacacaggaaagaagagtgggaaattgaaggcctcctataaacgggattgttttagtgttggcagtaatgttgatatagatttttctggaccaaccatctatggctgggctgtgttggccttcggaagggtggcttgctggctatcagatgagttttgacacagccaaatccaaactgtcacagaataatttcgccctgggttacaaggctgcggacttccagcttgcacacacatgtgaacgaatggcactgaatttggaggttctatctaccagaaggtgaatggagaagattgaaacatccataaaccttgcttggacagctgggagtaacaacacccagttttggcatgctggctaaagtacatgctgggattgtagaacttctctctctgctaaagtaaataatgccagcctgattggactgggttatactcagacccttcgaccaggagtcaaattgactttatcagctttaatcgatgggaagaacttcagtgcaggaggtcacaaggttggcttgggatttgaactggaagcttaatgtggtttgaggaaagcatcagattttgtccctggaagtgaagagaaatgaacccactatgttttggccttaaaattcttctgtgaaatttcaaaagtgtgaactttttattcttccaaagaattgtaatcctccccacacctgaagtcctaggggttgccgaatccctcctgagggagatgcttgaaggcatgcctgggaagtttgtcatgtttagtgccacgtttcagttccagttctggaagtgttattaaatgtgttcctcagcgacagtgtagcgtcatgttagaggagacgatctgacccaccagtttgtacatcacgtcctgcatgtcccacaccattttttcatgaccttgtaatatactggtctctgtgctatagtggaatctttggttttgcatcatagtaaaataaaataaacccatcacatttggaacat

SEQ ID NO: 10645 - DNA, 927 bp, Homo sapiens
  SIMILAR (924)..(223): 651254mologous to Cloning vector pZC320 SopB,accession number U26464,Smith-Waterman Score=679.
  misc_feature (1)...(927): n = a,t,c or g
ctacacgaaggtttttgcgctggatgtggctgcccggcaccgggtgcagtttgcgatgccggagtctgatgcggttgcgatgctgaaacaattatcctgagaataaatgccttggcctttatatggaaatgtggaactgagtggatatgctgtttttgtctgaatcgccagcggcatcagcaccttgtcgccttgcgtataatatttgcccatggtgaaaacgggggcgaagaagttgtccatattggccacgtttaaatcaaaactggtgaaactcacccagggattggctgagacgaaaaacatattctcaatgggtaccgagctcgaattcgtaatcatggtcatagctgtttccagtgagacgggcaacagctgattgcccttcaccgcctggccctgagagagttgcagcaagcggtccacgctggtttgccccagcaggcgaaaatcctgtttgatgggtggttccgaaatccggaaaatccctgaccgggcagatagttcaccggggtgagaaaaaagagcaacaactgatttaggcaatttggcggtgttgatacagcgggtaataatcttacgtgaaatattttccgcatcagccagcgcagaaatatttccagcaaattcattctgcaatcggcttgcataacgctgaccacgttcataagcacttgttgggcgataatcgttacccaatctggataatgcagccatctgctcatcatccagctcgccaaccagaacacgataatcactttcggtaagtgcagcagctttacgacggcgactcccatcggcaatttctatgacaccagatactcttcgaccgaacgccggtgtctgttgaccagtcagtagaaaagaagggatgagatcattcagtgcgttctcaataagcagcgccctanagttgctagngcccat

SEQ ID NO: 10646 - DNA, 1749 bp, Homo sapiens
  SIMILAR (1683)..(1507): 931254mologous to Homo sapiens Human secreted protein, SEQ ID NO: 6699,accession number G02618,Smith-Waterman Score=297.
atggtgaaagttggaacctcttacgtgccgatcaacgtctcattttcgccaaaagttggcccagggcttcccggtatcaacagggacaccaggatttatttattctgcgaagtgatcttccgtcacaggaaggacagagaaagcgcggatctgggaagtgacggacagaacggtcccagaccctggattggggaggcggttgccgccgctgctgctgacggtgtgacgttctctgttccggtcacaccacatacgttccgccattcctatgcgatgcacatgctgtatgccggtataccgctgaaagttctgcaaagcctgatgggacataagtccatcagttcaacggaagtctacacgaaggtttttgcgctggatgtggctgcccggcaccggaaccggtttacgcagtttcggcttagtgaaacaaaagaaatcaccaatccgtatgccatgcgtttatacgaatccctgtgtcagtatcgtaagccggatggctcatgcatcgtctctctgaaaatcgactggatcatagagcgttaccagctgcctcaaagttaccagctttattactttgaattggctatcccggtggggtacttctaccctggaagtttttccacggcatcccgaattttgctcctccatccacggggactgagagccattactattgctgtatttggtaagcaaaatacgtacatcaggctcgaaccctttaagatcaacgttcttgagcagatcacgaagcatatcgaaaaactgcagtgcggaggtgtagtcaaacaactcagcaggcgtgggaacaatcagcacatcagcagcacatacgacattaatcgtgccgatacccaggttaggcgcgctgtcaataactatgacatcatagtcatgagcaacagtttcaatggccagtcggagcatcaggtgtggatcgcgcgcctaacctgggtaatcggcacgattaatgtcgtatgtgctgctgatgtgctgattgttcccacgcctgctgagttgtttgactacacctccgcactgcagtttttcgatatgcttcgtgatctgctcaagaacgttgatcttaaagggttcgagcctgatgtacgtattttgcttaccaaatacagcaatagtaatggctctcagtccccgtggatggaggagcaaattcgggatgcctggggaagcatggttctaaaaaatgttgtacgtgaaacggatgaagttggtaaagcgcgcctaacctggggtatcggcacgattaatgtcgtatgtgctgctgatgtgctgattgttcccacgcctgctgagttgtttgactacacctccgcactgcagtttttcgatatgcttcgtgatctgctcaagaacgttgatcttaaagggttcgagcctgatgtacgtattttgcttaccaaatacagcaatagtaatggctctcagtccccgtggatggaggagcaaattcgggatgcctggggaagcatggttctaaaaaatgttgtacgtgaaacggatgaagttggtaaagaacccccgtccaccaatacgttccgccattcctatgcgatgcacatgctgtatgccggtataccgctgaaagttctgcaaagcctgatgggacataagtccatcagttcaacggaagtctacacgaaggtttttgcgctggatgtggctgcccggcaccgggtgcagtttgcgatgccggagtctgatgcggttgcgatgctgaaacaattatcctga

SEQ ID NO: 10647 - DNA, 972 bp, Homo sapiens
  SIMILAR (87)..(539): 351254mologous to Homo sapiens gag,accession number AF156961,Smith-Waterman Score=200.
tgtgacaatctaaaaacttgtcacacttcacatggatctgtcatggcggaaacagcggttatcaatcacaagaaacgtaaaaatagcccgcgaatcgtccagtcaaacgacctcactgaggcggcatatagtctctcccgggatcaaaaacgtatgctgtatctgttcgttgaccagatcagaaaatctgatggcaccctacaggaacatgacggtatctgcgagatccatgttgctaaatatgctgaaatattcggattgacctctgcggaaccagcattgaagagtttcgcggggaaggaagtggttttttatcgccctgaagaggatgccggcgatgaaaaaggctatgaatcttttccttggtttatcaaacgtgcgcacagtccatccagagggctttacagtgtacatatcaacccatatctcattcccttctttatcgggttacagaaccggtttacgcagtttcggcttagtgaaacaaaagaaatcaccaatccgtatgccatgcgtttatacgaatccctgtgtcagtatccacccactctggctgcgcttgaggagcccttcagcccgctggctgcgctgtgggagcccctctctgggctggacgaggacggaaccggctccctcccctcccaggggaggaaggacagagaaagcgcggatctgggaagtgacggacagaacggtcaggacctggattggggaggcggttgcgcgcatgctgctgacggtgtgacgttctctgttccggtcacaccacatacgttccgccattcctatgcgatgcacatgctgtatgccggtataccgctgaaagttctgcaaagcctgatgggacataagtccatcagttcaacggaagtctacacgaaggtttttgcgctggatgtggctgcccggcaccgggtgcagtttgcgatgccggagtctgatgcggttgcgatgctgaaacaattatcctga

SEQ ID NO: 10648 - DNA, 3297 bp, Homo sapiens
  SIMILAR (1270)..(1878): 441254mologous to Moloney murine leukemia virus Pr180,accession number AF033811,Smith-Waterman Score=410.
atgcgtttatacgaatccctgtgtcagtatcgtaagccggatgcgtcaggcatcgtctctctgaaaatcgactggatcatagagcgttaccagctgcctcaaagttaccagcgtatgcctgacttccgccgccgcttcctgcatgaccgacgatacgagtgggaccgtggttccagactaataatcagaccgacgatacgagtgggaccgtggtccagactaataatcagaccgacgatacgagtgggaccatggtccaggactaataatcagaccgacgatacgagtgggaccgtggtcagatctgattatcagaccgacgatacgagtgggaccgtggtccagactaataatcagaccgacgatacgagtgggaccgtggtcagatctaataatcagaccgacgatacgagtgggaccgtggtccagtctgattatcagaccgacgatacaagtggaacagatgggcccacgagagaatattttcaaagtgtcaggtcgactctagaggatcccctggatgtggctgcccggcaccggtcgactctagaggatccccctattgctgtatttggtaagcaaaatacgtacatcaggctcgaaccctttaagatcaacgttcttgagcagatcacgaagcatatcgaaaaactgcagtgcggaggtgtagtcaaacaactcagcaggcgtgggaacaatcagcacatcagcagcacatacgacattaatcgtgccgatacccaggttaggcgcgctgtcaataactatgacatcatagtcatgagcaacagtttcaatggccagtcggagcatcaggtcgactctagaggatccccagcgagcgaactggcgaggaagcaaagaagaactgttctgtcagatagctcttacgctcagcgcaagaagaaatatccaccgtgggaaaaactccagacaccggcgttcggtcgaagagtatctggtgtcatagaaattgccgatgggagtcgccgtcgtaaagctgctgcacttaccgaaagtgattatcgtgttctggttggcgagctggatgatgagcagatggctgcattatccagattgggtaacgattatcgcccaacaagtgcttatgaacgtggtcagcgttatgcaagccgattgcagaatgaatttgctggaaatatttctgcgctggctgatgcggaaaatatttcacgtaagattattacccgctgtatcaacaccgccaaattgcctaaatcagttgttgctcttttttctcaccccggtgaactatctgcccggtcagctgccccgatggtggattcgttaattgcgcgcgtaggagtaatggctcgcggtaatgccattactttgcctgtatgtggtcgggatgtgaagtttactcttgaagtgctccggggtgatagtgttgagaagacctctcgggtatggtcaggtaatgaacgtgaccaggagctgcttactgaggacgcactggatgatctcatcccttcttttctactgactggtcaacagacaccggcgttcggtcgaagagtatctggtgtcatagaaattgccgatgggagtcgccgtcgtaaagctgctgcacttaccgaaagtgattatcgtgttctggttggcgagctggatgatgagcaggattggtctttgggatgcctgcaggtcgactctagaggatcccccggatctgacctttaccaacttcatccgtttcaccaaaatacgtacatcaggctcgaaccctttaagatcaacgttcttgagcagatcacgaagcatatcgaaaaactgcagtgcggaggtgtagtcaaacaactcagcaggcgtgggaacaatcagcacatcagcagcacatacgacattaatcgtgccgatacccaggttaggcgcgctgtcaataactatgacatcatagtcatgagcaacagtttcaatggccagtcggagcatcagaaccggtttacgcagtttcggcttagtgaaacaaaagaaatcaccaatccgtatgccatgcgtttatacgaatccctgtgtcagtatcgcatcgtctctctgaaaatcgactggatcatagagcgttaccagctgcctcaaagttaccagcgtatgcctgacttccgccgccgcttcctgcaggtctgtgttaatgagatcaacagcagaactccaatgcgcctctcatacattgagaaaaagaaaggccgccagacgactcatatcgatctggctctgaaggggctacgtgttttgctcgtggaaggtaacgacccccagggaacagcctcaatgtatcacggatgggtaccagatcttcatattcatgcagaagacactctcctgcctttctatcttggggaaaaggacgatgtcacttatgcaataaagcccacttgctggccggggcttgacattattccttcctgtctggctctgcaccgtattgaaactgagttaatgggcaaatttgatgaagaggatccccctaaatatgctgaaatattcggattgacctctgcggaacgcagtaaggatatacggcaggcattgaagagtttcgcggggaaggaagtggttttttatcgccctgaagaggatgccggcgatgaaaaaggctatgaatcttttccttggtttatcaaacgtgcgcacagtccatccagagggctttacagtgtacatatcaacccatatctcattcccttctttatcgggttacagaaccggtttacgcagtttcggcttagtgaaacaaaagaaatcaccaatccgtatgccatgcgtttatacgaatccctgtgtcagtatcgtaagccggatgcgtcaggcatcgtctctctgaaaatcgactggatcatagagcgttaccagctgcctcaaagttaccagcgtatgcctgacttccgccgccgcttcctgcaggtcgactctagaggatcccccatcggcaatttctatgacaccagatactcttcgaccgaacgccggtgtctgttgaccagaaggacagagaaagcgcggatctgggaagtgacggacagaacggtcaggacctggattggggaggcggttgcgcgcctcgctgctgacggtgtgacgttctctgttccggtcacaccacatacgttccgccattcctatgcgatgcacatgctgtatgccggtataccgctgaaagttctgcaaagcctgatgggacataagtccatcagttcaacggaagtctacacgaaggtttttgcgctggatgtggctgcccggcaccgggtgcagatttgcgatgccggagtctga

SEQ ID NO: 10649 - DNA, 963 bp, Homo sapiens
  SIMILAR (1)..(90): 801254mologous to Homo sapiens cytochrome oxidase I,accession number M10546,Smith-Waterman Score=131.
atgaaactcatggaaacacttaaccagtgcataaacgctggtcatgaaatgacgaaggctatcgccattgcacagtttaatgatgacagcccggaagcgaggaaaataacccggcgctggagaataggtgaagcagcggatttagttggggtttcttctcaggctatcagagatgccgagaaagcagggcgactaccgcacccggatatggaaattcgaggacgggttgagcaacgtgttggttatacaattgaacaaattaatcatatgcgtgatgtgtttggtacgcgattgcgacgtgctgaagacgtatttccaccggtgatcggggttgctgcccataaaggtggcgtttacaaaacctcagtttctgttcatcttgctcaggatctggctctgaaggggctacgtgttttgctcgtggaaggtaatcttgtccacatgaccgtccgcatcatgttgtggatcagcaggacacagcagcaatccacagcaggcatacaaccgcacaccgaggtatacttccgatttttgactttcgactctagaggatcccctaacgctgaccacgttcataagcacttgttgggcgataatcgttacccaatctggataatgcagccatctgctcatcatccagctcgccaaccagaacacgataatcactttcggaaggacagagaaagcgcggatctgggaagtgacggacagaacggtcaggacctggattggggaggcggttgcgcgcatgctgctgacggtgtgacgttctctgttccggtcacaccacatacgttccgccattcctatgcgatgcacatgctgtatgccggtataccgctgaaagttctgcaaagcctgatgggacataagtccatcagttcaacggaagtctacacgaaggtttttgcgctggatgtggctgcccggcaccgggtgcatgtttgcgatgccggagtctga

SEQ ID NO: 10650 - DNA, 1299 bp, Homo sapiens
  SIMILAR (782)..(1552): 901254mologous to Homo sapiens cytochrome oxidase I,accession number V00662,Smith-Waterman Score=1186.
atggatttgggaatcatcagcatatggacaatagttgaagctggaaatgcagcctgtccaaaaccaaacatcaacactgcccgtggctttccccgaccacacacatttttgaaatgcaaaacgaaaaataccaagtgcctcaattcgatcaatcaacgattaaaaatattcgagtctgcaaaaggacttgatgtgtgggacagctggccgctgcaaaacgctgacggaacagtagctgaatacaacggctatcacgttgggtttgctcttgcgggaagcccgaaagacgctgatgacacatcaatctacatgttttatcagaagacagcgaataagttcgaggccaacgatccaagtcctggaaaatcagacgcaggaatggtgccggttctgcaacccttacatctaacgggaaaatccgttaattccacactgactattcccgatttatatccccctacttgtctttcagtgctcaatgtgggcactacctctccaaaaagactggagagcacagactataaaatttctgtaactgtaagcccagagcccaatatagcacctaacgcccaatgggatattctgcaaatgtttctgcataaacaaaccaccttcagagcctatttgccctgggctagcttggagaggtgcacagcaaatacactggagtcccttgctttttaccgccctcagtatgagggaacacacagagcagaaaacactcacaaaatccaatacagcatgcagtgtgctgaaatggaacactctaccaaaacatttgacctactgatcttatttcattatggtgaaagttggaacctcttacgtgccgatcaacgtctcattttcgccaaaagttggcccagggcttcccggtatcaacagggacaccaggatttatttattctgcgaagtgatcttccgtcacaggtatttattcgcgataagctcatggagcggcgtaaccgtcgcacaggaaggacagagaaagcgcggatctgggaagtgacggacagaacggtcaggacctggattggggaggcggttgccgccgctgctgctgacggtgtgacgttctctgttccggtcacaccacatacgttccgccattcctatgcgatgcacatgctgtatgccggtataccgctgaaagttctgcaaagcctgatgggacataagtccatcagttcaacggaagtctacacgaaggtttttgcgctggatgtggctgcccggcaccgggtgcagtttgcgatgccggagtctgatgcggttgcgatgctgaaacaattatcctga

SEQ ID NO: 10651 - DNA, 1170 bp, Homo sapiens
  SIMILAR (289)..(912): 1001254mologous to Homo sapiens 1,2-alpha-mannosidase IC,accession number AF261655,Smith-Waterman Score=1118.
atgggtcgaaggaaaataattgccatgacctttaggaaagaacgactcgagacttgcatgcccctgctgtgcgactctaaaagatcccccacgaagcatatcgaaaaactgcagtgcggaggtgtagtcaagcggcgtgaagaggcgatcagaaaatctgatggcaccctacaggaacatgacggtatctgcgagatccatgttgctaaatatgctgaaatattcggattgaccgggggggaagccagtaaggatatacggcaggcattgaagagtttcgcggggaaggaagtggttttttatcgccctgaagaggatgccggcgatgaaaaaggctatgaatcttttccttggtttatcaaacgtgcgcacagtccatccagagggctttacagtgtacatatcaacccatatctcattcccttctttatcgggttacagaaccggtttacgcagtttcggcttagtgaaacaaaagaaatcaccaatccgtatgccatgcgtttatacgaatccctgtgtcagtatcgtaagcgcgatggctcaggcatcgtctctctgaaaatcgactgggtcatagagcgttaccagctgcctcaagttaccagcgtatgcctgacttccgccgccgttcctgcagggtttattgagaatatgtttttcgtctcagccaatccctgggtgagtttcaccagttttgatttaaacgtggccaatatggagggggtcttcgcccccgttttcaccatgggcaaatattatacgcaaggcgacaaggtgctgatgccgctggcgattcaggtatttattcgcgataagctcatggagcggcgtaaccgtcgcacaggaaggacagagaaagcgcggatctgggaagtgacggacagaacggtcaggacctggattggggaggcggttgccgccgctgctgctgacggtgtgacgttctctgttccggtcacaccacatacgttccgccattcctatgcgatgcacatgctgtatgccggtataccgctgaaagttctgcaaagcctgatgggacataagtccatcagttcaacggaagtctacacgaaggtttttgcgctggatgtggctgcccggcaccgggtgcagtttgcgatgccggagtctgatgcggttgcgatgctgaaacaattatcctga

SEQ ID NO: 10652 - DNA, 3198 bp, Homo sapiens
  SIMILAR (198)..(581): 901254mologous to Plasmid F Protein D,accession number M12987,Smith-Waterman Score=586.
  misc_feature (1)...(3198): n = a,t,c or g
atgaaactcatggaaacacttaaccagtgcataaacgctggtcatgaaatgacgaaggctatcgccattgcacagtttaatgatgacagcccggaagcgaggaaaataacccggcgctggagaataggtgaagcagcggatttagttggggtttcttctcaggctatcagagatgccgagaaagcagggcgactaccgcacccggatatggaaattcgaggacgggttgagcaacgtgttggttatacaattgaacaaattaatcatatgcgtgatgtgtttggtacgcgattgcgacgtgctgaagacgtatttccaccggtgatcggggttgctgcccataaagnatcccccgtgatcggggttgctgcccataaaggtggcgtttacaaaacctcagtttctgttcatcttgctcaggatctggctctgaaggggctacgtgttttgctcgtggaaggtaacgacccccagggaacagcctcaatgtatcacggatgggtaccagatcttcatattcatgcagaagacactctcctgcctttctatcttggggaaaaggacgatgtcacttatgcaataaagcccacttgctggccggggcttgacattattccttcctgtctggctctgcaccgtattgaaactgagttaatgggcaaatttgatgaaggtaaactgcccaccgatccacacctgatgctccgactggccattgaaactgttgctcatgactatgatgtcatagttattgacagcgcgcctaacctgggtatcggcacgattaatgtcgtatgtgctgctgatgtgctgattgttcccacgcctgctgagttgtttgactacacctccgcactgcagtttttcgatatgcttcgtgatctgctcaagaacgttgatcttaaagggttcgagcctgatgtacgtattttgcttaccaaatacagcaatagtaatggctctcagtccccgtggatggaggagcaaattcgggatgcctggggaagcatggttctaaaaaatgttgtacgtgaaacggatgaagttggtaaagcggttatcaatcacaagaaacgtaaaaatagcccgcgaatcgtccagtcaaacgacctcactgaggcggcatatagtctctcccgggatcaaaaacgtatgctgtatctgttcgttgaccagatcagaaaatctgatggcaccctacaggaacatgacggtatctgcgagatccatgttgctaaatatgctgaaatattcggattgacctctgcggaagccaaggatccccgtggcgtttacaaaacctcagtttctgttcatcttgctcaggatctggctctgaaggggctacgtgttttgctcgtggaaggtaacgacccccagggaacagcctcaatgtatcacggatgggtaccagatcttcatattcatgcagaagacactctcctgcctttctatcttggggaaaaggacgatgtcacttatgcaataaagcccacttgctggccggggcttgacattattccttcctgtctggctctgcaccgtattgaaactgagttaatgggcaaatttgatgaaggtaaactgcccaccgatccacacctgatgctccgactggccattgaaactgttgctcatgactatgatgtcatagttattgacagcgcgcctaacctgggtatcggcacgattaatgtcgtatgtgctgctgatgtgctgattgttcccacgcctgctgagttgtttgactacacctccgcactgcagtttttcgatatgcttcgtgatctgctcaagaacgttgatcttaaagggttcgagcctgattgcataaacgctggtcatgaaatgacgaaggctatcgccattgcacagtttaatgatgacagcccggaagcgaggaaaataacccggcgctggagaataggtgaagcagcggatttagttggggtttcttctcaggctatcagagatgccgagaaagcagggcgactaccgcacccggatatggaaattcgaggacgggttgagcaacgtgttggttatacaattgaacaaattaatcatatgcgtgatgtgtttggtacgcgattgcgacgtgctgaagacgtatttccaccggtgatcggggttgctgcccataaaggtggcgtttacaaaacctcagtttctgttcatcttgctcaggatctggctctgaaggggctacgtgttttgctcgtggaagggtttattgagaatatgtttttcgtctcagccaatccctgggtgagtttcaccagttttgatttaaacgtggccaatatggacaacttcttcgcccccgttttcaccatgggcaaatattatacgcaaggcgacaaggtgctgatgccgctggcgattcaggttcatcatgccgtttgtgatggcttccatgtcggcagaatgcttaatgaattacaacagtactgcgatgagtggcagggcggggctgattatcgtgttctggttggcgagctggatgatgagcagatggctgcattatccagattgggtaacgattatcgcccaacaagtgcttatgaacgtggtcagcgttatgcaagccgattgcagaatgaatttgctggaaatatttctgcgctggctgatgcggaaaatatttcacgtaagattattacccgctgtatcaacaccgccaaattgcctaaatcagttgttgctcttttttctcaccccggtgaactatctgcccggtcaggtgatgcacttcaaaaagcctttacagataaagaggaattacttaagcagcaggcatctaaccttcatgagcagaaaaaagctggggtatttattcgcgataagctcatggagcggcgtaaccgtcgcacaggaaggacagagaaagcgcggatctgggaagtgacggacagaacggtcaggacctggattggggaggcggttgccgccgctgctgctgacggtgtgacgttctctgttccggtcacaccacatacgttccgccattcctatgcgatgcacatgctgtatgccggtataccgctgaaagttctgcaaagcctgatgggacataagtccatcagttcaacggaagtctacacgaaggtttttgcgctggatgtggctgcccggcaccgggtgcagtttgcgatgccggagtctgatgccgttgcgatgctgaaacaattatcctga

SEQ ID NO: 10653 - DNA, 867 bp, Homo sapiens
  misc_feature (1)...(867): n = a,t,c or g
atgctgctcaaggccgtagaggaaaagcggttcctgcccatgggcagcgaccgcgaggtcagcagcgattttcagctgatcgcaggcaccaatcgtgacttgcggatcgacgtggcacaggggcgctttcgggaggacttattcgcgcgtatcaacctatngcgccctgaggacatcgagccgaatgtcgaccatttgcttgcgagggctgctacagagatagggcaggccgttcgcttcaatgccgaggccaaggcacgctacctccagtttgccaggtcaaaagaggcgccctggagtggcaacttccgcgatctctcagctagcgtgactcgcatggccacgttggccgatggagggcgaatctctacgggcttggtcgacgcggaaatccagcgcctccaatggctttggcagcccgccggggaagcccaggtacgcgatatcgaccttgatggcctgctacccactgatacggcctgcaagttggacttgtttgaccgcctgcagctcgaagccgtggttcgagtctgccgcgagtcgcagacgctgtctgatgcagaaccccatgatcttccgtcacaggtatttattcgcgataagctcatggagcggcgtaaccgtcgcacaggaaggacagagaaagcgcggatctgggaagtgacggacagaacggtcaggacctggattggggaggcggttgccgccgctgctgctgacgttctgcaaagcctgatgggacataagtccatcagttcaacggaagtctacacgaaggtttttgcgctggatgtggctgcccggcaccgggtgcagtttgcgatgccggagtctgatgcggttgcgatgctgaaacaattatcctga

SEQ ID NO: 10654 - DNA, 755 bp, Homo sapiens
  SIMILAR (589)..(419): 451254mologous to Homo sapiens interferon-inducible protein,accession number X84958,Smith-Waterman Score=100.
  misc_feature (1)...(755): n = a,t,c or g
gccctcgctggcatcaaagggagacagagccgctgtcacagtcaggagttgcctctctggttctgcgggacccagcccccctggaggtgggaaactgcagaggaagaggaagtgggttgtctggaaaggcagggctgggccacaagcctacagttctgcaggctttgctactgtgcataaacgctggtcatgaaatgacgaaggctatcgccattgcacagtttaatgatgacagcccggaagcgaggaaaataacccggcgctggagaataggtgaagcagcggatttagttggggtttcttctcaggctatcagagatgccgagaaagcagggcgactaccgcacccggatatggaaattcgaggacgggttgagcaacgtgttggttatacaattgaacaaattaatcatatgcgtgatgtgtttggtacgcgattgcgacgtgctgaagacgtatttccaccggtgatcggggttgctgcccataaaggtggcgtttacaaaaccccattttctgttcatcttgctcaggatctggctctgaaggggctacgtgttttgcctcgtgggagnagaatacccctgtatgccggtataccgctgaaagttctgcaaagcctgatgggacataagtgcatcagttcaacggaagtctacacgaaggtttttgcgctggatgtggctgcccggcaccgggtgcagtttgcgatgccggagtctgatgcggttgcgatgctgaaacaattatcctga

SEQ ID NO: 10655 - DNA, 1452 bp, Homo sapiens
  SIMILAR (358)..(1092): 991254mologous to Cloning vector pZC320 SopA,accession number U26464,Smith-Waterman Score=1278.
atggaagccatcacaaacggcatgatgaacctgaatcgccagcggcatcagcaccttgtcgccttgcgtataatatttgcccatggtgaaaacgggggcgaagaagttgtccatattggccacaaccggtttacgcagtttcggcttagtgaaacaaaagaaatcaccaatccgtatgccatgcgtttatacgaatccctgtgtcagtatcagcgttaccagctgcctcaaagttaccagcgtatgcctgacttccgccgccgcttcctgcaggtctgtgttaatgagatcaacagcagaactccaatgcgcctctcatacattgagaaaaagaaaggccgccagacgactcatatcgctatcagagatgccgagaaagcagggcgactaccgcacccggatatggaaattcgaggacgggttgagcaacgtgttggttatacaattgaacaaattaatcatatgcgtgatgtgtttggtacgcgattgcgacgtgctgaagacgtatttccaccggtgatcggggttgctgcccataaaggtggcgtttacaaaacctcagtttctgttcatcttgctcaggatctggctctgaaggggctacgtgttttgctcgtggaaggtaacgacccccagggaacagcctcaatgtatcacggatgggtaccagatcttcatattcatgcagaagacactctcctgcctttctatcttggggaaaaggacgatgtcacttatgcaataaagcccacttgctggccggggcttgacattattccttcctgtctggctctgcaccgtattgaaactgagttaatgggcaaatttgatgaaggtaaactgcccaccgatccacacctgatgctccgactggccattgaaactgttgctcatgactatgatgtcatagttattgacagcgcgcctaacctgggtatcggcacgattaatgtcgtatgtgctgctgatgtgctgattgttcccacgcctgctgagttgtttgactacacctccgcactgcagtttttcgatatgcttcgtgatctgctcaagaacgttgatcttaaagggttcgagcctgatgtatttattcgcgataagctcatggagcggcgtaaccgtcgcacaggaaggacagagaaagcgcggatctgggaagtgacggacagaacggtcaggacctggattggggaggcggttgccgccgctgctgctgacggtgtgacgttctctgttccggtcacaccacatacgttccgccattcctatgcgatgcacatgctgtatgccggtataccgctgaaagttctgcaaagcctgatgggacataagtccatcagttcaacggaagtctacacgaaggtttttgcgctggatgtggctgcccggcaccgggtgcagtttgcgatgccggagtctgatgcggttgcgatgctgaaacaattatcctga

SEQ ID NO: 10656 - DNA, 2600 bp, Homo sapiens
  SIMILAR (309)..(16): 981254mologous to unidentified cloning vector 29kD protein essential for the replication of mini F plasmid,accession number AB015619,Smith-Waterman Score=488.
ctaaaggacgctacggcgataaaaaaccactttcttccccgcgaaactcttcaatgcctgccgtatatccttactggcttccgcagaggtcaatccgaatatttcagcatatttagcaacatggatctcgcagataccgtcatgttcctgtagggtgccatcagattttctgatctggtcaacgaacagatacagcatacgtttttgatcccgggagagactatatgccgcctcagtgaggtcgtttgactggacgattcgcgggctatttttacgtttcttgtgattgataaccgctgtttccgccatgacagatccatgtgaagtgtgacaagtttttagattgtcacactggctcagggggcggctgcctcgccaggcgccacgaagccccggcgtcccacaggtcccggaggccgctgcgtcgcggggagctgggctcgggccgccggcggttgcgccggggcagccccgcggggagagcaccatgaggactgactcgggggctcggctggaggagggccacctgatctgctgcagacattctactgctgaggcaaaacaagcatctttcgtggttggcaaaacattgtcacctgttggagtgtcattatctccttgcttcttaaccttgttttcatttcttcctttgccctttgacttatttccctttttccttaactcccttccctcttttattccttttattccatttttattgtcacctgttggagtgtcattatctccttgcttcttaaccttgttttcatttcttcctttgccctttgacttatttccctttttccttaactcccttccctcttttattccttttattccatttttctgagatggcactggcttttcaccatgctctgagtcctctcttactgaatgatctgacagtttccgtaggtattcattgactgcttgggtgtcagggtatgatggtatgtttctggcagaggaaatttcagttgttcccatgacattttgttgagaggacatggcatcgctgcttgtgatctgagcacttactgcattcagttcagtagcaacagactgatcatttgctacaagagtgttctcaaatacttcttcctgcctgtcaagggtttcagtggaggggctgagagcagtgctggcatggttttctgcctgagattctgtcagtgtcacacctaatgggcaacaatgactgtctgatataatcacatggtcttctttgtcagtcatagtaatcaagagctggctgcactggttgcatcgttctgggactggcttcagatcctttccactaagagtccagtcatctgaaaattctccttcatagatagtatcatcttcggaaagcaaaaccccatttcccatcattttattaaggtgaaagttgccctcgtagtataatccaaactgggtaaccaccacaccattcccttgacacacatcatcttgccacattcccatatacttttcccccccgcggtttgactctagaggatccccacgaagtttttgcgctggatgtggctgcccggcaccgggtgcagtttgcgatgccggagtctgatgcggttgcgatgctgaaacaattatcctgagaataaatgccttggcctttatatggaaatgtggaactgagtggatatgctgtttttgttgcccgctttccagtcgggaaacctgtcgtgccagctgcattaatgaatcggccaacgcgcggggagaggcggtttgcgtattgggcgccagggtggtttttcttttcaccagtgagacgggcaacagctgattgcccttcaccgcctggccctgagagagttgcagcaagcggtccacgctggtttgccccagcaggcgaaaatcctgtttgatggtggttccgaaatcggcaaaatccctaggcagaacatcgccgtgccccagctgcccttccttccctttcccccaggtccacacttctgttctcagagaaggcaggagcgcatctgcttctccactgtatgtgggggtcagaaccactgtcctcgttttcacccgtgcagcctttcttaagagcccgcggtttggctctagaggatccccgaaacagtttgctttgtatttggtttcctctgtcttatggggcagctggggatggaagtgtgtgagacccaggaaggggaaggaatgaggaccctcgcttgggccagaggctgctgcagcacccagcagcagcaccatttctaccacttcctccccttcacagagctgctgcaatactgcctgagatggcactggcttttcaccatgctctgagtcctctcttactgaatgatctgacagtttccgtaggtattcattgactgcttgggtgtcagggtatgatggtatgtttctggcagaggaaatttcagttgttcccatgacattttgttgagaggacatggcatcgctgcttgtgatctgagcacttactgcattcagttcagtagcaacagactgatcatttgctacaagagtgttctcaaatacttcttcctgcctgtcaagggtttcagtggaggggctgagagcagtgctggcatggttttctgcctgagattctgtcagtgtcacac

SEQ ID NO: 10657 - DNA, 729 bp, Homo sapiens
atggtggattcgttaattgcgcgcgtaggagtaatggctcgcggtaatgccattactttgcctgtatgtggtcgggatgtgaagtttactcttgaagtgctccggggtgatagtgttgagaagacctctcgggtatggtcaggtaatgaacgtgaccaggagctgcttactgaggacgcactggatgatctcatcccttcttttctactgactggtcaacagacaccggcgttcggtcgaagagtatctgctgctgcacttaccgaaagtgattatcgtgttctggttggcgagctggatgatgagcagatggctgcattatccagattgggtaacgattatcgcccaacaagtgcttatgaacgtggtcagcgttatgcaagccgattgcagaatgaatttgctggaaatatttctgcgctggctgatgcggaaaatatttcacgtaagattattacccgctgtatcaacaccgccaaattgcctaaatcagttgttgctcttttttctcaccccgacccccacactacgttccgccattcctatgcgatgcacatgctgtatgccggtataccgctgaaagttctgcaaagcctgatgggacataagtccatcagttcaacggaagtctacacgaaggtttttgcgctggatgtggctgcccggcaccgggtgcagtttgcgatgccggagtctgatgcggttgcgatgctgaaacaattatcctga

SEQ ID NO: 10658 - DNA, 1599 bp, Homo sapiens; identical to SEQ ID NO: 4024
  SIMILAR (396)..(506): 911254mologous to Homo sapiens PRO1546,accession number AF116638,Smith-Waterman Score=192.

SEQ ID NO: 10659 - DNA, 1575 bp, Homo sapiens
  SIMILAR (395)..(1876): 571254mologous to Homo sapiens initation factor 4B,accession number X55733,Smith-Waterman Score=1080.
atggagcatctaaatccacaaagtaaagatccccgcggggaccctcactacgttgaagacaaaggccataaataccttgtattcgaagccaacacgggaacagaaaacggataccaaggcgaagaatctttatttaacaaagcgtactacggcggcggcacgaacttcttccgtaaagaaagccagaagcttcagcagagcgctaaaaaacgcgatgctgagttagcgaacggcgccctcggtatcatagagttaaataatgattacacattgaaaaaagtaatgaagccgctgatcacttcaaacacggtaactgatgaaatcgagcgcgcgaatgttttcaaaatgaacggcaaatggtacttgttcactgattcacgcggttcaaaaatgacgatcgatggtattaactcaaacgatatttacatgcttggttatgtatcaaactctttaaccggcccttacaagccgctgaacaaaacagggcttgtgctgcaaatgggtcttgatccaaacgatgtgacattcacttactctcacttcgcagtgccgcaagccaaaggcaacaatgtggacccggatgtcgtcatggtgggggaaattcgtgatacagaaaccgcgcagattgcggttcaggcctcgctcaccggccatctggtactctcaacactccacactaacagtgcatcaggcgcagtgacccggctccgcgacatgggcgtcgaatcattcctgctttcgtcttccctggcagggattatcgcgcaacgtctggttcgtcgcctgtgtccgcaatgccgacaattcacgcccgtatcaccccaacaagcgggtagatccccgttcgagcctgatgtacgtattttgcttaccaaatacagcaatagtaatggctctcagtccccgtggatggaggagcaaattcgggatgcctggggaagcatggttctaaaaaatgttgtacgtgaaacggatgaagttggtaaaggtcagatccggatgagaactgtttttgaacaggccattgatcaacgctcttcaactgatacttcgttatcgacaccagctgccccgatggtggattcgttaattgcgcgcgtaggagtaatggctcgcggtaatgccattactttgcctgtatgtggtcgggatgtgaagtttactcttgaagtgctccggggtgatagtgttgagaagacctctcgggtatttattcgcgataagctcatggagcggcgtaaccgtcgcacaggaaggacagagaaagcgcggatctgggaagtgacggacagaacggtcaggacctggattggggaggcggttgccgccgctgctgctgacggtgtgacgttctctgttccggtcacaccacatacgttccgccattcctatgcgatgcacatgctgtatgccggtataccgctgaaagttctgcaaagcctgatgggacataagtccatcagttcaacggaagtctacacgaaggtttttgcgctggatgtggctgcccggcaccgggtgcagtttgcgatgccggagtctgatgcggttgcgatgctgaaacacttatcctga

SEQ ID NO: 10660 - DNA, 1107 bp, Homo sapiens; identical to SEQ ID NO: 9184
  SIMILAR (378)..(479): 911254mologous to Homo sapiens PRO1546,accession number AF116638,Smith-Waterman Score=180.

SEQ ID NO: 10661 - DNA, 807 bp, Homo sapiens; identical to SEQ ID NO: 10282
  SIMILAR (753)..(628): 901254mologous to Homo sapiens Human secreted protein, SEQ ID NO: 7217,accession number G03136,Smith-Waterman Score=194.

SEQ ID NO: 10662 - DNA, 870 bp, Homo sapiens
  SIMILAR (3)..(356): 721254mologous to Homo sapiens putative p150,accession number U93574,Smith-Waterman Score=460.
atgaaactcatggaaacacttaaccagtgcataaacgctggtcatgaaatgacgaaggctatcgccattgcacagtttaatgatgacagcccggaagcgaggaaaataacccggcgctggagaataggtgaagcagcggatttagttggggtttcttctcaggctatcagagatgccgagaaagcagggcgactaccgcacccggatatggaaattcgaggacgggttgagcaacgtgttggttatacaattgaacaaattaatcatatgcgtgatgtgtttggtacgcgattgcgacgtgctgaagacgtatttccaccggtgatcggggttgctgcccataaaggtggcgtttacaaaacctcagtttctgttcatcttgctcaggatctggctcctgaagggctacgtgttttggctcgtggaagttggcccagggcttcccggtatcaacagggacaccaggatttatttattctgcgaagtgatcttccgtcacaggtatttattcgcgataagctcatggagcggcgtaaccgtcgcacaggaaggacagagaaagcgcggatctgggaagtgacggacagaacggtcaggacctggattggggaggcggttgccgccgctgctgctgacggtgtgacgttctctgttccggtcacaccacatacgttccgccattcctatgcgatgcacatgctgtatgccggtataccgctgaaagttctgcaaagcctgatgggacataagtccatcagttcaacggaagtctacacgaaggtttttgcgctggatgtggctgcccggcaccgggtgcagtttgcgatgccggagtctgatgcggttgcgatgctgaaacaattatcctga

SEQ ID NO: 10663 - DNA, 825 bp, Homo sapiens
  SIMILAR (1)..(111): 861254mologous to Homo sapiens PRO1546,accession number AF116638,Smith-Waterman Score=163.
atggtggattcgttaattgcgcgcgtaggagtaatggctcgcggtaatgccattactttgcctgtatgtggtcgggatgtgaagtttactcttgaagtgctccggggtgatagtgttgagaagacctctcgggtatggtcaggtaatgaacgtgaccaggagctgcttactgaggacgcactggatgatctcatcccttcttttctactgactggtcaacagacaccggcgttcggtcgaagagtatctggtgtcatagaaattgccgatgggagtcgccgtcgtaaagctgctgcacttaccgaaagtgattatcgtgttctggttggcgagctggatgatgagcagatggctgcattatccagattgggtaacgattatcgcccaacaagtgcttatgaacgtggtcagcgttatgcaagccgattgcagaatgaatttgctggagaacttagtgtatttattcgcgataagctcatggagcggcgtaaccgtcgcacaggaaggacagagaaagcgcggatctgggaagtgacggacagaacggtcaggacctggattggggaggcggttgccgccgctgctgctgacggtgtgacgttctctgttccggtcacaccacatacgttccgccattcctatgcgatgcacatgctgtatgccggtataccgctgaaagttctgcaaagcctgatgggacataagtccatcagttcaacggaagtctacacgaaggtttttgcgctggatgtggctgcccggcaccgggtgcagtttgcgatgccggagtctgatgcggttgcgatgctgaaacaattatcctga

SEQ ID NO: 10664 - DNA, 945 bp, Homo sapiens; identical to SEQ ID NO: 4294
  SIMILAR (1)..(138): 801254mologous to Homo sapiens reverse transcriptase,accession number L27428,Smith-Waterman Score=190.

SEQ ID NO: 10665 - DNA, 894 bp, Homo sapiens
  SIMILAR (937)..(1416): 991254mologous to Cloning vector pBACe3.6 levansucrase,accession number U80929,Smith-Waterman Score=834.
ctacacgaaggtttttgcgctggatgtggctgcccggcaccgggtgcagtttgcgatgccggagtctgatgcggttgcgatgctgaaacaattatcctgagaataaatgccttggcctttatatggaaatgtggaactgagtggatatgctgtttttgtccggcctttgtcttcaacgtagtgagggtctctcagcgtatggttgtcgccgggtgtataattgccttcatcgataaactgctgaacgttctgatatgtttttccgtctccgtcaaaaatcgttttgtgatcttccactccgttgattttgagtgtgtcatcagattttgacacatttacctgcgctgttgtcaggctttgtttgccgtaatgtttaccggaatagtcagtgtagaataaacggatttttccgtcagatgtaaaggttgcagaaccggaccattcttgcgtctgatctttcaggatcggatcgttggcgtcgaacttatcgctgtctttaaagacacggcccgcgtttttccagctgtcgattgagttgtcgccgaccttttgataaaacatgtagattgatgtgtcatcagcgtctttcgggcttcccgcaagagcaaacacaacgtgatagccgttgtattcagctactgttccgtcagcgttttgcagcggccagctgtcccacacatcaagtccttttgcagactcaatatttttaatcgttgattgatcgaattgaggcacttggtatttttcgttttgctgctgtttagggatctgcagcatatcatggcgtgtaatatgagagacgccgtacgtttctttgtatgctttttggttattttctttcgcgaagcttgagtcgctcctcctgccagaagtgcagtcgaacttgagttgcat

SEQ ID NO: 10666 - DNA, 882 bp, Homo sapiens
  SIMILAR (30)..(344): 881254mologous to Homo sapiens PRO1546,accession number AF116638,Smith-Waterman Score=481.
  misc_feature (1)...(882): n = a,t,c or g
gcccaaggttggcatgcccggcaggggtccctttttaaaggattttgggaaaaggtgcgggccagacccgggccgagtccttggtatggggaaggggggttcccgcgcgctgctgctaaccgggtggcccttttcttgttccgggtccccccccctaggttcggccctttcttatgcaaggcccatggctgtagccgggtatcccgctaaaagttctgcaaagcctgatgggccataagtccatcagttcaccggaagtctaccggaaggtttttgcgctgaatgtggctgcccgccaccgggtgcagtttgcgatgccggagtttgatgcggttgcgatgctgaaacaattatcctgagaataaatgccttggcctttatatggaaatgtggaactgagtggatatgctgtttttgtctgttaaacagagaagctggctgttatccactgagaagcgaacgaaacagtcgggaaaatctcccattatcgtagagatccgcattattaatctcaggagcctgtgtagcgtttataggaagtagtgttctgtcatgatgcctgcaagcggtaacgaaaacgatttgaatatgccttcaggaacaatagaaatcttcgtgcggtgttacgttgaagtggagcggattatgtcagcaatggacagaacaacctaatgaacacagaaccatgatgtggtctgtccttttacagcnnnnnnnnnnnnnnnnnnnnnnnnnnnnnnnnnnnnnnnnnnnnnnnnnnnnnnnnnaccagggaacagcacttatatattctgcttacacacgatgcctgaaaaaacttcccttggggttatccacttatccacggggatatttttataattattttttttatagttttta

SEQ ID NO: 10667 - DNA, 724 bp, Homo sapiens
  SIMILAR (1)..(246): 751254mologous to Homo sapiens reverse transcriptase,accession number L27428,Smith-Waterman Score=312.
tgattatcgtgttctggttggcgagctggatgatgagcagatggctgcattatccagattgggtaacgattatcgcccaacaagtgcttatgaacgtggtcagcgttatgcaagccgattgcagaatgaatttgctggaaatatttctgcgctggctgatgcggaaaatatttcacgtaagattattacccgctgtatcaacaccgccaaattgcctaaatcagttgttgctcttttttctcaccccggtgaactatctgcccggtcaggtgatgcacttcaaaaagcctttacagataaagaggaattacttaagcagcaggcatctaaccttcatgagcagaaaaaagctggggtatttattcgcgataagctcatggagcggcgtaaccgtcgcacaggaaggacagagaaagcgcggatctgggaagtgacggacagaacggtcaggacctggattggggaggcggttgccgccgctgctgctgacggtgtgacgttctctgttccggtcacaccacatacgttccgccattcctatgcgatgcacatgctgtatgccggtataccgctgaaagttctgcaaagcctgatgggacataagtccatcagttcaacggaagtctacacgaaggtttttgcgctggatgtggctgcccggcaccgggtgcagtttgcgatgccggagtctgatgccgttgcgatgctgaaacaattatcctga

SEQ ID NO: 10668 - DNA, 1026 bp, Homo sapiens
  SIMILAR (104)..(340): 771254mologous to Homo sapiens PRO1546,accession number AF116638,Smith-Waterman Score=335.
atggtaaatattacacatgtggcagtaattcttgcagttcttattgggaaggaggatgttaagcgtgacaccatgaagaggtggtcgggaaaacctgtgcggcccactggcattaaggaattcgcccaccccgcggggaaaaggcggtttgccgttatggggccccaagtccgacaatctaaaaacttgtcacacttcacagtgtgtctgtcatggcggaaacagcggttatcaatcacaagaaacgtaaaaatagcccgcgaatcgtccagtcaaacgaccttactgaggcggtttatagtctctcccgggatcaaaaacgtgcgcggtgggtgttcgttgaccagatcagaaaatctgatggcaccctacaggaacatgacggtactctgcgagatccatgttgctaaatatgctgaaatattcggattgacctctgcggaagccagtaaggatatacggcaggcattgaagagtttcgcggggaaggaagtggttttttatcgccctgaagaggatgccggcgatgaaaaaggctatgaatcttttccttggtttatcaaacgtgcgcacagtccatccagaaggctttacagtggacatatcaacccatatctcattcccttctttatcgggttacagaaccggtttacgcaggtatttattcgcgataagctcatggagcggcgtaaccgtcgcacaggaaggacagagaaagcgcggatctgggaagtgacggacagaacggtcaggacctggattggggaggcggttgccgccgctgctgctgacggtgtgactttctctgttccggtcacaccacatacgttgcgccattcctatgcgatgcacatgctgtatgccggtataccgctgaaagttctgcaaagcctgatgggacataagtccatcagttcaacggaagtctacacgaaggtttttgcgctggatgtggctgcccggcaccgggtgcagtttgcgatgccggagtctgatgcggttgcgatgctgaaacaattatcctga

SEQ ID NO: 10669 - DNA, 1317 bp, Homo sapiens
  SIMILAR (370)..(966): 951254mologous to Cloning vector pZC320 SopB,accession number U26464,Smith-Waterman Score=934.
atgaatgctcatccggagttccgtatggcaatgaaagacggtgagctggtgatatgggatagtgttcacccttgttacaccgttttccatgagcaaactgaaacgttttcatcgctctggagtgaataccacgacgatttccggcagtttctacacatatattcgcaagatgtggcgtgttacggtgaaaacctggcctatttccctaaagggtttattgagaatatgtttttcgtctcagccaatccctgggtgagtttcaccagttttgatttaaacgtggccaatatggacaacttcttcgcccccgttttcaccatgggcaaatattatacgcaaggcgacaaggtgctgatgccgctggcgattcagacaccggcgtttggtcgaagagtatatgctgtcatagaaattgccgatgggagtcgccgtcgtaaagctgctgcacttaccgaaagtgattatcgtgttctggttggcgagctggatgatgagcagatggctgcattatccagattgggtaacgattatcgcccatcttttgcttatgaacgtggtcagcgttatgcaagccgattgcagaatgaatttgctggaaatatttctgcgctggctgatgcggaaaatatttcacgtaagattattacccgctgtatcaacaccgccaaattgcctaaatcagttgttgctcttttttctcaccccggtgaactatctgcccggtcaggtgatgcacttcaaaaagcctttacagataaagaggaattacttaagcagcaggcatctaaccttcatgagcagaaaaaagctggggtgatatttgaagctgaagaagttatcactcttttaacttctgtgcttaaaacgtcatctgcatcaagaactagtttaagctcacgacatcagtttgctcctggagcgacagtattgtataagggcgataaaatggtatttattcgcgataagctcatggagcggcgtaaccgtcgcacaggaaggacatataaagcgcggatctgggaagtgacggacagaacggtcaggacctggattggggaggcggttgccgccgctgctgctgacggtgtgacgttctctgttccggtcacaccacatacgttccgccattcctatgcgatgcacatgctgtatgccggtataccgctgaaagttctgcaaagcctgatgggacataagtccatcagttcaacggaagtctacacgaaggtttttgcgctggatgtggctgcccggcaccgggtgcagtttgcgatgccggagtctgatgcggttgcgatgctgaaacaattatcctga

SEQ ID NO: 10670 - DNA, 1131 bp, Homo sapiens
  SIMILAR (1)..(765): 981254mologous to Homo sapiens p53 associated,accession number Z12020,Smith-Waterman Score=1347.
gatcttgatgctggtgtaagtgaacattcaggtgattggttggatcaggattcagtttcagatcagtttagtgtagaatttgaagttgaatctctcgactcagaagattatagccctagtgaaggagggcaagaactctcagatgaagatgatgaggtatatcaagttactgtgtatcaggcaggggagagtgatacagattcatttgaagaagatcctgaaatttccttagctgactattggaaatgcacttcatgcaatgaaatgaatcccccccttccatcacattgcaacagatgttgggcccttcgtgagaattggcttcctgaagatacagggaaagataaaggggaaatctctgagaaagccaaactggaaaactcaacacaagctgaagagggctttgatgttcctgattgtaaaaaaactatagtgaatgattccagagagtcatgtgttgaggaaaatgatgataaaattacacaagcttcacaatcacaagaaagtgaagactattctcagccatcaacttctagtagcattatttatagcagccaagaagatgtgaaagagtttgaaagggaagaaacccaagacaaagaagagagtgtggaatctagtttgccccttaatgccattgaaccttgtgtgatttgtcaaggtcgacctaaaaatggttgcattgtccatggcaaaacaggacatcttatggcctgctttacatgtgcaaagaagctaaagaaaaggaataagccctgcccagtatttattcgcgataagctcatggagcggcgtaaccgtcgcacaggaaggacagagaaagcgcggatctgggaagtgacggacagaacggtcaggacctggattggggaggcggttgccgccgctgctgctgacggtgtgacgttctctgttccggtcacaccacatacgttccgccattcctatgcgatgcacatgctgtatgccggtataccgctgaaagttctgcaaagcctgatgggacataagtccatcagttcaacggaagtctacacgaaggtttttgcgctggatgtggctgcccggctccgggtgcagtttgcgatgccggagtctgatgcggttgcgatgctgaaacaattatcctga

SEQ ID NO: 10671 - DNA, 1614 bp, Homo sapiens
  SIMILAR (871)..(1968): 891254mologous to Homo sapiens putative p150,accession number U93569,Smith-Waterman Score=1773.
  misc_feature (1)...(1614): n = a,t,c or g
atgtggcgttggcgagagacttcacatgacaactatgataaggagcacctggggaagcccacgctaagggaagcgacccctagggacgcaaggcaaaagctcgcaaccgcacccctgggggaagctaagggaaagcaacgtaacccagggggacccacactccccggtgtgaaagggagagaacagcccctgcaaagggaacaccaagggccaccaagggctaggaagcgaacgggaaaacaactcacccccgaggtaactggaacggatcgtacagctaaaggaaagggtacggacgtgggtacgggagggaacgggggcccaaaggggaacaaaacaaaccccggaaggggacgccaaactttaaaacaccccaacgggaccacttgtggaacctgccacaaacccggaggccccccaagggaacccgaagaaaacaggaggcgggggaccaaggccaacttagggaagccggggggaacaaaacggaaagaaaaggaacaggaagggacggggaccccaccggaagggaacacgagggcgaccgcagggaccgcaaagacccggaggggaaaccaaaagacaccgcagggaaaaccaaaggagagggaaggcaccgggggaaaaaagaaaggggacaggaaaggcaccgcgaagcgaaacgccacacccacgggaacggcgaaacgcacccgcaagggaaggggcaacgaacaccacacgcgaaggggaacgcgtagcgcaacggggggcgaaagaaaaggcgagagagggcggaggggacaaccccagagtggggggggggcgcacaacaaagcggcaaaccgaatgcggaaacgcgagagcgtcggggcgacgcccaaagcccacgcgcacccgaaaccggtaagngggaaggcgaaggcgcgaaggcgaacacgaaagcgcaaaccgcaaacgacgcccaggggacgaccgaacgcccacagcacgaccgagcgaaggacgaaatcagggggaggggcaaacgacaacaccaaactcacgcggaaagacactaccagaccggcacgcacaacaccaacatcacgaaaccgcgggcgcgggcggacgaggcgaaagcggaacagcgcaaaagaacaacgcaaccgagcaacgaacgcaacgccgagcatacgcgaatacgaacaaagcgcaaggcgcacaaggcggaaacggcgaagcgaccaagcggccacagccacatcgaaacgccacatcacgggcgtatttattcgcgataagctcatggagcggtttaaccttcgcacaggaaggacagagaaagcgcggatctgggaagtgacggtcagaacggtcaggacctggattggggaggcggttgccgccgctgctgctgacggtgtgacgttctctgttccggtcacaccacatacgttccgccattcctatgcgatgcacatgctgtatgccggtataccgctgaaagttctgcaaagcctgatgggacataagtccatcagttcaacggaagtctacacgaaggtttttgcgctggatgtggctgcccggcaccgggtgcagtttgcgatgccggagtctgatgcggttgcgatgctgaaacaattatcctga

SEQ ID NO: 10672 - DNA, 1099 bp, Homo sapiens
  SIMILAR (565)..(1236): 1001254mologous to Cloning vector pSacBII SacB,accession number U09128,Smith-Waterman Score=1207.
  misc_feature (1)...(1099): n = a,t,c or g
atccccaagctggaaaaacgcgggccgtgtctttaaagacagcgataagttcgacgccaacgatccgatcctgaaagatcagacgcaagaatggtccggttctgcaacctttacatctgacggaaaaatccgtttattctacactgactattccggtaaacattacggcaaacaaagcctgacaacagcgcaggtaaatgtgtcaaaatctgatgacacactcaaaatcaacggagtggaagatcacaaaacgatttttgacggagacggaaaaacatatcagaacgttcagcagtttatcgatgaaggcaattatacatccggcgacaaccatacgctgagagaccctcactacgttgaagacaaaggccataaataccttgtattcgaagccaacacgggaacagaaaacggataccaaggcgaagaatctttatttaacaaagcgtactacggcggcggcacgaacttcttccgtaaagaaagccagaagcttcagcagagcgctaaaaaacgcgatgctgagttagcgaacggcgccctcggtatcatagagttaaataatgattacacattgaaaaaagtaatgaagccgctgatcacttcaaacacggtaactgatgaaatcgagcgcgcgaatgttttcaaaatgaacggcaaatggtacttgttcactgattcacgcggttcaaaaatgacgatcgatggtattaactcaaacgatatttacatgcttggnatcccccagctcatggagcggcgtaaccgtcgcacaggaaggacagagaaagcgcggatctgggaagtgacggacagaacggtcaggacctggattggggaggcggttgccgccgctgctgctgacggtgtgacgttctctgttccggtcacaccacatacgttccgccattcctatgcgatgcacatgctgtatgccggtataccgctgaaagttctgcaaagcctgatgggacataagtccatcagttcaacggaagtctacacgaaggtttttgcgctggatgtggctgcccggcaccgggtgcagtttgcgatgccggagtctgatgcggttgcgatgctgaaacaattatcctga

SEQ ID NO: 10673 - DNA, 939 bp, Homo sapiens
  SIMILAR (592)..(936): 1001254mologous to Plasmid F Protein D,accession number M12987,Smith-Waterman Score=584.
atgttgcctttttatcctcgaagagcctctgtttgtcatgtagcttgtgataaccacattgttgcctttggcttgcggcactgcgaagtgagagtaagtgaatgtcacatccgtttggatcaagacccatttgcagcacaagccctgttttgttcaacggcttgctttgattctctgctggataagaagatcacctctgtggcaccagctgccggcaaagctgcttgtcgatgtccccacagaagctgcacagaggaaacgacttggcaagtggctgcaagaccagcagaatccctggttgcccagtgtctcctgccatgcgtgttttactctaagcaggctgccttccgcaacaaccacgtggagtggcccctgaatgacacctggagtgaaaacttcatggaaagcaacgtccaccctcccttcttctctcattgcttctttctatttgacgtggccttaaggaagctcacgttatcccataacacaaggcagtgttggcccagggcttcccggtatcaacagggacaccaggatttatttattctgcgaagtgatcttccgtcacaggtatttattcgcgataagctcatggagcggcgtaaccgtcgcacaggaaggacagagaaagcgcggatctgggaagtgacggacagaacggtcaggacctggattggggaggcggttgccgccgctgctgctgacggtgtgacgttctctgttccggtcacaccacatacgttccgccattcctatgcgatgcacatgctgtatgccggtataccgctgaaagttctgcaaagcctgatgggacataagtccatcagttcaacggaagtctacacgaaggtttttgcgctggatgtggctgcccggcaccgggtgcagtttgcgatgccggagtctgatgcggttgcgatgctgaaacaattatcctga

SEQ ID NO: 10674 - DNA, 1059 bp, Homo sapiens
  SIMILAR (46)..(723): 781254mologous to Cloning vector pSacBII SacB,accession number U09128,Smith-Waterman Score=916.
  misc_feature (1)...(1059): n = a,t,c or g
atgcagctgcagagtattcagggtattagggccctcgactatagggtcaccgtcgacagcgacacacttgcatcggatgcaacccggttaacgtgccggcacgggctgagtaccacgtattttgtccacataaccgcgcgcaaaatgttgtggataagcatgacacagcagcaattcacagcatgcatacaaccgccacccgaggttactggcgtctacagctggccgctgcaaaacgctgacggaacagtagctgaatacaacggctatcacgttgtgtttgctcttgcgggaagcccgaaagacgctgatgacacatcaatctacatgttttatcaaaaggtcggcgacaactcaatcgacagctggaaaaacgcgggccgtgtctttaaagacagcgataagttcgacgccaacgatccgatcctgaaagatcagacgcaagaatggtccggttctgcaacctttacatctgacggaaaaatccgtttattctacactgactattccggtaaacattacggcaaacaaagcctgacaacagcgcaggtaaatgtgtcaaaatctgatgacacactcaaaatcaacggagtggaagatcacaaaacgatttttgacggagacggaaaaacatatcagaacgttcagcagtttatcgatgaaggcaattatacatccggcgacaaccatacgctgagagaccctcactacgttgaagacaaggccataaataccttgtattcgaagccaacacgggaacaganaaacgataccaaggcgaagaatctttatttaacaaaacgtactacggcggcggcacgaacttcttccaatccccctgttccggtcacaccacatacgttccgccattcctatgcgatgcacatgctgtatgccggtataccgctgaaagttctgcaaagcctgatgggacataagtccatcagttcaacggaagtctacacgaaggtttttgcgctggatgtggctgcccggcaccgggtgcagtttgcgatgccggagtctgatgcggttgcgatgctgaaacaattatcctga

SEQ ID NO: 10675 - DNA, 1425 bp, Homo sapiens; identical to SEQ ID NO: 5017

SEQ ID NO: 10676 - DNA, 1723 bp, Homo sapiens
  SIMILAR (31)..(402): 511254mologous to Homo sapiens phosphoinositol 3-phosphate- binding protein-2,accession number AF302150,Smith-Waterman Score= 279.
atggtggattcgttaattgcgcgcgtaggagtaatggctcgcggtaatgccattactttgcctgtatgtggtcgggatgtgaagtttactcttgaagtgctccggggtgatagtgttgagaagacctctcgggtatggtcaggtaatgaacgtgaccaggagctgcttactgaggacgcactggatgatctcatcccttcttttctactgactggtcaacagacaccggcgttcggtcgaagagtatctggtgtcatagaaattgccgatgggagtcgccgtcgtaaagctgctgcacttaccgaaagtgattatcgtgttctggttggcgagctggatgatgagcagatggctgcattatccagattgggtaacgattatcgcccaacaagtgcttatgaacgtggtcagcgttatgcaagccgattgcagaatgaatttgctggaaatatttctgcgctggctgatgcggaaaatatttcacgtaagattattacccgctgtatcaacaccgccaaattgcctaaatcagttgttgctcttttttctcaccccggtgaactatctgcccggtcaggaaagtgcatggtacccactgagtcagctccccatgtcacagtgcttggctgccagtgtggccccctgggcctggagaatggtctcaaggagggatatttggggaggtctaccttagatatggaggcttggcagcccctccaggagttttatttacataatttgatcacaggacagatgtttgaaattgctgttactcagaacaattccaagatcaacagctcctcgccaacaacagaacaaagctggatggagaatgactttgacgagttaacagaagtaggcttcagaaggtcagtaataacaaacttctctgagctaaaggagcatgttctaacccatcgcaaggaagctaaaaaccttgaaaaaagcgatggggagaatggaaccaagttggaaaacacttttcaggatattatccaggagaacttccccaacctagcaaggcaggtcaacattcaaattcaggagatacagaaaacaccacaaagatattcctcgagaagagcaaccccaggacacataattgtcaggttcaccaaggttgaaatgaaggaaaaagtgttaagggcagccagagagaaagcttccttagctcctgaaaatctcgataactcaaaaatacgcccggtagtgatcttatttcattatggtgaaagttggaacctcttacgtgccgatcaacgtctcattttcgccaaaagttggccgcagggcttcccggtatcaacagggacaccaggatttatttattctgcgaagtgatcttccgtcacaggtatttattcgcgataagctcatggagcggcgtaaccgtcgcacaggaaggacagagaaagcgcggatctgggaagtgacggacagaacggtcaggacctggattggggaggcggttgccgccgctgctgctgacggtgtgacgttctctgttccggtcacaccacatacgttccgccattcctatgcgatgcacatgctgtatgccggtataccgctgaaagttctgcaaagcctgatgggacataagtccatcagttcaacggaagtctacacgaaggtttttgcgctggatgtggctgcccggcaccgggtgcagtttgcgatgccggagtctgatgcggttgcgatgctgaaacaattatcctga

SEQ ID NO: 10677 - DNA, 4313 bp, Homo sapiens
  SIMILAR (13)..(519): 751254mologous to Homo sapiens Sp140 protein,accession number U63420,Smith-Waterman Score=622.
atggacaacttcttcgcccccgttttcaccatgggcaaatattatacgcaaggcgacaaggtgctgatgccgctggcgattcaggttcatcatgccgtttgtgatggcttccatgtcggcagaatgcttaatgaattacaacagtactgcgatgagtggcagggcggggcggtcaccgtcgacagcgacacacttgcatcggatgcagcccggttaacgtgccggcacggcctgtgtaaccagtgtgacaatctaaaaacttgtcacacttcacatggatctgtcatggcggaaacagcggttatcaatcacaagaaacgtaaaaatagcccgcgaatcgtccagtcaaacgacctcactgaggcggcatatagtctctcccgggatcaaaaacgtatgctgtatctgttcgttgaccagatcagaaaatctgatggcaccctacaggaacatgacggtatctgcgagatccatgttgctaaatatgctgaaatattcggattgacctctgcggaagccagtaaggatatacggcaggcattgaagagtttcgcggggaaggaagtggttttttatcgccctgaagaggatgccggcgatgaaaaaggctatgaatcttttccttggtttatcaaacgtgcgcacagtccatccagagggctttacagtgtacatatcaacccatatctcattcccttctttatcgggttacagaaccgggttacgcagtttcgggttagtgaaacaaaagaaatcaccaatccgtatgccatgcgtttatacgaatccctgtgtcagtatcgtaagccggatggctcaggcatcgtctctctgaaaatcgactggatcatagagcgttaccagctgcctcaaagttaccagcgtatgcctgacttccgccgccgcttcctgcaggtctgtgttaatgagatcaacagcagaactccaatgcgcctctcatacattgagaaaaagaaaggccgccagacgactcatatcgatgttcagattgaaactgatggaaaactcaaccagtgcataaacgctggtcatgaaatgacgaaggctatcgccattgcacagtttaatgatgacagcccggaagcgaggaaaataacccggcgctggagaataggtgaagcagcggatttagttggggtttcttctcaggctatcagagatgccgagaaagcagggcgactaccgcacccggatatggaaattcgaggacgggttgagcaacgtgttggttatacaattgaacaaattaatcatatgcgtgatgtgtttggtacgcgattgcgacgtgctgaagacgtatttccaccggtgatcggggttgctgcccataaaggtggcgtttacaaaacctcagtttctgttcatcttgctcaggatctggctctgaaggggctacgtgttttgctcgtggaaggtaacgacccccagggaacagcctcaatgtatcacggatgggtaccagatcttcatattcatgcagaagacactctcctgcctttctatcttggggaaaaggacgatgtcacttatgcaataaagcccacttgctggccggggcttgacattattccttcctgtctggctctgcaccgtattgaaactgagttaatgggcaaatttgatgaaggtaaactgcccaccgatccacacctgatgctccgactggccattgaaactgttgctcatgactatgatgtcatagttattgacagcgcgcctaacctgggtatcggcacgattaatgtcgtatgtgctgctgatgtgctgattgttcccacgcctgctgagttgtttgactacacctccgcactgcagtttttcgatatgcttcgtgatctgctcaagaacgttgatcttaaagggttcgagcctgatacctcagacctagaccctatgctgagtatgacatttggtgtagtcatggccctggacctgacaattggcatagttggcaggatgagtttggcagctgtatcatctgtcacggacttgccagaccacttgacaacggaactgggacagtctaccgagagccaggaacagcttgccttcgtggaagggtggcgatggactttcacagtattggctgcagagctgtattcagtttctcggtccaagttttactggtgcggcccagccctaccgagagtacccgaatacacgtctgcagaggacgcgggcattgggccggggaaacaggactgccgaggccaccttctccatattctggttcctgatgctgggcgtcagggcgcccctgcacgtcgggcagcagctcaacttctggcggcattggttacacaccaggtgcccggcctggcactgcagaataggaggcaggacatagtcaaagcagaccggacactcgaagagcgaggtcagctcgtggtgctgcggggacaccgggccggccccgccgccgccgccggggcccgagatcaccgccgccgcggcgggcaccgcggacgagccggggcccgcagccgagatggtggcggcggccgggggcgcagccggggacggagtgtgctggggctgcggcggcggctgcttgctgcagggtttattagcgctggggccggtggaggacgggcggctcatcgcgctccgaaccaaccatggaactgcgggcgcctgcctggccgcggggccgcccgggtcaaggcggtgcgcgccccgcgggcagcgagctccgaggcaacgccacggcgcccagcccagcctgtctatgcaggaacatcttgtgccgtatggaagaaagtcccaacacagatggaaaaagaccagagactggcagcaataagagaggaaaagctggggataaatggtggaagattaagaccggtatttattcgcgataagctcatggagcggcgtaaccgtcgcacaggaaggacagagaaagcgcggatctgggaagtgacggacagaacggtcaggacctggattggggaggcggttgccgccgctgctgctgacggtgtgacgttctctgttccggtcacaccacatacgttccgccattcctatgcgatgcacatgctgtatgccggtataccgctgaaagttctgcaaagcctgatgggacataaggtcatcagttcaacggatttctacacgaaggtttttgcgctggatgtggctgcccggcaccgggtgcagtttgcgatgccggagtctgatgcggttgcgatgctgaaacaattatcctgagaataaatgccttggcctttatatggaaatgtggaactgagtggatatgctgtttttgtcccagtggtgcctggaaccccagcaagacagaaccatttactctcctggaaaggaggctgaagccagggagccaagtgttcttgctcagcaggtcccactcccatggagcccagcaagctaagaaccactggcttgaaattctcactgccagcacagcagtctggagtcgacctgggatgatggagcttggtcgggggaggggcatctgccattactgagactttaggaggcgattttcctctgacagtgctaaggagactgggaggtttggattgggcagaattcaccacagtgcagtgaagcagctggagccagactgcttctccagatttctcctcactgggagagcatctttttttcaatgtgtaatcattatttaactctatgataccgagggcgccgttcgctaactcagcatcgcgttttttagcgctctgctgaagcttctggctttctttacggaagaagttcgtgccgccgccgtagtacgctttgttaaataaagattcttcgccttggtatccgttttctgttcccgtgttggcttcgaatacaaggtatttatggcctttgtcttcaacgtagtgagggtctctcagcgtatggttgtcgccggatgtataattgccttcatcgataaactgctgaacgttctgcgctgttgtcaggctttgtttgccgtaatgtttaccggaatagtcagtgtagaataaacggatttttccgtcagatgtaaaggttgcagaaccggaccattcttgcgtctgatctttcaggatcggatcgttggcgtcgaacttatcgctgtctttaaagacacggcccgcgtttttccagctgtcgattgagttgtcgccgaccttttgataaaacatgtagattgatgtgtcatcagcgtctttcgggcttcccgcaagagcaaacacaacgtgatagccgttgtattcagctactgttccgtcagcgttttgcagcggccagcagcatctgttgtttttgacttttttaataatagccat

SEQ ID NO: 10678 - DNA, 7132 bp, Homo sapiens
  SIMILAR (107)..(2188): 1001254mologous to Homo sapiens Sp140 protein,accession number U63420,Smith-Waterman Score=3724.
  misc_feature (1)...(7132): n = a,t,c or g
atgaacatgaacatcaaaaaaattgtaaaacaagccacagttctgacttttacgactgcacttctggcaggaggagcgactcaagccttcgcgaaagagaatgaccaaaaagcatacaaagaaacgtacggcgtctctcatattacacgccatgatatgctgcagatccctaaacagcagcaaaacgagaaataccaaaggtccccaggccgccggcaggagcagctgggccaattccctggccgggagcggaaggggatggcgtcgggcctgggctccccgtccccctgctcggcgggcagtgaggaggaggatatggatgcacttttgaacaacagcctgcccccaccccacccagaaaatgaagaggacccagaagaggatttgtcagaaacagagactccaaagctcaagaagaagaaaaagcctaagaaacctcgggaccctaaaatccctaagagcaagcgccaaaaaaaggagcgtatgctcttatgccggcagctgggggacagctctggggaggggccagagtttgtggaggaggaggaagaggtggctctgcgctcagacagtgagggcagcgactatactcctggcaagaagaagaagaagaagcttggacctaagaaagagaagaagagcaaatccaagcggaaggaggaggaggaggaggatgatgatgatgatgattcaaaggagcctaaatcatctgctcagctcctggaagactggggcatggaagacattgaccacgtgttctcagaggaggattatcgaaccctcaccaactacaaggccttcagccagtttgtcagacccctcattgctgccaaaaatcccaagattgctgtctccaagatgatgatggttttgggtgcaaaatggcgggagttcagtaccaataaccccttcaaaggcagttctggggcatcagtggcagctgcggcagcagcagcggtagctgtggtggagagcatggtgacagccactgaggttgcaccaccacctccccctgtggaggtgcctatccgcaaggccaagaccaaggagggcaaaggtcccaatgctcggaggaagcccaagggcagccctcgtgtacctgatgccaagaagcctaaacccaagaaagtagctcccctgaaaatcaagctgggaggttttggttccaagcgtaagagatcctcgagtgaggatgatgacttagatgtggaatctgacttcgatgatgccagtatcaatagctattctgtttctgatggttccaccagccgtagtagccgcagccgcaagaaactccgaaccactaaaaagaaaaagaaaggcgaggaggaggtgactgctgtggatggttatgagacagaccaccaggactattgcgaggtgtgccagcaaggcggtgagatcatcctgtgtgatacctgtccccgtgcttaccacatggtctgcctggatcccgacatggagaaggctcccgagggcaagtggagctgcccacactgcgtgagtgtctggccattgtggccccttggaacccatgagaagaagggtgggacagtaaagctcttcggggcctggatggaaatggaaatgctggtgctgcgggttgagaaggaaggcatccagtgggaagctaaagaggacaattcggagggtgaggagatcctggaagaggtatttattcgcgataagctcatggagcggcgtaaccgtcgcacaggaaggacagagaaagcgcggatctgggaagtgacggacagaacggtcaggacctggattggggaggcggttgccgccgctgctgctgacggtgtgacgttctctgttccggtaccccccccaatcggttccgccattcctatgcgatgcacatgctgtagcccggtataccgttgaaagtttttgcaaagcttgatgggacataagtccatcagttcaacggaagtctacacgaaggtttttgcgctggatgtggctgcccggcaccgggtgcagtttgcgatgccggagtctgatgcggccaggcgaagacacagaagcctttccaccctcagcccaaccctgatacacagcctctatgtgcaaccccaagtaggggacacaaatagatcgctcaaagcaggaagagtggggatcgtcagaagacttgggccaagagctgttcagatcccagagccaactgtgggaaatgtcgtcagtgatattatagcccaggacttgagccttggctgggaaacaggcgtacaccccaactgggtacaagacagtgcacaagaacagcccgaccaccgcgtgactcgacgcgtcggcgccaccccgaagacaccggggtcaacaagcgcaagccacccgcacactgtccggaaggaacgccccccacttcaaagcgcgcggcgggacaaacggggggcccggcccttaaaggacggcaataagttccccggccgaccacccgatccggaaagaaccgagggcaagaatggacccggttccgcaacccttgacatcggcggaaaaagtccgtcctatctgacaccanctattccggtaaaacattgcggcaaacgaagcctgacaacagcgcaggtaaatgtgtcaaaatctgatgacacacgcaaaatcaacggagtggaagatcacaaaacgatttttgacggagacggaaaaacatatcagaacgttcagcagtttatcgatgaaggcaattatacatccggcgacaaccatacgctgagagacccccactacgttgaagacaaaggccataaataccttctagggtggcagcaggtgggctggcagcacacagactggcagcactggggcttgcagcagctggacacacagcagctggggcggcagcagctggagatgcagcagctagggtggcagcaggtgggctggcagcacacagactggcagcactggggcttgcagcagctggacacacagcagctggggcgacagcagctggagatgcagcatctggggcggcagcagggctcagcctcaatgtatcacggatgggtaccagatcttcatattcatgcagaagacactctcctgcctttctatcttggggaaaaggacgatgtcacttatgcaataaagcccacttgctggccggggcttgacattattccttcctgtctggctctgcaccgtattgaaactgagttaatgggcaaatttgatgaaggtaaactgcccaccgatccacacctgatgctccgactggccattgaaactgttgctcatgactatgatgtcatagttattgacagcgcgcctaacctgggtatcggcacgattaatgtcgtatgtgctgctgatgtgctgattgttcccacgcctgctgagttgtttgactacacctccgcactgcagtttttcgatatgcttcgtgatctgctcaagaacgttgatcttaaagggttcgagcctgatgtacgtattttgcttaccaaatacagcaatagtaatggctctcagtccccgtggatggaggagcaaattcgggatgcctggggaagcatggttctaaaaaatgttgtacgtgaaacggatgaagttggtaaaggattttcgcctgctggggcaaaccagcgtggaccgcttgctgcaactctctcagggccaggcggtgaagggcaatcagctgttgcccgtctcactggtgaaaagaaaaaccaccctggcgcccaatacgcaaaccgcctctccccgcgcgttggccgattcattaatgcagctggcacgacaggtttcccgactggaaagcgggcaatggagttaaaagttatttgccagtcctcagtaactgcagacacaggagacaatgttggaaacaatgttggtgaaatggaagtatcttcccttttgatagctgaagctgggctgtcatatcagaacacaatagtcaacatcagcatgtttctcacaaaggttgaattattcagtctttacacgtgggtcaagacaaaaacagcatatccactcagttccacatttccatataaaggccaaggcatttattctcaggataatggggggtctttagagtcccccacagggcttcaagcacgagttgcacggcccgtaccgcgcataagccggcgggattttgccgatttcggaaccaccatcaaacaggattttcgcctgctggggcaaaccagcgtggaccgcttgctgcaactctctcagggccaggcgtgggccatcgccctgatagacggtttttcgcctttgacgttggagtccacgttctttaatagtggatcttggtccaaactggaacaccactcaaccctatctcgggctattcttttgatttataagggattttgccgatttcggaaccaccatcaaacaggattttcgcctgctggggcaaaccagcgtggaccgcttgctgcaactctctcagggccaggcggtgaagggcaatcagctgttgcccgtctcactggtgaaaagaaaaaccaccctggcgcccaatacgcaaaccgcctctccccgcgcgttggccgattcattaatgcagctggcacgacaggtttcccgactggaaagcgggcagtgagcgcaacgcaattaatcgtctgcattgttccaccgtcgctggtcagccagcacctgctggtgtctgccggtgtgtccctctgctcttctcgatgtccagccacttgcgtctgtgcccgcttaaggtctcaggtttatatggtcaccagatggggggcgtggcaggccaaaagacaactttttgggcatgaaacagaaatgcctatcctcattcggttcatggggacaaaaacagcatatccactcagttccacatttccatataaaggccaaggcatttattctcaggataattgtttcagcatcgcaaccgcatcagactccggcatcgcaaactgcacccggtgccggggcagccacatccagcgcaaaaaccttcgtgtagacttccgttgaactgatggacttatgtcccatcaggctttgcagaactttcagcggtataccggcatacagcatgtgcatcgcataggaatggcggaacgtatgtggtgtgaccggaacagagaacgtcacaccgtcagcagcagcggcggcaaccgcctccccaatccaggtcctgaccgttctgtccgtcacttcccagatccgcgctttctctgtccttcctgtgcgacgcgctacgccgctccatgagcttatcgcgaataaatacctggttacccaggccgtgccggcacgttaaccgggctgcatccgatgcaagtgtgtcgctgtcgacggtgacccgtgtatgaaatctaacaatgcgctcatcgtcatcctcggcaccgtcaccctggatgctgtaggcataggcttggttatgccggtactgccgggcctcttgcgggatatcgtccattccgacagcatcgccagtcgctatggcgtgctgctggttacccaggccgtgccggcacgttaaccgggctgcatccgatgcaagtgtgtcgctgtcgacggtgacccgtgtatgaaatctaacaatgcgctcatcgtcatcctcggcaccgtcaccctggatgctgtaggcataggcttggttatgccggtactgccgggctcttgcgggatatcgtccatccagacagcatcgccagtcatatggggtttctgttggaagctcatgacctcttggtggtaaattgctcactattgcctgcagcatgctaggtcttgtcaaaccctctgcaccttgggctgcgcagttatctggacatgtgccaggttcaagctccatcctttgtcttcctgctcttgctgctggttcatcgtttgcgtataatattagtcgaccacggtccccttgattgtcgttcgatatagttggaaccccgtcccctcgatggtggtttataacaaactgcaccggttcccttagaatgtggtttatatttatctgggacatggtcctcttgtatcgcggtctgatattagtcggcgccacggttccactggtatgacggtttgatattagtctgaacccgggtcccactcgtatcgtggtctgattattagtctgggacaccggtcccactcgtattgtcggtctgattattagtctgggaccacgatcacactcgtgttgtcggtctgatatcggttctgggaccccgggtcccacctgtagaacggagtaacctcggtgtgcggtagtatgcttgctgtggattgccgctgtgtcctgcttatccacaacattttgcgcacggttatgtggacaaaatacctggttacccaggccgtgccggcacgttaaccgggctgcatccgatgcaagtgtgtcgctgtcgacggtgacccgtgtatgaaatctaacaatgcgctcatcgtcatcctcggcaccgtcaccctggatgctgtaggcataggcttggttatgccggtactgccgggcctcttgcgggatatcgtccattccgacagcatcgccagtcactatggcgtgctgctagcgctatatgcgttgatgcaatttctatgcgcacccgttctcggagcactgtccgaccgctttggccgccgcccagtcctgctcgcttcgctacttggagccactatcgactacgcgatcatggcgaccacacccgtcctgtggatctacccactagtcaattcaccattttgttggcccagggcttcccggtatcaacagggacaccaggatttatttattctgcgaagtgatcttccgtcacaggtgtttattcgcgataagctcatggagcggcgtaaccgtcgcacaggaaggacagagaaagcgcggatctgggaagtgacggacagaacggtcaggacctggattggggaggcggttgccgccgctgctgctgacggtgtgacgttctctgttccggtcacaccacatacgttccgccattcctatgcgatgcacatgctgtatgccggtataccgctgaaagttctgcaaagcctgatgggacataagtccatcagttcaacggaagtctacacgaaggtttttgcgctggatgtggctgcccggcaccgggtgcagtttgcgatgccggagtctgatgcggttgcgatgctgaaacaattatcctga

SEQ ID NO: 10679 - DNA, 596 bp, Homo sapiens
  SIMILAR (449)..(75): 911254mologous to Escherichia coli adenylyl- transferase,accession number Z21844,Smith-Waterman Score=578.
agactgtggcagagttactttcattcctgtctcctgagagattcaaaatttgcgcgcgataataccatacttcattcttccaccagccacttctgccagcttgcccgcaccagttcacgctctgcggtgaagcaatcctccgacacatggcccggcaattcctgtaatgccagatgatgaagttcatcgcgaagcgtagtgtaagcacgggtcagcgccatcgcttcctgctcttccataatgtcgttttgcgccagtagttccagaatacgcacgttgtctgaccagcgcgttaacttcggtttttcatgagcgtagcgcaacaccagatattgggtaataaattcgatatcggtaattcccccttcatcagctttgatatcaaaacgatcgccaaggttaatggccaaaaaaacggcgcattttctgggcatttcccggacttccgttgcagagtttaccttcacgcgcagcggcatatctcgcgaccactgcgtcaaaggcgcgggagctgcggatcgccgacctaacgcgccgcccagggctgagttccagtcaggctggtttttgataatggaatgctttgcgaggcacac

SEQ ID NO: 10680 - DNA, 640 bp, Homo sapiens
  SIMILAR (9)..(218): 711254mologous to Homo sapiens Human follicle stimulating hormone GPR N-terminal sequence,accession number W03627,Smith- Waterman Score=238.
aaacaccctttaccagccgacggcgaccgatgcctaccgcgatgagttgcgccagtatttgctgcgcgtgccggaagatgacgaagagcaacagcttgaggcgctgcgtcagttcaaacaggcgcagctgttacgcatcgccgcagcggatatcgccggtacgctaccggtgatgaaagtgagcgatcacttaacctggctggcggaagccatgatagatgccgtcgttcagcaggcgtgggttcaaatggttgcccgctacggtaagccgaatcacctgaacgaacgcgaagggcgtggttttgcggtggtcggctacggcaagctgggcggctgggagttaggctacagttccgatcttgaccttatcttcctccatgattgcccaatggatgcgatgactgacggtgagcgggaaatcgacgggcggcagttttatctgcgtctggcgcaacgcattatgcatctgttcagtacgcgtacctcttccggcattttgtatgaagtggatgctcgactgcgtccgtccggggcggcgggaatgctggtgacatccgcagaagcatttgccgattatcagaaaaacgaggcctggacgtgggaacatcaggcgctggtgcgtgcgcgtgtagtgtacggc

SEQ ID NO: 10681 - DNA, 2358 bp, Homo sapiens
  SIMILAR (16)..(366): 761254mologous to Homo sapiens Human follicle stimulating hormone GPR N-terminal sequence,accession number W03627,Smith- Waterman Score=432.
atgtctgataccaaacgtaatacaatcggcaaattcggcttgctctcgctgacttttgccgccgtttacagctttaacaacgttatcaataataatattgagcttggactggcctcggcaccgatgtttttcctcgcgacgattttttattttattcccttctgtctgatcatcgcagaatttgtttcgttaaataaaaactcagaagccggtgtctacgcgtgggtaaaaagttcgctgggcggacgttgggcatttattactgcctatacctactggttcgtaaacctgttctttttcacctcactgttgccgcgcgttattgcttatgcttcgtatgccttcctcggatacgaatatattatgacgccggttgccaccaccattatcagtatggtgctgttcgccttctccacctgggtttccaccaacggggcgaaaatgttggggccaattacctccgtcacttcaacgctgatgctgctgttaacgctctcctacattttactggcaggtacggcgctggttggcggcgtacagactgatgacgccatcaccgttgacgcgatgatcccgaacttcaactgggcgttcctcggcgttaccacctggatctttatggccgcaggtggcgcggagtccgtcgctgtgtacgttaacgacgtcaaaggcggttcgaaatcgttcgttaaagtgatcattctcgacggggatataatcggcctactgtatcacgtctctcgagcgctggccatcagcctggggctgctgtgtcagcccacctttgatttggttattcagggtgactactgcttctggaacaccatctccttcgggtccgttcaagaccctcccggtgacggagaatcccatgacgtggaacacgggctagaaaacaaagaacaagaagaaggtgctcgaaggtgctcctgtgccacagccacaaagcctccttctgctgcgccggccaccacctaccatgtctgctactgccgcccacctaccaacactcagtgcccccgtcctattaattatctgttcatcggcattctggcactgctgctcgcggtcgctctctggccatccattccctggtttggtaaagccgacaaccgtatcgccgccattcaagcgcggggagagttgcgtgtgagcaccattcatactcccctgacttataacgaaatcaacgggaaaccttttggcctggattacgaactggcgaaacagtttgccgattacctcggcgtaaaactgaaagtgaccgtgcggcagaatatcagccagctgtttgacgaccttgataatggtaacgccgacctgctggcggcaggacttgtctataacagtgagcgggtaaaaaattatcagcctggccctacctattattccgtgtcacaacaactggtttataaagtgggtcagtatcgcccacgtacgctgggcaacctgacggcggagcaactcaccgttgcaccggggtctgtggtgggttacgatcttcaaaccttgacccaaacgcaccaccagccggtgcgttttctggcgaagcgttttgctgtgaaagaagccgcagcaaaagcgtttggcaccgggatccgcaatggtctggcgtttaatcaatttgaagtattcaatgatgagcttggcaaaccacggctacggctatggggcgaggcattaaaactggcggaaaagctgggcgttgcaaatatgcatgtaacgctggcagatgagcggcactatgcttgtgccacgtacattaaaattggcttcgttattgaagattttgctgtgctttacaccatgccacagaattcccccattgaaacgagtggtgtcgtcaaagctctggtgtggagtgcagcatgcaccctcaataactcgcacgttcagtcgaccttcgcctatggccgtctgattcacgaacactgcgaacgtcgcccgcacttcgatgctggtcgttttgccaaagagttcggtgatgaaggccaccgcgaaggctggtgcctgtaccacctcggctgtaaagggccagaaacttacggcaactgctcaacgctgcaattctgcgatgttggcggtgtgtggccggtggcgattggtcacccttgctatggctgtaacgaagaaggtatcggcttccataaaggcatccatcagcttgccaacgtcgaaaatcaaactccgcgttcacagaaaccggatgttaacgctaaagagggcggcaacgtctctgcaggcgctattggtttgctcggcggtgtggttgggttggttgccggtgtcagcgtgatggcggtgcgtgaactgggtcgtcagcaaaagaaagataacgctgactcacggggagaataa

SEQ ID NO: 10682 - DNA, 2391 bp, Homo sapiens
  SIMILAR (1707)..(1021): 821254mologous to Escherichia coli similar to H. influenzae HI1439,accession number U82664,Smith-Waterman Score=985.
ttaaatctctacgtcgcggttacaatctttcgagtaaatatagctgaacgcttcaccacgccctacaccataaccagcctgtgaagaataagcgcccataaagatgtaatcgccttttttcaccgggatccagttattgtcgaggttataaaccccctgaccggaaagaatataggcaccgtgttcctgaacgtgtgttgcgatataaccgtggctggcacctggtgcaaaagagaggatatgcatgttcatatcaaaacctaactctttgggcagaaaatccagcagaataacatcgtgcatgccttcataatgaatgcgttccagttcgctggcattgccagaaaccagccacggtgcatagccttctaccggaacatagcggcgcttatataaaaagatttggctgtcttcggcctgtgcgttaacaaacgtcattaaggagcctggcgggcaataaagatagccaccttcgcttaaggcaaatgttgtgccttcggctttggcagagatatttccagagatcacatacaggaacgtttcaatgccttcgccaccgaagcccgcgatgcccatcattgccatcgcccagaacagactctgccacgggaatttaagcataatcagatgtccgagcactggcgctaacaccggaatgatgcaggtaataccgttgagtaatgacagcactttagcccgacgtcgatcatccagcgtgtcgcgcaaaatagcgaacgccactacgtaacaacagcctgcgcccaacccctgtagaaatcggcctgcaagaaataacgtgctggtttcagccagtgaacagaacaccgaggcaataataaatagcgccgcgccgggtatggcgaccggctttctccctgaacgatcggccactttaccggcaaataacatcgcagctgccatccccgccagatatacggagaacgcaatatgcaactgcgcttcgctggcattgagatcggcggcgatgcgcggtaaaccaacgaggtacatatcaatcccggcgggataaagtaaaaccagggcaaaaccgtctttcgctgccgtttcgcacaaccagtcgccaaagatttttgaatagctcggcaaaccgccgctacttttcggcaaacaaccgctggagggatcaaatttaggcacggcgtggaaagtgatcgggtctttttctgccggttcataaccacgaccttttttggtcatgatatgcaggaactgcgggcctttcaggtcgcgcatgttctttagcgtggtgataagccccagcacatcgtgaccgtccaccgggccgatgtagttaaagcccagctcttcaaacaacgtgccaggcactaccatgcctttaatatgttcttcggtgcgtttgagcagctctttaattggcggcacgccagagaaaacttttttcccgccggaaagcagctgtgccagatggttgttgagcgcgccgacattttcggaaatcgacatttcattgtcgttgagaatcaccagcatatcaggacggatatcgcccgcgtgattcatcgcttcaaacgccatgcctgcggtaatcgcgccatcgccaatgacacagacggtgcggcgatttttgccttcacggcgatcctgtatggaatccagttctcctgtgcttccttttacctgttcgtagtttatgaacatggctctctcaaaactgttggctgcccacttcaggaggtttgcggactgctctggagtcatgtaaaccagcacacattcagctatcaggagtgttggcaatccatccatagtgatgcagtcggttaatgcaatgccaagttggtcgggatactcttccagccaggcagcaagtgcagctcgctggctgttggctagatccgggctgatttgctgatgtgcctggaaccattcgtgtgcctgtgttcccatcggcgtgagggaaagccgacgcgccagatcgtagttgctggtgcccacaaaccaggattcctgttgcagacgcttaacgatggtttcttgtacttcgcgagaaaaacggcgacgggtgccaaaatccatcagatggaagcgcgacatatcaagaccggcggttaacgccgagaagtcgactaatttgctttccagcgtgtcgagggcttgcgcaacgtcggcctgcggtgagcgatagcgatgtaccatttcactgataaccgccagcaaaggaacttcccagaggatgacttcacgccacgggccgcttaaacgaatatccagcttgccattatcgttggacacggtgacttgttccgggttaaagcggaactcgcgtaaccagttaagatagtcggcggccccgacttgcaccataaagttgccgctggcgctttgcgagacggcttgcggtgtcaccat

SEQ ID NO: 10683 - DNA, 3114 bp, Homo sapiens
  SIMILAR (234)..(425): 781254mologous to Homo sapiens Human follicle stimulating hormone GPR N-terminal sequence,accession number W03627,Smith- Waterman Score=231.
atgttgccagaggttcagaaccttggtttttttgagatacgcatttgcgggtaccgagctcaaagtcgtatcaaagtaaaggcaccacctataaactggtgcgtaaagtcttccagaataccgaacacgttcatgtcgtcggcctgcgaggatttgcgccgcaactccctgaaacgcttccaggaactgacgaagcgccttctcaggcgagttaaaattaaggcggcagcaatgccgccttttctttgtccgaatacgatcgcagtcagttcgttcattccggtgaaagcaatcccggcaatccatgaacagaagaaatggaaaacgggtcagttcattaatgggtcatgcgcggtgatcgcccgatccggtgatcgcctggcacgccgcgtattaagcgataacgaatgggctatgtcaataaagcaccaccagccggtgcgttttctggcgaagcgttttgctgtgaaagaagccgcagcaaaagcgtttggcaccgggatccgcaatggtctggcgtttaatcaatttgaagtattcaatgatgagcttggcaaaccacggctacggctatggggcgaggcattaaaactggcggaaaagctgggcgttgcaaatatgcatgtaacgctggcagatgagcggcactatgcttgtgccacggtaattattgaaagtgtcatcgaattggtggccatgaacctggtgttcggttatggagcttctttcataagacaacataatagaatttggctacccagcatacatttgggctgctgcagtagactgcacatccgcaattcccgggagaaaaagagtaaaaccctatcaattgggtcttccttaattcataattacgggtacgagctgagtgttaaagccgaatcacttgaccgaacgcaaagggtgtgttttgcgtgtggtcggtacggcaagctgggcgcttgggagttagattacagtcccgatcttgacattatcttcctcaatgattgcccaatgaatgcgatgactgccggtgagcggaaaatcgacgggcggcagttttatctgcgtctggcgcaacgcattatgcatctgttcagtacgcgtacctcttccggcattttgtatgaagtggatgctcgactgcgtccgtccggggcggcgggaatgctggtgacatccgcagaagcatttgcggattatcagaaaaacgaggcctggacgtgggaacatcaggcgttggtgcgtgcgcgtgtagtgtacggcgatccgcagctcaccgcgcactttgacgcagtgcgtcgcgagattatgacgctgccgcgtgaaggtaaaactctgcaaacggaagtgcgggaaatgcgcgagaaaatgcgcgctcatctcggcaataaacatcgcgatcgctttgatatcaaagctgatgaagggggaattaccaatatcgaatttattacccaatatctggtgttgcgctacgctcatgaaaaaccaaagttaacgggctggtcagacaacgtgcgtattctggaactactggcgcaaaacgacattatggaagagcaggaagcgatggcgctgacccgtgcttacactacgcttcgcgaacccaggttttcccgtttttcccttttttggggttgttcaccgctggggttgttcgattatctggcggacctgtttaagattgataactcccacggcgggcgtttcaaaaccgtgctgttaaccttcctgccacctgcgttgttgtatctgatcttcccgaacggctttatttacgggatcggcggtgccgggctgtgcgccaccatctgggcggtcattattcccgcagtgcttgcaatcaaagctcgcaagaagtttcccaatcagatgttcacggtctggggcggcaatcttattccggcgattgtcattctctttgttttgccctggttttactttatcccgccgggattgatatgtacctcgttggtttaccgcgcatcgccgccgatctcaatgccagcgaaggcagttgcatattgcgttctccgtatatctggcggggatggcagctgcgatgttatttgccggggtaaagtggccgatcggtcaaagttttggaacccaaattggagcaagactcacacagaacctacacagcagtcccagacagcgacgagcaacaggaccagcgcaaccacagcagagcaaagaagcgacgagaaggaaggcaacaacaggacacgtcacgaagaacaacgatcacagaacgccacacagcacaagagacgagagagagcaacaacaacacaaaaaacctgttctgagaccgtcacgccaacaacgatgaacatgtgcaacgagccagagctgagaagacacgcacgtgttttgccgcccgtactctacattgtgcaacgtagatatgatgagtctcatctcagaatatctatctccgcgtgtaatgtgtgtaggacagagcgacacgcagtacatacagatgagactatacactcgacggttgttgctgactgcaaggagcgagtcgctgtgatgcgtctgagactaccactatgtgctgcttgtagacacatcggtgacgtgatcgtatatagtgcgtacgtctgtgagcatcggtgtatgcgactgctagctacgcgacgccactatgtggtcactctaacgactcatcttcgccgtcgactattcttgaccgaggtgaacgcaagatatgtctgcatctacgatgatgagcattcgcgctcatctaccgtcactcatgctcatccgatcgatcaccagagtgcccactatgacacatatgtgtatgatatcggcactgtatcgtacatgcgtctgaacacgtctgtacgactcatacgacgtcgcgcccacacttgcacttcccgagcactgatggactcgcactctaaagatggccgtccaatggactatgctagtgcggtcgtggtcactcacccgctcaagcagcacgtcaactaccttagcgctagcagtacggaacgacatttccacatcggcgatacgagtggacccgtagtcacaccctattggtcagaccggcggtacgtattggaacgacgttcctgtcaggtcggcgcgaccgcgatcacggtgtga

SEQ ID NO: 10684 - DNA, 1668 bp, Homo sapiens
  SIMILAR (604)..(1665): 961254mologous to Escherichia coli K12 putative synthetase/amidase,accession number AE000385,Smith-Waterman Score= 1827.
atgcaaaaccagatggacccggtgtacacgccggcgcgaaaaatccacctgtaccactgcgaccatcgcggcctgccgctgccccttatcagcaaggaagggacaacagaatggtgcgcagaatacgatgaatggggcaacctgctgaatgaagagaacccgcatcagctgcagcagcttatccgcctgccggggcagcagtatgatgaggagtccggcctgtattacaaccgccaccgctattatgacccgctgcaggggcggtatatcactcaggatccgattgggctgaaggggggatggaatttttatcagtatccgttgaatccagttacgaatacagatcctctggggttagaagtttttcctagaccattccccttgccaattccatggcccaaaagccctgcacagcagcaagcagatgataatgctgcaaaagcattgacaaaatggtggaacgatacagcatcacaaagaatatttgactctctaatattgaataatccgggactagcattagatataacaatgatagcttctcgtggaaatgttgcagacacagggataactgatcgtgtcaatgacataataaatgacagattctggagtgatgggaaaaaacccgacagatgtgacgttgaaaagctggaagaagtcaccgccgaactgcaccagatgtgcctgaaagtggtggaaaaagtgatcgccagcgatgagctgatgaccaaattccgcattccaaaacacacctggagttttgtgcgccagtcatggctgacgcaccagccatcgctttattcgcgtcttgatctggcgtgggatggcactggtgaacctaaacttctggaaaataacgccgatacgccaacgtcactatacgaggcggcgttctttcagtggatctggctggaagatcagcttaacgccggtaacttgccggagggcagcgaccagtttaacagtctgcaagaaaaactgatcgatcgcttcgttgagctgcgtgaacagtatggcttccagttgctgcatctcacctgctgtcgcgacacggtggaagatcgcggaaccattcagtatttgcaggactgcgcaacggaagctgaaattgctactgagttcctctacatcgatgatatcgggttaggtgaaaaaggtcagttcacggatttacaggatcaggtaatttccaacctgttcaaactgtatccgtgggaatttatgttgcgtgagatgttctcaaccaagctggaggatgcaggcgtacgctggctggaaccggcgtggaagagcattatctccaacaaggcacttctaccgctactgtgggagatgttcccgaatcacccgaacctgctgcccgcttattttgcggaagatgatcatccgcaaatggaaaaatatgtggttaaaccgatcttctcccgtgaaggcgcaaacgtgtcgatcattgagaacggcaaaaccattgaagcagcggaaggtccgtatggcgaagaagggatgattgttcagcaattccacccgttaccgaaattcggcgacagctatatgctgattggtagctggctggtgaacgatcaacccgccggaattggcattcgtgaagaccgtgcattgatcacccaggatatgtctcggttttatccacatatttttgttgaataa

SEQ ID NO: 10685 - DNA, 681 bp, Homo sapiens
  SIMILAR (3)..(272): 1001254mologous to Escherichia coli K12 putative vimentin,accession number AE000483,Smith-Waterman Score=454.
tctattgccaacaaatggctaaagttctggcagagcaggtcgatgaatctgttacggcaggcatgaatacttttttcgctgagttcgcttcatgtttgacggaattacagacgcgtttacgcgaaagtctggctctgcgtcaacaaaatgaatcggtggtcaggctgatgcaacagcaattgcagcagactgtgatgactcacggctggatttacaccgacgcccagctgttacgcgatgatattcaaacacttttcacggcagaacgatattgaccaagacgttacttgacggccccggtcgcgtgctggagtcggtttatccccgctttttagtggatctggcgcagggtgatgatgcccgccttccacaagcccatcagcagcagtttcgtgaacgactgatgcaggaacttttttcgcgtgtgcagcttcagacatggacgaacggcgggatgttaaatgcgccgcttaacctgcgtctgacattggtggaaaaactggcgtcgatgctggatcccggtcatctggcactgacgcagatcgcgcacgatctggcgctgctgcaaaaaatggatcaccgccagcactctgctttcccggagctcccccagcaaattgccgccttgtatgagtggttttcagcccgttgtcgctggaaggaaaaggcgttaacgcaacg

SEQ ID NO: 10686 - DNA, 1208 bp, Homo sapiens
  SIMILAR (1208)..(723): 941254mologous to Escherichia coli Protease II (EC 3.4.21.83) (Oligopeptidase B),accession number D90827,Smith-Waterman Score= 814.
ctcttacatggctcttctcgttcaatgggtggctgataccgatggaaagagtcagtattaccgagcgcccggactggcgtgagaaagcccacgaatacggtttcaattttcacaccatgtacggcgagccgtactggtgtgaagatgcttactacaagttgaccctcgcccaggttgaaaagctggaagaagtcaccgccgaactgcaccagatgtgcctgaaagtggtggaaaaagtgatcgccagcgatgagctgatgaccaaattccgcattccaaaacacacctgaagctttctttagaagtagaggaaaaccagcagtaagaaatctgaagaccactgcttcaataaggtggtatgtcggtaccccgttgcgtgcacggaagaagtggttaaagcacacatcataaatggttgcggaagactggaaggacgccatatggccgcccagttcgaggtcttttttcgacgcacgcagcaccgtcatgatggcgttccagcggatagctgaacgaatacggcgttccagttccagattacccggatactccggttgttcttcaacggggatggtgttgatgtagttgctgatacctgtgcctgcggctacgtttacaccgcctttgcgggcttcagcaagcagttggtcgatcagatactgagcacgctcaacaccttcttcacggatgaccgattcgatcgcctggagccagtcgcgagtttcgatcggatccacgtcatttgggaaacgttcagtttccagattacgaaaacgaattccgtactggcgtcgggaaagaaaatcttctgccagcgccataatggtgttatcgggcgtaatcgccattccgcccatcgaataaaactcactatgagctgcgcgcttattggcatcgagcaatgtttcccactcatcccactcttcactgaatgccgattgacgctggtagatagcatattcacagcctggttcataaatatgccgatagcggtagccatttttgatgtagggcgcagaaacttctcgttgcggaatgcggtcgatgatttcctttaagatgcgatcctgcaaggcttgttgtgaggccatcacccgatgaccgtaactattttcttgttgcaggtagtccaggacttctggctgagaacgcgtatcgtcccgcagccagtagtaattatcgatgcgcgtatcgccatgaagcgtcat

SEQ ID NO: 10687 - DNA, 676 bp, Homo sapiens
  SIMILAR (47)..(262): 541254mologous to Escherichia coli No definition line found,accession number U00039,Smith-Waterman Score=178.
aaatctctgcggagttgaatcgtccgttcgctatccgtggcgatctgggcgtgtgtgggagcggcaaaaacaagaaactggctggcgcagctgggtgccgtgccccatgtacacgcggaagacatcattcttggcaatccaccggatattccgaagtcacgatggtgcatttgccacgcgtagaggcaacgctggccccctggcgctgctgaccaaaacggtctggctgccgtggatcaagctcgaaagcccacgaatacggtttcaattttcacaccatgtacggcgagccgtactgtgtgaagatgcttactacaagttgaccctcgcccaggttgaaaagctgaagaatggtggaaaagtgatcgccagcgatgagctgatgaccaaattccgcattccaaacacactggagttttgtgcgccagtcatggctgacgcaccagccatcgctttattacgtctgagtctggcgtgcctggatctggcgcaggctatgatgcccgccttccacaagcccatcagcagcagtttcgtgaacgactatgcaggaacttctttcgcgtgtgcagcttcagacatggacgaacggcgcatgttaaatgcgccgcttagcctgcgtctgacattggtggaaaaactgcgtcgatgctggatcccggtcatccggcactga

SEQ ID NO: 10688 - DNA, 1758 bp, Homo sapiens
  SIMILAR (331)..(119): 561254mologous to Homo sapiens dJ492J12.1 (novel protein similar to zinc finger protein human immunodeficiency virus type I enhancer-binding protein 1 (HIVEP1)),accession number AL121919,Smith-Waterman Score=163.
atgtgtaagaatctaatcggcaccttcatgtgcatctgccctcctggaatggcccgaaggcccgatggagaaggctgtgtagcctgcaatgctggttttgaaccggagaccacatcttcttcggattgtcatcttagggcgagttattctgccttggggtccagagcattgcacattgatccttcagaccctctgcactacatatctgccagccagccaagtcccaaggtatgccagggttacatgtgcccttctcagatcctggaaatggatactgatgagtgttcaatcggcaatccgtgtggaaatgatatcaacgaatgtgcccagaacccactgctgtgtgctttccgctgcatgaacacttttgggtcctatgaatgcacgtgcccgattggctatgccctcagggaagatcaaaagatgtgcaaagaagaccgagaacgaagaaagaaagcggacagaaaaagacaaaagggcccggaggcaccgaaaaagaagaaagcggaggaggacgggcgagacaaagaggacaagcgagcacgagagcagaaacaaaacatgaacagcgaaaaaagtgaaggcacgccgcatgtaatgtgtgcttacctgtacgatctggccggtctgttctctggcttctacgagcactgcccgatcctcagcgcagaaaacgaagaagtgcgtaacagccgtctaaaactggcacaacctcggaccctgcgtgatgaaaatgaatgcaggaccaagccaggaatctgtgaaaatggacgttgtgttaacattattggaagctatagatgtgagtgtaatgaaggattccagtcaagttcttcaggcactgaatgccttggtgtgttttggaatgcggaatttggtcatcagctcatcgctggcgatcactttttccaccactttcaggcacatctggtgcagttcggcggtgacttcttccagcttttcaacctgggcgagggtcaacttgtagtaagcatcttcacaccagtacggctcgccgtacatggctccaagaggactgggaaaattcatgatcctaataaaacaagttcttccctagaaacaactttcagccactttccagtagaagagagagagacacagcagtgttgctccctggcagacattgatgaatgtaaagagattccaggcatttgtgcaaatggtgtgtgcattaaccagattggcagtttccgctgtgaatgcgctacaggattcagttacaatgacctgctgtgggtttgtgaaggtaatctgaataaagaagctttgctagcgtccacgacggaacatagactggtacgttcaactgctttacactctctggaggcaaacagactggtacacagcttctacggactatcgctcaactacgacaagtacgtacttcacgctttcatcctagcttcacgactaagtaaactacgcacactgcttggctggcgttacaccacaccttggacagtatatttcaattcggtcactagctccgacatcaccttaacggactcttacagctctcactctgtccctgctattgcgaactcctggctgcgcaactggctgcatgcgaacctgattgttacactactactgacctgggccactcttaacccatgcgttctgcttaacattgactacgcacttacagaaaccgtcgagaccgcaatattctttttccgcatcgctatacaatactacgctattctaactctttgctgccttgagaacaagcgctaa

SEQ ID NO: 10689 - DNA, 1665 bp, Homo sapiens
  SIMILAR (103)..(399): 931254mologous to Homo sapiens FLJ00012 protein,accession number AK024423,Smith-Waterman Score=476.
atgtcaaagccaaaatacccttttgaaaagcgccttgaagtcgtgaatcactacttcacaactgatgatggttacaggatcatctcggcacgttttggtgtcccccgaacccaggtcaggacatgggttgccctctatgaaaaacatggagaaaaaggtttaattcccaaacctaaaggcgttagtgctgatccagagttgcgtattaaggtcgtgaaagctgtgatcgagcagcacatgtcccttaatcaggctgctgctcactttatgcttgctggtagtggttctgtagccaggtggctgaaggtctatgaagagcgcggagaagctggtttacgcgcgctcaagattggcaccaaaagaaacattgcaatatcagttgatccagaaaaagcggcatcagcattggagctgtcaaaagaccgacgcattgaggatcttgaaaggcaagctctcagcaagcctgacaagtatgcggacgttaaaaagcgtattagtgagatttatcacgagaatagaggccgatacggataccgtagggtaacgctgtctcttcatcgagaagggaaacagattaaccataaagctgttcagcgcctgatgggaaccctctcacttaaagcagcgattaaggtcaagcgataccgctcttacagaggagagatctcttcaacaacgaagttatttcttacagcctttcggatgattgtcgtggcgatcattttgattgcaacttttgactggaatcgactcaaaccgactatcaaccagaaagtctctgcggagttgaatcgtccgttcgctatccgtggcgatctgggcgtggtgtgggagcggcaaaaacaagaaactggctggcgcagctgggtgccgtggccccatgtacacgcggaagacatcattcttggcaatccaccggatattcccgaagtcacgatggtgcatttgccacgcgtagaggcaacgctggccccgctggcgctgctgaccaaaacggtctggctgccgtggatcaagctcgaaaagcccgacgcgcgcctgattcgcctctctgaaaagaacaataactggacgtttaatcttgccaacgatgatacaaagacgcgaatgcaaagccgtcggcatggtcgtttcggctggataatattcttttcgatcaagggcggatcgccattgatgacaaacgatatccacggttctctggtctacaccaccggaaagccacgaccaaaactggaaggtgatgtcgagtcgcggcaattgcggctggcggacctgggaccgttgattggcgttgattccgggaaaggggcagaaaagtcgaaacggtctgaacagaagaagggcgaaaaaagcgttcagcctgcgggcaaagtgctgccttatgaccgcttcgaaaccgataaatgggacgttatggatgccgatgttcgcttcaaagggcggcgcattgagcatggcagtagcctgccgattagcgatctttctactcatatcatcctcaaaaatgctgacctgcgcctgcaaccgctgaaatttggcatggcgggcggcagcattgcggcgaatattcatctggaaggcgataaaaagccgatgcaggggcgggcagatattcaggctcgtcgactgaaactgaaagaactgatgcccgatgtgaactga

SEQ ID NO: 10690 - DNA, 771 bp, Homo sapiens
  SIMILAR (1)..(312): 871254mologous to Escherichia coli asparagine synthetase A,accession number L10328,Smith-Waterman Score=453.
tcagagctgggccatgcgggtctgaacggcgatattctggtgtggaacccggtactggaagatgcgtttgagctttcctccatggggatccgtgtatgatagccgacacgctgaagcatcaactggcgcggtgacgaagatcgcctggagctggagtggcatcaggcgctgctgcgcggtgaaatgccgcagaccatcggcggcggtatcggccagtctcgtttgactatgctgctgctgcaactggcgcatatcggccaggttcagtgtggagtatgggccgctgctgttcgcgagagcgtcccttctctgccgctgcagctctttcactttactcgtcacgtcgtcaggcaaccgctgagcgataaaatcagaaatcaccaacgcatcggcatcaaaccattccctgctttgcaagcgttccataatggcgcgaaaacaactggcaagatcggtgccgacacgaaactgctggcttaaaaaacggattgcttgttcgatgccttgtgggcctgaaagctcataacggacgatctcgggtggaaatagcataatatagcagcgccggtattctgcgagagccctggtcataaagcggccattgagccggagtatcccgcgacataacggccggcgggggtcacggaatctatgtacaccggagatgaacatttcagcaagatcacggaagggctcggtagaggtttcacagcaggtaaccaacagtcgcacccagtccgagacattctttttggagagtaagaggagcat

SEQ ID NO: 10691 - DNA, 1523 bp, Homo sapiens
  SIMILAR (1)..(1590): 941254mologous to Homo sapiens putative p150,accession number U93563,Smith-Waterman Score=2519.
cgccatatcgccctaccaccgagttcaaaaccgcccgcgcacacatcccgttctagttgcagccctaacccatccaacgcacaacgaaccactccgactaccctcacctcaccacatgccacatcctcgcgaacgcgaccctctcagcccagcagacgcatcaccacccactcgtgcatccaatcacgctccgcccgcgccacacaaacccatcaagccggtgcagcgcagacagcagcaaccaaagtccgcataccaacaataaacacgcgtcgtaccaaccgggactcaaataggggcacacgccggtcctatccagctcacagcccatctatacgaccgggccaacagccaagctatgcccgccccacgttcgatcttacgaggtcccccattcccctgcaaatgggtagagaccttcaccgttacccaccggtctgggagatactggcctggggtttttgccccgcttcattgaaatggaaaaacttccctttcgatgttgctgaagcagaacaggaattacaggaaggcccgctgcccgaatattccggtcccgggctggcgttagcgaaatgggggcctgggtgctgaaacaggtcgtgatggcatcactgtttgtggccctgtttctgccctttgggcgcggcgcaagaactttctctcgcctgcctgctgacttcacttgtcgttacgctgctcaagaatataaactctatgacagcagggattttggtctgcttggtcactgttgtatctccagggcttataaaagtcctgatctacgatcagtgatggcattagattctcgtaggagcacaaaccctattgtgaactgcacatgcaatggatctaggttgcatgctccttatgagaatctaatgcctgatgatctcaggtggaataattttgttcctaaaccagcacctcccccaacccactgtccatggaaaaattgtcttccacgaaagtggcccctggtgtcaaaaagggggcctactacagatatagcatcacctaactatacactacacacagtttacacttaccatatctgcaaccacgtcgcgctacagacacatgcttcacaaacgacagcatgcaacaggatatacaggacaacagcatatcgcctgagcactatcctcagtacagtatacgaacatcaagggctaccaacagtactcggtagagcacacggaaaaaaatataatattggatcggctgtgtgtcaagcatctgaggttctaaccatagctccattactaccagtccgtgtgacttggggaatgctgcttaccttctttgagacccagtttcttcattacaagataaagagcttgctagggagaagcttgctggggaagagagcagcaatttgcccaccagaggcccagatctcctgggagaaatcagctgccatggaacaggagtttttcttcatgctagaaagggaaaagaacatgaataagtggcaatccagggacagccagaaggaacctggacaatggctcaccggctga

SEQ ID NO: 10692 - DNA, 227 bp, Homo sapiens
  SIMILAR (153)..(73): 551254mologous to Escherichia coli alternate gene name yibJ,accession number U00039,Smith-Waterman Score=79.
ctcctctgcagcgcgttatgatagcggtggcggttgtaatacatgccggactcctcattatacaatctgttgccccgtccgtgctgacaagcgccacgccaggccgcgatggtcgctgtggtacaggtggatttttcgacgatcggcgtgtacaccgggtccatctggttttgcatttcgtccgccgttagtccgcacgatgccagcggggatcctctagagtcgac

SEQ ID NO: 10693 - DNA, 261 bp, Homo sapiens
  SIMILAR (261)..(160): 1001254mologous to Escherichia coli No definition line found,accession number U00039,Smith-Waterman Score=174.
caatctgttgccccgtccgtgctgacaagcgccacgccaggccgcgatggtcgctgtggtacaggtggatttttcgacgatcggcgtgtacaccgggtccatctggttttgcatttcgtccgccgttagtccgcacgatgccagcggggatcctctagagtcgacctgtaacgaggaaggggaatactccggccagatcttttgcaggtcaatccggtcttggtcgctaaatttttctaatcgaatgatggtcagcttcat

SEQ ID NO: 10694 - DNA, 921 bp, Homo sapiens
  SIMILAR (44)..(12): 631254mologous to Escherichia coli alternate gene name yibJ,accession number U00039,Smith-Waterman Score=45.
tcaacggatacttgataaaaattccatccccgccttcagcccaatcggatcctgagtgatataccgcccctgcagcgggtcataatagcggtggcggttgtaatacaggccggactcctcatcatactgctgccccggcaggcggataagctgctgcagctgatgcgggttctcttcattcagcaggttgccccattcatcgtattctgcgcaccattctgttgtcccttccttgctgataagggccagcggcaggccgcgatggtcgcagtggtacaggtggatttttcgcgccggcgtgtttacaccgtggttcccattccttctcacgaccccagttgttaaacccccaaaggcgtaaaacgaccgcaaactgggaactttaaagaaaggcgctctcttcaaggagaaatgctcccccacggaaaacagggtggataagatttgttccaccaagatgccggcctcgtttctgctacgtacacagtcaggaaaatatcgatattcgtacagttttacaccttgaaacgtgaatacctcttcaggatcgagcgtaataccaaattcctgtctgatcgctgcattcggcagtattatgatgggactgtttgctaacctgccagttgcctggcacccgctatgggcctgaatgcgttcttcgcttttgtcgttgtacaggcgatgggcttgccgtggcaggtcgggatgggccgcaatctcctgtctcggtaacaccatgtcaacggaaacaatatcgataatttcgtacagttttacacctttgaaacgtttgaatacctcttcaggatcgagcgtaataccaaattcctgaaacatcgttacatatgcgcgagagcaaatgacttcactgtcgaccagcgtaccgtcgcagtcgaaaaataccgcttctatccgggacat

SEQ ID NO: 10695 - DNA, 1735 bp, Homo sapiens
  SIMILAR (1135)..(1722): 981254mologous to Escherichia coli HisP-like nucleotide binding protein (phnL),accession number J05260,Smith-Waterman Score =983.
  misc_feature (1)...(1735): n = a,t,c or g
atgagtaaaaaccttctgaaagcaggttactcgctggtggttgctgaccgtaacccagaagctattgctgacgtgattgctgcaggtgcagaaacagcgtctacggctaaagcgatcgctgaacagtgcgacgtcatcataaccatgctgccaaactcccctcatgtgaaagaggtggcgctgggtgagaatggcattattgaaggcgcggagccagcgaaaggcattgatatgctggatgctccggtgagcggcggtgaaccgaaagccatcgacggtacgctgtcagtgatggtgggcggcgacaaggctattttcgacaaatactatgatttgatgaaagcgatggcgggttccgtggtgcataccggggaaatcggtgcaggtaacgtcaccaaactggcaaatcaggtcattgtggcgctgaatattgccgcgatgtcagaagcgttaacgctggcaactaaagcgggcgttaacccggacctggtttatcaggcaattcgcggtggactggcgggcagtaccgttttggatgccaaagcgccgatggtgatggaccgcaacttcaagccgggcttccgtattgatctgcatattaaggatctggcgaatgcgctggatacttctcacggcgtcggcgcacaactgccgctcacagctgcggttattgagatgatgcaggcacttcgagcagatgcgcgcgcatttgttaccgttagtattgaacaacttccggcactgaaagcctttgataccgtcttttcgatgggcgtgctttaccatcgccgttcaccgctggagcatctatggcagttgaaagatcaactggtcaatgaaggtgaactggtgctggaaacgctggttattgatggtgatgagaacacggtgctggtaccaggcgatcgttacgcgcaaatgcgtaatgtctatttcatcccttccgcgctggcgctgaaaaactggctgaagaagtgtggttttgtagatatccgcattgcggatgtgagcgttaccaccacagaagagcagcgacgcaccgaatggatggttaccgaatcgctggccgatttcctcgacccacatgatccggacgcgtcagccgcatccgacacccgaaccacgaggcgaaaaatgattaacgtacaaaacgtcagtaaaaccttcatcctgcaccagcaaaacggcgtgcgcctgcccgtcctcaatcgcgcctcgctcaccgtcaacgcgggcgaatgcgtggtgctccacggccattccggcagcggcaaatcaactctgctacgctcgctgtacgccaactatctgcccgacgaaggtcaaatccagatcaaacacggtgacgagtgggtagacctggtcaccgcgccagcgcgcaaagtggtggaaatccgcaaaaccaccgtcggctgggtgagccagtttctgcgcgtcatcccgcgtatctcagcactggaagtggtgatgcagccgctgctcgataccggcgttccgcgtgaagcctgcgccgctaaagccgcgcgtcttctcacccgcctgaacgtgccggaacgcctgtggcacctggcaccatcgacattttccggtggcgaacagcagcgcgtcaacatcgcccgcggctttatcgtcgactaccccattctgctgcttgacgaacctaccgcctcgctggacgccanaaacagcgccgcggtggtggaactgattcgcgacgcaaaacccgtggcgcaca

SEQ ID NO: 10696 - DNA, 4182 bp, Homo sapiens
  SIMILAR (2001)..(1114): 991254mologous to Escherichia coli K12 putative enzyme,accession number AE000280,Smith-Waterman Score=1575.
tcagttcaccttccagcagttgcgccgcccgcctgtgagcacgtcagcgccctcttttttaccgatatcaatgtagttgaggatggtttccagttgcccgtgagaaacctgcgcgcccatttgcgtcacgctgtcgagcgggttaccgctacgaatgctttcgacacggcggatggcgcgttccataaagcgttcgtagatagattcctgcactaaagcacgactcggacaggtgcaaacttcgccctggttaaaggcaaacagtgcaaagccttccagcgctttatcgaaaaaggcatcttcttcatccatcacatcagcaaagaagatatttggcgacttaccgcccaactccagcgtcaccggaataatgttttgcgttgcgtattgcataatttgttggcccacttccgttgagccggtaaacgccactttggcgatgcgtttcgaggtcgccagatattcgccaattaccccacctgcgccattgaccacgttcaccacgcccggcggcagtaaatcaccgacaatttccattagcagcagtacagaaagcggggtaagacgtgcgggtttcagcaccacacagttgcccgccgccagcgcgggagccattttccagctcgccatcagcagcgggaagttccacgggataatctgccccaccacgcctaacggttcatggaaatgataggccacggtttcgctatcaacttcactgatcccaccttcctgcgcccgaatacacgaggcgaaatagcggaaatggtcaatcgccagcggtacatccgcagcactggtttcgcgaatgggtttgccgttatcccaggtttccagtgtcgctaacagctcgaggttttgttccattcgatcggcaatcttaaacagaatcgccgggggatcctctagagacgaatgtgaaatggcgcacgaatgcgtggtacgaagcgcaaatgaaacgaagatgctgcacgctttggtattgcgaatggcgatctggtgcgtgtctggaacaaacgtggtcagattttgacaggcgcggtggtgactgacgggatcaaaaaaggcgtggtatgcgtgcatgaaggtgcatggccagatctggaaaatggccggatcatgtgggtcgaggaaatcggccagcgattcggtaaccatccattcggtgcgtcgctgctcttctgtggtggtaacgctcacatccgcaatgcggatatctacaaaaccacacttcttcagccagtttttcagcgccagcgcggaagggatgaaatagacattacgcatttgcgcgtaacgatcgcctggtaccagcaccgtgttctcatcaccatcaataaccagcgtttccagcaccagttcaccttcattgaccagttgatctttcaactgccatagatgctccagcggtgaacggcgatggtaaagcacgcccatcgaaaagacggtatcaaaggctttcagtgccggaagttgttcaataggtaacaaatgcgcgcgctgatcattacccagtagtttacgcaccgcttcaaactggcacagaaacagttgcgtagggtcgatccccaccgcgaggtgcgcgcctgcgccaatcatgcgccacatgtgataaccgctgccgcagccgacatccagaatggtgcgtccggttaaatcagaaagatggggcagaacacgatcccatttccagtcggaacgccattcggtatcgatgttgacgccatacagtgagaacggccctttgcgccacggcatcaggttgcgcatcagcgtttcaatgcgtttaatttgccctgcgctcagtggctcttcgctttctgccgtaacgctatgcaataaatcaagacgatacggtttaatttcaggtagaaactccaccgcatttgaccactgcttaaacaacccgtgctgctgctcgcgctgccagttagcaatctgcgcgggcagcgtttcgagccagtgtgaaagatgatttttggcaatcagagaataaaagttagtgatgactttacgatcgccgtaatgacccaaatgaaatgcataccctgatcgatgatatccgttttgcagacgttcgcagcaaaatgcatgacgccttattggattacatggacaaaattcgcgatccgttccgcagttaccaatggagtctgcgtccgtggcgtaaagatgcacggccgcgctggatgggggcgtttcgtccacgtccacaagatggctattcgccagttgtacgcgactatgacaccggccgacacaaggggtgaaggtggaggagaaaaaacagaagttctgacgataatgcccgctgatgatcacccggcgggcattattcaggctgcttaaaccagtgaaccgccggtcaggaaggaaaagataaggaatatcagcaaaatggatgccgataccaaaaagcaaggtatggaaagccagcgtcccgccgccaaaaaccagcgcgccgcgaatgccccagcgattttccttacgcataccgccaataaatgcgcaaaggagcgcagcaatggccagtgcgataccgctttgattgaggattttatcgacatctacgtcctcttttttctccacggtggtaattttttcgccttttattccggcgagaagacctcttttaatttcagccgttttgtccgccacgatgctttcaaacgttggcggtggtgcggagaaagggccgaatgaaaagtggataatccccatcatccaagcgatggcaccgaacagcatgcccaatgaactgattttattttgagctatgatacccatctgacctctttcgtggatgatgaatgaagtcaatttatccgggctacatgatgcttcatggtttgcgattgttacgccgatgtcgtttggtatgccgattttcgatcccgtttccattctgaccatgactgccgtgttaatcatcgtgtttatcgagtcaatggggatgttcggatagagcgccagtaaaaccaccagtgaaccgatgtaaaacagcaggatgcgatacaccacctgatttaccgcttttggaatgctgttttccggatcgcgcgcttcagcggcagtaatcccaatcagctccagaccgccgaaggagaacataattaccgccagcgacaaaatcagcccattccagccggtggcgaagaaaccaccgtagcgccagaggttgtcgatactggctttctcgccgccgtgaccagaaaacagcagccacaggccaaagccgatcataccgatgattgccagcactttaatcaacgcaaaccagaactcggtttcgccatataagcgcacgttcaccaggttaacggcgttgatgataataaagaaggcggcagcccaaatccacgttggaacatccgggaaccagtactgcatatagatgcccgcagcggtcagctctgccattcccaccagcacgaacattacccagtagttccagccagagaggaagcccgcaaacggtccccagtatttataggcaaagtgggcaaatgaaccggataccggctcctcaaccaccatttcgccaagctggcgcataatcaggaaagcgatgatcccggcgacgccgtagcccagcaatacagccggacccgccatctgaatcgccgggccaatgccaagaaacagaccagtaccaattgcgccacccaacgcaatcagttgaatatgacggttatgtaatccgcgatgaagcgtcggctcttgattcgacgcagtatcttccgatacggttgacgcgtttttcacgcctttcccctgtgtgtcttttttgttgaggggcacccgatgtcggtgcagccacatcagcttatacgccgccgggataataaacagcgacagcaaaggtgcggtgatcatgccgccaatcatcggcgcggcaatccggctcatcacctctgaaccagcccccgttccccacagaatcggcagcagaccggcgataatcaccgccaccgtcatcgctttcgggcgcacgcgcaggaccgcgccgtgatataacgcctcatccagcttctgctcgctgaatgtttgtggattattcaacgacggcacggcctctatggcgtgacgtaaatacatcagcatcaccacgccaaattcggcggcgaccccggcgagggcgataaagccagtgcccgtcgccacggaaagatgaaagcccat

SEQ ID NO: 10697 - DNA, 2240 bp, Homo sapiens
  SIMILAR (886)..(1419): 991254mologous to Escherichia coli RhsB core protein with unique extension,accession number U00039,Smith-Waterman Score=933.
atgcgctcggacccggatacttcagttaatgaaattgagacgaaactttctgccctactgggtagtgagaccactggtgaaatcctttttgacctcttgtgcgctaacggtccagagtggaaccgcttcgttacgctggaaatgaaatatggccggatcatgctggatacggccaaaattattgatgagcaggacgttccgacacatatcctgagcaaactgacttttactttacgtaatcatcctgaaggagtggtgatgaaaaattttgaagttctgcagccactacagaactccctttccggtctaccgctatgggtatctgaacgtatattgcagcagataaatcagttaacccactacgagccagtgatcggcatcatgggtaaaactggggcgggaaagagtagcctttgcaatgccctgtttgccggtgaagtatcgccggtcagcgatgtagcggcctgtacacgtgatcctttacgctttcgcctgcagattggagaacactttatgaccatcgtggatctgcccggcgtgggcgaaagtggcgttcgcgataccgagtatgctgcgctgtaccgcgaacaacttccccggctcgacctgattctgtggctgattaaggctgatgatcgggcactggcgactgatgagcatttttaccgtcaggtgattggcgaagcataccggcataagatgctgtttgttatcagccagtcagacaaagctgaacccaccagcggtggaaatatcctttccacagagcagaaacaaaatatcagccgcaaaatctgcctgctgcatgagctattccagcccgtgcatccggtgtgtgccgtgtcggttcgcctgcacccggtagtagcgctactgcaacaattccgcacggatgatgagcggactcaccggtaccattacgacagtcagcaccggctggtcgactacacgcggacacaatatgaagagccgctggtcgaaagtcgctatctttacgacccgctgggccgcagggtggcaaaacgggtgtggcggcgtgaacgggacctgacgggctggatgtcgctgtcacggaaaccgcaagtgacctggtacggctgggacggcgaccggctgaccacgatacagaacgacaggagccgcatccagacgatttatcagccggggagcttcacgccactcatcagggtcgaaactgccaccggtgagctggcgaaaacgcagcgccgcagcctggcggatgcccttcagcagtccggcggcgaagacggtggcagtgtggtgttcccgccggtgctggtgcagatgctcgaccggctggaaagtgaaatcctggctgaccgggtgagtgaggaaagccgccgctggctggcatcgtgcggcctgaccgtggagcagatgcaaaaccagatggacccgcacggaagggacaacagcgtggtaccagaatacgatgaatggggtaacctgctgaatgaagagaacccgcatcagctgcagcagcttatccgcctgccggggcagcagtatgatgaggagtccggcctgtattacaaccgccaccgctattatgacccgctgcaggggcgatatatcactcaggatccgattgggctgaaagggggatggaatttttatcagtatccgttgaatccgatctcagacatcgaccccctgggtttatctatgtgggaggttgccagacagatgaacgctatcgcgagtaaattgccggaaggttttcatattggaattaattttagcgcttcgcatattatttcgccgacgtttgtcgacgagtgtttaaatttccgtgacagttttacccgccgcgatttaaaccttgttctggaagtcaccgagcgtgacctattgaatgttgatgaaagtctggttcagcggttgaacatactgcatgaaaatggttttgtcatcgcactggatgatttcggtactggctactcagggctttcttatcttcatgacctgcatattgattatatcaaaattgatcacagtttcgttggccgcgtaaacgcagacccagaatcaacccgaattctggattgtgtattggatctggcgcgtaaactttcgatcagtatcgtcgctgaaggtgtcgaaacgaaagaacaacttgactatctgaaccaaaattatatcacatttcagcagggttattatttctataaacctgttacatacatcgacctggtcaaaattatcctttctaaaccgaa

SEQ ID NO: 10698 - DNA, 2919 bp, Homo sapiens
  SIMILAR (1003)..(1521): 991254mologous to Escherichia coli ferrienterochelin receptor protein,accession number M13748,Smith-Waterman Score=924.
atggagcacgaacgctatgtcggtatctccaacctgatgctgaaacctgaactgtacctggcggtggggatctccgggcagatccagcacatggttggcgctaacgcgtcgcaaaccattttcgccatcaataaagataaaaatgcgccgatcttccagtacgcggattacggcattgttggcgacgccggagctcttatgtccgaagatatctttgacgccatcatcgtcggtgcagggcttgccggttcggttgccgcactggtgctcgcccgcgaaggtgcgcaagtgttagttatcgagcgtggcaattccgcaggtgccaagaacgtcaccggcgggcgtctctatgcccacagtctggaacacattattcctggtttcgccgactccgcccccgtagaacgcctgatcacccatgaaaaactcgcgtttatgacggaaaagtcagcgatgactatggactactgcaatggtgacgaaacctcgccatcccagcgttcttactccgttttgcgcagtaaatttgatgcctggctgatggagcaggccgaagaagcgggcgcgcagttaattaccgggatccgcgtcgataacctcgtacagcgcgatggcaaagtcgtcggtgtagaagccgatggtaaccgcgttatgaaaaagatcctgacaaccccgatcaaagctgaagatctgcaagatattcgcgtcggcgatgtgatctacctgaccggtacgctggtgacctgccgcgacgtttgtcaccgccgtttgatcgaactgaaacgtccgatcccttacgatctcaacggcaaagcgattttccacgctggccccatcaccgcatatcgccttgatgcggctcggaaaaaaataacctctgcccggagtctggttctgaccgatagaacccggaacgcggtgagacaaggagttaccgtgagtagcgtcctgggtacggaagttccagcgcttaacggtacctgcgaaacctttacctttagaggcaccgatctctatcagtgggataacgtgccgaaagcggtggttgaaggtctggaaggatcgttaaacgtaccggttagcgaaacggtgatgtggaccaataacatcacttatatgctgaagagtgaaaacaaaaccacgggcgaccgtttgtcgatcatcccggagtatacgttgaactcaacgctgagctggcaggcacgggaagatttgtcgatgcaaacgaccttcacctggtacggcaagcagcagccgaagaagtacaactataaaggtcagccagcggttggaccggaaaccaaagaaattagtccttacagcattgttggcctgagcgcgacctgggatgtgacgaagaatgtcagtctgaccggcggcgtggacaatctgttcgacaaacgtttgtggcgtgcgggtaatgcccagaccacgggcgatttggcaggggccaactatatcgccggtgccggggcgtatacctataacgagccgggacgtacgtggtatatgagccccaatcggatcctgagtgatatatcgcccctgcagcgggtcataatagcggtggcggttgtaatacaggccggactcctcatcatactgctgccccggcaggcggataagctgctgcagctgatgcgggttctcttcattcagcaggttaccccattcatcgtattctgcgtaccacgctgttgtcccttccgtgctgataagggccagcggcaggccgcgatggtcgcagtggtacagtgttacaacaaaatcccatgggatgtgatgaagctcaacaaagccggattcaacgtgccggaaagttatagtttgttgaaaatgcccccagtgggatgcctgataagcgcacttaagaaagctgaagaccgacaagaagtgattttacggctgtttaatccggctgaatcagcaacctgtgatgcgactgttgctttcagtcgcgaggtgatttcttgctcagaaacgatgatggatgaacacattaccaccgaggaaaatcaagcgcgtatggacttacaacactggcaggcacagttcgaaaactggttgaaaaaccatcatcagcaccaggacgcggcccatgacgtgtgtcattttcgccgcgtctgggctacggcacagaagctggcggcagatgacgatgtcgatatgctggtgattttaaccgcctgttattttcacgatattgtgagcctggcgaaaaatcatccgcaaaggcagcgttcttcaatcctggcggcagaagagacgcgtcgcctgctccgtgaagagttcgagcaatttccggcggagaaaatcgaggccgtttgtcatgccattgccgctcacagtttcagcgcgcaaatcgcccccttaacaacggaagctaaaattgtccaggatgcggatcggctggaagccctgggggcgattggcctggcgcgcgtgtttgccgtttcaggggcattgggcgtggcgctgtttgatggtctggaaaccgtaatcgtagaacgttacaacacccttggcggtgtttgcctgaacgtcggctgtatcccttctaaagcactgctgcacgtagcaaaagttatcgaagaagccagagcgctggctgaacacggtatcgtcttcggcgaaccgaaaaccgatatcgacagattcaccccggacgaaatcatcgtcggtttgccgctgaatatggacggcaccgagcaaccattgactgccagagcgcgtaaatttgccaaccgtattcatggccgtttcggtgttgaagtaaagctccatgacgagcgtcttagcactgtggaagcccgttccggtctgtttgaacagggcggctatcgggcgctcaacaaaggcaaagttgactctgcctctgcggttattattctcgaaagctatttcgagcagggatattaa

SEQ ID NO: 10699 - DNA, 1191 bp, Homo sapiens
  SIMILAR (681)..(827): 751254mologous to Escherichia coli K12 putative chaperonin,accession number AE000297,Smith-Waterman Score=180.
atggccaggcttgcggccctgaaagcctgtgagaccgtctattcgatgggcgtgcgtagccatcgccgttcaccgctggagcatctatggcagttgaaagatcaactggtcaatgaaggtgaactggtgctggaaacgctggttattgatggtgatgagaacacggtgctggtaccaggcgatcgttacgcgcaaatgcgtaatgtctatttcatcccttccgcgctggcgctgaaaaactggctgaagaagtgtggttttgtagatatccgcattgcggatgtgagcagaataccaccacagaagagcagcgacgcaccgaatggatggttaccgaatcgctggccgatttcctcgacccacatgatccgggtaaaacggtggaaggttatccggcacctaaacgcgcgcgcaatagaaaccgcgccgaagatcaccgacagcgccttcggcaccgtacgcggaaaaaacagacgcatggtcagcgacgccgacatcgcccagaacccgcccagcgccagccccagacaggcacgaccgattaaaagcaaactgaatgagttagcaaaggaaaccagcaagcaggagagcgtcaccaaaacggcaaacaaaataacaactcgcctagatccagcaggtaggcggcctggaaggttttatcgccaaacggacgatgctcgaaaaaatgaagggcgaaattcttcgggttaccggaagaagagaaacgcgctctggcagcacttcatgacactgcaagggaacggcagaagcagaagtttctggaggattattctattgatgttgcctctattcccggcagttggccctgcgcgtaaagcggcgttacggtcttatggtattgaaacagccgcagatgttacccgtcgtggcgttaagcaagtgaaagggtttggcgaccatctgacccaggcggttatcgactggaaagcgagctgtgaacgccgttttgtgttcaggccgaatgaagcgataacgccagcagacagacaagcggtaatggcgaaaatgaccgccaaacgacatcggctggaatcggcgttgacagtcggcgcgacagagttgcagcgattccgccttcatgctccagcacggaccatgccgttgatggaaccgttacgtcaggcagcagaaaaactggctcaggcgcaggcagatttaagccgctgctga

SEQ ID NO: 10700 - DNA, 1515 bp, Homo sapiens
  SIMILAR (325)..(1287): 791254mologous to Escherichia coli RhsC protein precursor,accession number D90709,Smith-Waterman Score=1355.
  misc_feature (1)...(1515): n = a,t,c or g
atgttcgctcggatttggtcatcgcatccacaatggctgacattgtatttagcgcaacatcgcgcagtgattatccccgatgatgcaaaactgcacagaaatttactccgctggtatagcgcaggtcgcctggatatccccgaacttctggattacgcccagtcatggcgggaaactgaacctgataatgaagatgcgccttattatgaatacgcgcaacgcgtctattgtggagaaggcgaaagcctgttggcagaactttgtgactactggcgcgagtatccctccacccaggcggatgctttaatgttgcaatggtgccgtcagcatcgggtcgattattacccattatctggtggcaaacgggtgtggcggcgtgaacgggacctgacgggctggatgtcgctgtcacggaaaccgcaagtgacctggtacggctgggacggcgaccggctgaccacgatacagaacgacaggagccgcatccagacgatttatcacgacggggacgccttacacgacccnaacgacacagacacgacacctgcgctggactgccacttcagacagatcccggctggcgaagacggtggcagtgtggtgttcccgccggtgctggtgcagatgctcgaccggctggaaagtgaaatcctggctgaccgggtgagtgaggaaagccgccgctggctggcatcgtgcggcctgacggtggcgcagatgcaaagccagatggacccggtatacacgccggcgcgaaaaattcacctgtaccactgcgaccatcgcggcctgccgctggcccttatcagcacggaagggacaacagcgtggtacgcagaatacgatgaatggggtaacctgctgaatgaagagaacccgcatcagctgcagcagcttatccgcctgccggggcagcagtatgatgaggagtccggcctgtattacaaccgccaccgctattatgacccgctgcaggggcgatatatcactcaggatccgattgggctgaaagggggatggaatttttatcagtatccgttgaatccgatctcaaatatagatccattaggattagaaacactaaaatgcattaagccactgcattcaatgggcggaactggtgaaagaagcggtccagatatatgggggaatccgttctatcatcaatatctttgtgtcccagactggtacaaggggacttatatcttgttgcgtttgcggccaaaaggaaaccaaacgggggggaagaaattcaaaaagggagatactactgaccatcgaccagaagaccctagtgctgtggtcctatgtgtcagggagcggatactgctgttgggaagacgtctccacatccccctggcacagcagctggtcggcgtcaaaagcggctttttgcagattatccaggtcacggcgacggcgatccggcatgtggcactcaatgcggattttcacaggcatagccaggccgatatccagcattgcgtttttaatgattcgggcgacgttatcgcg

SEQ ID NO: 10701 - DNA, 4770 bp, Homo sapiens
  SIMILAR (117)..(13): 681254mologous to Escherichia coli K12 putative transport system permease protein,accession number AE000270,Smith-Waterman Score=130.
ttaaagagagggatatgtcaggcagccaaggtggcttgtgtgtagaataggcgcgacggtgggcaacagcagccagttcaggcattgccagcggctgtagcccagcgaatccagcacaatgacctgctgcaacagccatttttcgctcaatactgctgctaagatccacagcagaaatgcgctttctttcactgcaagggtgaggcccagaccgatgccaaatcggtccattggcggagtgaaatacgggaaatagtcataaagcagccctccgtcagcaaagagcagaagggcgctggtggcaaaagccacatggggaatggcgagcagccacggcagacgggcgcacatacgctgccatttcggcccaggccacagcgccacaatcaccagcagggcaatcaacaatgccccgaccgccgcgatggttgtcgacaccagcgttgccagtaatgcctgcggtaactgtggatcggcaaataacgcctgccagtgtgtcaacgacaaagcaggcgatatcagcgtgagagctgccgggatcagcggtgcataaatcaccgccaccatcgcccacagcaaaaagattaatgcgtaccgtaacggtgtagccattcttgttccagcgcatttacccaaccgccagttgccgcccatcgggtgaagaagccaggaacattggggcaaactacacaacatgccgggagcgcgattagggatataattgatctcttccataattttggcgatgcgctcgcctgtttccttggccacctttttcggcgagcggatataacgactcacggtcatttttgttacgccagccagcgtagcgatatccgtccaggtacgcaacgtttcaccaaccgtcagattaaaataccctttaaatagccagaagccagcgtcgtttacgtgtgacgcgatcacgctgcccgcaccggttgccagtaccattaaagcgggatcggcatgggtaacgttgataatcggcaacaccacacccgcggtggtaatggccgcgacggtggcagagcccagagcgatacgcaacagcgccgcaacagtccagcacatcaataacggcgaaagtgtagttccggtcattaagtgtgaaatatagtgcccgacaccgctatctactaatacctgcttaaacgcgccgccgccagcgataataaacacaatcatcgcgatagcgcctatagaatccccaatgatatccatgatttgctcgatggtgcgtccattacgtcggcccagtgtgaaaatcgcaataacaatggcaataaacagcgcaacggcagggttaccgacaaattcaaagaagaggcgcacggtgttagttttcggtaacgtaatttcacaaacggcggcgatagccatcaagatgaccgggatcacggcaggaaaatctggtcccaaagaggggattccctttggtaaacgcttcgggttaaataagctccggggtgcttccaaacgattacagtttagaaaagggtctgcacatactgcggatggtatgaaccatagataacccagggggtcgatgtctgatatcggattcaattgatatccatacaggttccatccccccttcagtccaatcggatcctgagtgatatatcgcccctgcagcgggtcataatagcggtggcggttgtaatacaggccggactcctcatcatactgctgccccggcagccggataagctgctgcagctgatgcgggttctcttcattcagcaggttgccccattcatcatattctgcgcaccacgctgttgccccttccgtgctgatgagcgccagcggcaggccgcgatggtcgcagtggtacaggtggatttttcgcgccggcgtgtacaccgggtccatctggttttgcatctgctccacggtcaggccgcacgatgccagccagcggcggctttcctcactcacccggtcagccaggatttcactttccagccggtcgagcatctgcaccagcaccggcgggaacaccacactgccaccgtcttcgccgccggactgctgaagggcatccgccaggctgcggcgctgcgttttcgccagctcaccggtggcagtttcgaccctgatgagtggcgtgaagctccccggctgataaatcgtctggatgcggtcctgtacgtcgcacccgtgcgtttctttgttttctgtttcgtgtttcgtgtttttctttttttcgttgttttctgtcttcttttcttgtttgtttgtgttttttttgtgtttttgtctttcgttgttttgcctgtttgtgttttcttttgcttcgcggtttgttttctttcttgtgtcgtttcttttctttttcttttttcttcctttgtgtcttggttttttgtgttctgcgtttggccctatgccttccagctcatattccacgggatcttctaccgtcagaatatttcgtccgggagtattcagcgccgaaaggatggcgtagagcgtggtgcttttaccggagcctgtcggccctgtcaccaggataataccgtgcggaagctgaatgagattttctaaatcctgcttatccgctgccgtcatccccaggttgttcaatgaaagctggaggctgtttttatccagcaggcggagtacggcgcgttcaccatagatggacggcagtgtggatacgcggacatctatgttacgtcgcccgatacgcaaactaattcttccatcctgtggaatacgtttttcggcgatatcaagacgagccatgaccttaattcgggagataagcagtgccgccagttttttgtttggctgtaaaattgtccgcaaaacgccgtcgatgcgaaaacggatcgacattgttttttcataggtttcaatgtggatatcagaggcggtttctttgatggcctcactcaaaatcgcattgatcaagcggataaccggtgccgctgaatcttcattcaggagatcttcatttgcgggcatctcttccgaaagcgagagaagatcgacggattgatcgatatcctgcgcaatctgttgcgactcaccggtattctgatggaataccgcttccagccgagcttcaaaatcagcctgtgacaagctggtcatggtctggcactggccaacctgacgttgaatatcgagtaaccgctcgaatggcgtatcggcgagataaataatctcgccctctgaatagagataaccaattcgttgtgccagcgcccaacgtgacgatggcgcaggggcgtgactgttgaacgtgttttcatccagcaacggcaaatcttccgagccaaccagcgcttttgatttcccgtcgatccgctgtagttgctcctgaaggtaacgggtgtatttctcttttgacagtgagcgataaacatcatcgtaagggaatatcggcggacggataaaaccatcaggttgcgttagcgcgcccggggaggatatacggagagtgtcccttaggggtattcccgcaagagacttgccgtgcttcaaaaaactcgaagaggacagttccgctgtcgtcaggctgcgcgtcactgtatgtttgggggcgttaaacagcgtttctacatcgccctgttcgacaatcttaccgtcagacatcaccgccacgtcatccgccagacgcgccacaacgcccatatcatgggtcaccagcagcattcccggcgcttgtttttgcataatgctttccagcagatcgaggatgcgcgcctgtgctaccacgtcaaggtcggtggtcggttcatcggcgatgataaacggtgattcacacagcaccgccatcgcaatcatcatgcgctgcaacatgccgccgctcatctcgaacgggtacagcttcagcacgcgcgcggcgttttccagccccaccgcttctatggcagcggtaagcgtagcgtcatcggcgggtttccctaacgccaggcaggtttcccgcgcgtgggtgtgcatggtgtgcagtggattaaaggcgctgcgcgggttctgcatgatggtggcaattttgatgccgcgcagggcgcaaggcgaaaccggtttgccatcggctaaaatttcccccgccgtctggcgaacgccagcgggcaaaatgcccagcgttgcggcgcaggttaatgatttcccgctgccgctaccgccgactaacgccagcttgcctttatacgcgcgtttgtttataaactgcccaaatgaaactaaatgggaaatttccagtgaagttcgtaaagtattttttgatccttgcagtctgttgcattctgctgggagcaggctcgatttatggcctataccgctacatcgagccacaatacgtaaaccgctaacaatggcgatacgatcgccctggcgggtaaccagcggtaaaacctgacccataacactccccttataaacctgctcaacaaagtcgctcagtttgtcgatgaaagacttgatgtacatcaggcgctcaaggttcagcacgcccaaaccgtcgaggttgatcgggttcgcgacaccacctaccgccaggttctgaatgtgcggcgttttaccgcccagcagcgccacgacgcggttagcgtcacgctggcactccaacgcttgcaggtagtgcgctaccgcaatcaggttcacttccggcggcagtttcatcgccggatgaccccagtagccattagcgaaaatacccaactgaccgctggcaaccagatctttgatcttgttctgaactttggtgaactcttccggactgttcaggtgccaggtcgaaacgcctttcagcat

SEQ ID NO: 10702 - DNA, 3024 bp, Homo sapiens
  SIMILAR (1353)..(2627): 991254mologous to Escherichia coli RhsA protein,accession number D90709,Smith-Waterman Score=2298.
atgacccaaagtaacgggcagacgttggttgttgataccgatgaacagccacgcactgacgccagcgcagaaggcttagcccgtttaaatccttcatttgatagtctcggttctgtgacagcgggtaatgcatcatccataaacgatggcgcagctgcggtaatgatgatgagcgaagccaaagcacgagcgttgaatttacccgtgctggcccgcattcgcgcatttgccagcgttggtgtagatccggcattgatgggaattgcgccggtgtatgcgacccgccgttgcctggagcgtgtaggctggcagttggctgaagtcactccgccagaagaagcgaaagagatcccacaggttgcaggctctctggaagaagcactgaacgaactggatctggaccgcgagttcctgaaagccggtggcgtgttcactgacgaagcaattgatgcgtacatcgctctgcgtcgcgaagaagatgaccgcgtgcgcctgggatcggtggcaagcacatcacgccgggatgcgacgcaaatgcgtcttatccggcctacacgggttgatgatgtggtaggccggagcagtgtggcactggaaaaccagggcaaatgggcgcaggcggcagcacttcagcggcaacgactggcgctggaccccggcagcgtatggattacttaccgactttcgcaggatctctggcaggccggacaacgcagccaggccgatacgttaatgcgcaatctggcgcagcagaagtcgaacgacccggagcaggtttacgcttacgggctgtacctctctggtcatgaccaggacagagcggcgctggcgcatatcaatagcctgccgcgtgcgcagtggaacagcaatattcaggagctggttaatcgactgcaaagcgatcaggtgctggaaaccgctaaccgcctgcgagaaagcggcaaagaggcagaagcggaagcgatgctgcgccagcaaccaccttccacgcgtattgacctcacgctggctgactgggcgcaacaacggggatcctctagagtcaccagcagcagcaagctgcatggttgcggcattggcggattaccatgtgccggaaagaccgtgcagctctattcaagaaggtggtccccacaaagacagcgggaagaaatgcggggcccaggaagagcactccagagcgagactcaccgaagagttatcggtcaccggtcaccggagtacagtacagcacacggcaggctgacggcgttcacaccacgcagcgaatctggatatccgcatccgtatgccacagacccggcaggtaccgcctgcccgacccggagctgcacccggacagcaccctcagcatgtggccggataaccgtatcgcccgtgacgcgcactatctttaccggtatgaccgtcacggcaggctgacggagaaaaccgacctcatcccggaaggggttatccgcacggatgatgagcgcacccaccggtaccattacgacagtcagcaccggctggtgcactacacgcggacacaatatgcagagccgctggtcgaaagccgctatctttacgacccgctgggccgcagggtggcaaaacgggtgtggcgacgtgaacgggacctgacgggctggatgtcgctgtcacggaaaccgcaagtgacctggtacggctgggacggcgaccgcctgaccacgatacagaacgacagaacccgcatccagacgatttatcagccggggagcttcacgccactcatcagggttgaaaccgccaccggtgagctggcgaaaacgcagcgccgcagcctggcggatacccttcagcagtccggcggcgaagacggtggcagtgtggtgttcccgccggtgctggtgcagatgctcgaccggctggaaagtgaaatcctggctgaccgggtgagtgaggaaagccgccgctggctggcatcgtgcggcctgacggtggagcagatgcaaaaccagatggacccggtgtacacgccggcgcgaaaaatccacctgtaccactgcgaccatcgcggcctgtcgctggcgcttgtcagcacgggaagggccacagaatggtgcgcagaatacgatgaatggggcaacctgctgaatgaagagaacccgcatcagctgcagcagcttatccgcctgccggggcagcagtatgatgaggagtccggcttgtattacaaccgccaccgctattatgacccgctgcaggggaggtatatcactcaggatccgattgggctgaaggggggatggaatttttatcagtatccgctgaatccggttcagtatatagattcaatgggactggcatcaaaatatggacacttaaataatggcggatatggagcgagacccaacaaaccgcctacgcccgatccaagtaaattgccggacatagcgaaacaattaagactgccatatcctattgaccaggccagtagtgcgcataatgttttcaaaacattcttcagagcattaagcccttacgactacacactgtattgcaggaagtgggtaaaaccaaatctgacttgtacgccacaggatgattcccagtatccagggatggatacaaagacagcaagtgattacctgccacagacaaattgccggtaccgagctcgattgtatcatgtactactggggttgttccatgagttgtttgccagtgggtatttgcgtggccacctgacattagccatcgcagaactggaaagtggtgatgaccactccgctcaggcggtgcatacgaccgttagccagagtctggaaaaagccattggtgctggtgaattgtcgccgcgtgaccaggcgctggtgaccgatatgtgggaaaacctgtttcagcaggcgtcacagcagtcggataaggcgttcacgccgcatccggcaaacactgcgagagcagattaccccgccttaaccgctttacccttcaacaatttccgcacccataaccgattcgggtttaacgccgccagcgtactggcatccatcggaatcg

SEQ ID NO: 10703 - DNA, 815 bp, Homo sapiens
  SIMILAR (809)..(585): 531254mologous to Escherichia coli K12 putative enzyme,accession number AE000280,Smith-Waterman Score=169.
atgatcgcggagtttgaatcacgcattctggcattaatcgacggtatggttgaccatgccagtgatgatgagttgtttgccagtgggtatttgcgtggccacctgacagtagccatcgcagaactggaaagtggtgatgaccactccgctcaggcggtgcatacgaccgttagccagagtctggaaaaagccattggtgctggcgctggtgaccgatatgtgggaaaacctgtttcagcaggcgtcacagcagtaagttgcggcgtctggagcagcatgcctgatgcgacgcttatcgcgtcttatcaggcctacacgtcacacgcctacattggtgccggatcggtagaccggataaggcgtttcagcgccgcatccggcaagtggttaaacccgctcaaacaccgtcgcaatagcctgacccagaccgatacacatcgtcgccagaccaatactgaacgtctttgcgttccatcagattcagcagcgtggtgcatggaccgcaatgctgtgccggtactcagcgttggtgtatatcgaaaaatatacgggcaatgcaccgaagttaacggcgtttgatcagccagcagcaccgtgttctcatcaccatcaataaccagcgtttccagcaccagttcaccttcattgacagttgatctttcactgccatagatgctccagcggtgaacggcgatggtaagcacgcccatcgaaaagacggtatcaaaggctttcagtgccggaagtttggttcccaaattaacctttaaaaaccgggggttaaacccaaaaattgacgatagccggtccagcat

SEQ ID NO: 10704 - DNA, 5976 bp, Homo sapiens; identical to SEQ ID NO: 5415
  SIMILAR (1957)..(5781): 971254mologous to Homo sapiens putative p150,accession number U93563,Smith-Waterman Score=6519.
  misc_feature (1)...(5976): n = a,t,c or g

SEQ ID NO: 10705 - DNA, 1758 bp, Homo sapiens
  SIMILAR (100)..(1581): 881254mologous to Homo sapiens putative p150,accession number U93564,Smith-Waterman Score=2244.
atgattcctccgctgctgatacccaggcaaacagggtctggagaggacctccagcaaactccaacagaccttcacctgagggtcctgactgtcagaaggaaaactaacaaacagaaaggacatccacaccaaaaccccatctgtacgtcaccatcatcaaagaccaaagtgttggaagttctggccagggcattcaggcaggagaaggaaataaagggtattcaagtaggaaaagaggaagtcaaattgtccctgtttgcagatgacatgattgtatatctagaaaaccccatcgtctcagcccaaaatctccttaagctgataagcaatttcagcaaagtctcaggatacaaaatcaatgtgcaaaaatcacaagcattcttatataccaataacagacaaacagagagccaaatcatgactgaactcccatttacaactgcttcaaagagaataaaatacctaggaatccaacttacaagggatgtgaaggacctcttcaaggagaactacaaaccactgctcaacgaaataaaagaggatacaaacaaatggaagaacattccatgctcatgggtaggaagaatcaatattgtgaaaatggccatactgcccaaggtaatttatagattcaatgccatccccatcaagctaccaatgactttcttcatagaattggaaaaaactactttaaagttcatatggaaccaaaaaagagcccgcatcgccaagtcaatcctaagccaaaagaacaaagctggaggcatcacgctacctgacttcaaactatactacaaggctacagtaaccaaaacagcatggtactggtaccaaaacagagatatagaccaatggaacagaacagagccctcagaaataatgctccatatctacaactatctgatctttgacaaacctgagaaaaacaagcaatggggaaaggattccctatttaatatatggtgctgggaaaactggctagccatatgtagaaagctgaaactggatcccttccttacaccttatacaaaaattaattcaagatggattaaagacttaaatgttagatctaaaaccataaaaaccctagaagaaaacctaggcaataccattcaggacataggcatgggcaaggacttcatgtctaaaacaccaaaagcaatggcaacaaaagccaaaattgacaaatgggatctaattaaactaaagagcttctgcacagcaaaagagactaccatcagcgtgaacaggcaacctacagaatgggagaaaatttttgcaatctactcatctgacaaagggctaatatccagaatctacaatgaactcaaacaaatttacaagaaaaaaacaaacaaccccatcaaaaagtgggtgaaggatacgaacagacacttctcaaaagaagacatttatgcagccaaaagacacatgacaaaatgctcatcatcactggctgttagagaaatgcaaatcaaaaccacaatgagataccatctcacaccagttgaagaggtgagggcgggtgagatggccaagacaagaagatgccaaaatgtcaaaggtgccagtgaggaaggcatcagagctcttgctttgtttctcattaacctcactgtccatatggagggcaaccacattgatggagacattgaaattcaaaccaatagaagtcccttgcaagcccctggagaaatctgtgagtcttttactgctttgatggcaatgcaactgctcagtaaattgttttggagttga

SEQ ID NO: 10706 - DNA, 1692 bp, Homo sapiens
  SIMILAR (645)..(4): 871254mologous to Homo sapiens putative p150,accession number U93563,Smith-Waterman Score=1004.
ttagtagattgtggatattagccctttgtcagatgggtagattgcaaaaattttctcccattctgtaggttgcatgttcactctgatggtagtttctttcgctgtgcagaagctctttagattatttagatcccatttgtcaattttggcttttgttgccattgcttttggtgttttagacatgaagtccttgcccatgcctatgtcctgaatggtattgcctaggtttccctctagggtttttatggttttaggtctgacatttaagtctttaatccatcttgaattaatttttgtataagatgtaaggaagggatccagtttcagctttctacatatggctagccagttttccaagcaccatttattaaatagggagtactttccccatttcttgtttttgtcaggtttgtcaaagatcagattgttgtagatgcgtggtattatttttgagggctctgttctgttccattggtctatatctatgttttggtaccagtaccatgctgttttggttactgtagccttgtagtatagtttgaagtcaggtagtgtgatgcctccagctttgttcttttggcttaggattgtcttggcaatacaggctcttttatggttccaaatgaaccataaaagtagttttttccaattcttgggcagtatggccattttcacgatattgattcttcctatccatgagcatggaatgttcttccatttgtttgcatcctcttttatttcgttgagcagtgatttgtagttctccttgaagaggtccttcacatcccttgtaagttggattcctaggtattttattctctttgaagcaattgtgaatgggagttcactcatgatttggctctctgtttgtctgttattggtgtataggaatgcttgtgatttttgcacattgattttgtatcctgagactttgctgaagttgcttatcagcagctcctccttgtacctctggtagaattcggctgtgaatccgtctggtgctggactttttttggttggtaggcttttaattattgcctcaatttcagagcctgttattggtctattcacggattcaacttcttcctggttaagtcttgggagggtgtatgtgtccaggaatttatccatttcttctagattttctagtttatttgcatagagttgtttatagtattctctgatggtagtttgtatctctttggtgtttgatgatggtgatgtacagatgaggttttggtgtggatgtcctttctgtttgttagttttccttctaacagtcaggaccctcagctgcaggtctgttggagtttgctggaggtccactccagaccctgtttgcctgggtatcaccaggagaggctgtagaactgcagatactgcagaacagcaaatgttgctgcctgatcgtttctctgaaagcttcatctcagaggggcacccagctgtatgagttgtcagttggcccctactgggcggtgcctcccagttaggcttctcgggggtcagggacccacttgaggaggcagtctgtccattctcagatctcagactccatgctggcagaaccactactctcttcaaagctgtcagacagggatgtttaagtctgcagaagtttctgctgccttttgttgagctatgcccttgtcctctcaggtgccaccagacttccctgtatttcctcaccat

SEQ ID NO: 10707 - DNA, 2523 bp, Homo sapiens
  SIMILAR (1209)..(4): 871254mologous to Homo sapiens putative p150,accession number U93574,Smith-Waterman Score=1845.
ttagccctttgtcagatgagtaggttgcgaaattttctcccatgttgtaggttgcctgttcactctgatggtagtttcttttgctgtgcagaagctctttagtttaattagatcccatttgtcaattttgtcttttgttgccattgcttttggtgttttggacatgaagtccttgcccacgcctatgtcctgaatggtaatgcctaggttttcttctagggtttttatggttttaggtttaacgtttaaatctttaatccatcttgaattgatttttgtataaggtgtaaggaagggatccagtttcagctttctacatatggctagccagttttcccagcaccatttattaaatagggaatcctttccccattgcttgtttttctcaggtttgtcaaatatcagatagttgtagatatgcggcattatttctgagggctctgttctgttccattgatctatatctctgttttggtaccagtaccatgctgttttggttactgtagccttgtagtatagtttgaagtcaggtagtgtgatgcctccagctttgttcttttgtcttaggattgacttggcaatgcgggctcttttttggttccacatgaactttaaagtagttttttccaattctgtgaagaaagtcattggtagcttgatggggatggcattgaatctgtaaattaccttgggcagtatggccattttcacgatattgattcttcctacccatgagcatggaatgttcttccatttgtttgtgtcctcttttatttccttgagcagtggtttgtagttctccttgaagaggtccttcacatcccttgtaagttggattcctaggtattttattctctttgaagcaattgtgaatgggagttcacccatgatttggctctctgtttgtctgttgttggtgtataagaatgcttgtgatttttgtacattgattttgtatcctgagactttgctgaagttgcttatcagcttaaggagattttgggctgagacgatggggttttctagataaacaatcatgtcgtcttgccaaacagggacaatttgacttcctcttttcctaatgaatacccttatttccttctcctgcctgatgcccctggccagaacttccaacactatgttaataggagcggggagagagggcatccttgtcttgtgccagttctcaaagggaatgcttccagtttttgcccattcagtatgatattggcagccttgcatcccagggatgaagcccacttgatcatggtggataagctttttgatgtgctgctggattcggtttgccagtattttattgaggatttttgcatcaatgttcatcaaggatattggtctaaaattctcttttttggttgtgtctctgcccggctttggtatcagaatgatgctggcctcataaaatgagttagggaggattccctctttttctattgattggaatagtttcagaaggaatggtaccagttcctccttgtacctctggtagaattcggctgtgaatccatctggtcctggactctttttggttggtaaactattgattattgccacaatttcagagcctgttattggtctattcagagattcaacttcttcctggtttagtcttgggagagtgtatgtgtcgaggaatgtatccatttcttctagattttctagtttatttgcgtagaggtgtttgtagtattctctgatggtagtttgtatttctgtgggatcggtggtgatatcccctttatcattttttattgtgtctatttgattcttctctctttttttctttattagtcttgctagcggtctatcaattttgttgatcctttcaaaaaaccagctcctggattcattgattttttgaagggttttttgtgtctctatttccttcagttctgctctgattttagttatttcttgccttctgctagcttttgaatgtgtttgctcttgcttttctagttcttttaattgtgatgttagggtgtcaattttggatctttcctgctttctcttgtaggcatttagtgctataaatttccctctacacactgctttgaatgcatcccagagattctggtatgtggtgtctttgttctcgttggtttcaaagaacatctttatttctgccttcatttcgttatgtacccagtagtcattcaggagcaggttgttcagtttccatgtagttgagcggctttgagtgagattcttaatcctgagttctagtttgattgcactgtggtctgagagatagtttgttataatttctgttcttttacatttgctgaggagagctttacttccaactatgtggtcaattttggaataggtgtggtgtggtgctgaaaaaaatgtatattctgttgatttggggtggagagttctgtagatgtctattaggtctgcttggtgcagagctgagttcaattcctgggtatccttgttgactttctgtctcgttgatctgtctaatgttgacagtggggtgttaaagtctcccat

SEQ ID NO: 10708 - DNA, 2880 bp, Homo sapiens; identical to SEQ ID NO: 10215
  SIMILAR (1168)..(2478): 851254mologous to Homo sapiens putative p150,accession number U93565,Smith-Waterman Score=1954.

SEQ ID NO: 10709 - DNA, 1842 bp, Homo sapiens; identical to SEQ ID NO: 555
  SIMILAR (1730)..(1837): 881254mologous to Homo sapiens putative p150,accession number U93572,Smith-Waterman Score=164.

SEQ ID NO: 10710 - DNA, 3543 bp, Homo sapiens; identical to SEQ ID NO: 3976
  SIMILAR (1447)..(3276): 981254mologous to Homo sapiens putative p150,accession number U93574,Smith-Waterman Score=3162.

SEQ ID NO: 10711 - DNA, 2871 bp, Homo sapiens
  SIMILAR (152)..(973): 391254mologous to Rattus norvegicus ribosomal protein S2,accession number U92697,Smith-Waterman Score=274.
tcattggtctgtatctctgttttggtaccagtaccatgctgttttggttactgtagccttggagtatagtttgaagtcaggtagcgtgatgcctccagctttgttcttttggcttaggattgacttggcaatgtgggctcttttttggttccatacgaactttaaagtagttttttccaattctgtgaagaaagtcattggtagcttgatggggatggcactgaatctataaattatcttgggcagtatggccattttcacgatattgattcttcctatccatgagcatggaatgttcttccatttgtttgtgtcctcttttatttcattgagcagtggtttgtagttctccttgaagaggtccttcacgtcccttgtaagttggattcctaggtattttattctctttgaatcaattgtgaatgggagttcactcatgatttggctctccgtttgtctgttattggtgtataagaatgcttgtgatttttgcacattgattttgtatcctgagactttgctgaagttgcttatcagcttaaggagatttggggctgagacgatggggttttctagatatacaatcatgtcatctgcaaacacggacaatttgacttcctcttttcctaattgaataccctttatttctttctcctgcttgactgccctggccagaacttccaacactatgtggaataggagtggtgagagagggcatccctgtcttgtgccagttttcaaagggaatgcttccagtttttgcccattcactatgatattggctgtgggtttttcataaatagctcttattattttgagatacatcccatcaatacctaatctattgagagtttttagcatgaagggctgttgaattttgtcaaaggccttttctgcatctattgagataatcatgtggtttttgtctttggttctgtttatatgctggattacatttattgatttgcgtatgttgaaccagccttgcatcccagggatgaagccttcttgtccatggtggataagctttttgatgtgctgctggattcggtttgccagtattttattgaggatttttgcatcgatgttcatcaaggatattggtctaaaattctcttttttggttgtgtctctgccaggctttggtatcaggatgctgctggactcataaaatgagttagggaggattccctctttttctattgattggaatagtttcagaaggaatggtaccagctcctccttgtacctctggtagaattcggctgtgaatccgtctggtcctggactttttttggttggtaagctattaattattgcctcaatttcagagcctgttattgatctattcagagattcaacttcttcctggtttagtcttgggagggtgtatgtgtcgaggaatttgtccatttcttctagattttctagtttatttgcgtagaggtgtttatagtattctctgatggtagttttgtattttagcagtctatcgattttgttgatcttttcaaaaaaccagctcctggattcattgattttttgaagggttttttgtgtctctatttccttcagttctgctctgatcttagttatttcttgccttctgctagcttttgaatgtgtttgctcttgctgctctagttcttttaattgtgatgttagggtgtcaattttagatccttcctgctttctcttgtgggcatttagtgctgcaaatttccctctacacactgcttttaatgtgtcccagagattctggtatgttgtgtctttgttctcgttggtttcaaagaacatctttatttctgccttcatttcgttatgcacccagtagtcattcaggagaaggttgttcagtttccatgtagttgagtggttttgagtgagtttcttaatcctgagttctagtttgattgcactgtggtctgagagaatcatcttcatatttaagtgaatatctgtgatttttacttgtacattttttattacttgagttgccaatttttccacaaatgtatcctttttggcttcttttggcttatctttttctgctgctttttgaagggcttcttcaattcgggatagctctttctgtttaacatcctgcaaggatttttcttcttttacagcatcatacttaatacttgctccagggacaacaagcaggtataatccttccagggtcgcaacaactgcttctccataaaggttcttccaaggaatcttcaaagttaatttatttgtgggaactaaaattaaaacaactgaactcatggagacagagagtagaacaatggttaccagaagcttaattggactgccttcattattcattatctctgcttcaacaacgtgcaattcatcctttgcaccagctcctgaactggtggttcttaaagataactggcgctcatttgtatcattatccatctgaaagtgacaacctttgtcaccctttagctcgcaactgagaagatagttctgggccttaggaggcttaagtacatgtccatcaaatcttccatagggtggcggcacacacctcagtacataaaaataagctgctttggccacacatgagtacatcactttattaataaccaaataacattctagttctatgaatttcaacacatgtattgcagtggtctggatctgtgtccccgccgaaatctcataccaaattgtaatccccagtgttggaggtggggcttggtgggaggtgactgggtgataggggtggtttctcatgaacattttagcactatccctcttggtgctctcatgatagtgagttcccataagctccggttgtctaaagtgtgtagcacctccctgctctctctttcttcttcctgctccagccat

SEQ ID NO: 10712 - DNA, 2652 bp, Homo sapiens
  SIMILAR (657)..(1229): 941254mologous to Escherichia coli K12 putative synthetase,accession number AE000181,Smith-Waterman Score=932.
ctaccatgctgttttggttactgtagccttgtagtatagtttgaagtcaggtagtgtgatgcctccagctttgttcttttggctcaggattgacttggcaatgcgggctcttttttggttccatatgaactttaaagtagttttttccaattctgtgaagaaagtcattggtagcttgatggggatggcattgaatctgtaaattaccttgggcagtatggccattttcacgatattgattcttcctacccatgagcatggaatgttcttccatttgtttgtgtcctcttttatttccttgagcagtagtttgtagttctccttgaagaggtccttcacatcccttgtaagttggattcctaggtattttattctctttgaagcaattgtgaatgggagttcactcacgatttggctctctgtttgtctgttgttggtgtataagaatgcttgtgatttttgtacattgattttgtatcctgagactttgctgaagttgcttatcagcttaaggagattttgagctgagacaatggggttttgtagatatacggtcatgtcgtctgcaaacagggacaatttgacttcctcttttcctaattgaatactctttatttccttctcctgcctaattgtcctggccagaatttccaacaatttattgatttgcgtatattgaaccagcccttgcatcccagggatgaagcccacttgatcatggtggataagctttttgatgtgctgctggattcggtttgccagtattttattgaggatttttgcatcaatgttcatcaaggatattggtctaaaattctcttttttggttgtgtttctgcccggctttggtatcaggatgatgctggcctcataaaatgagttaggaaggattccctctttttctattgattggaatagtttcagaaggaatggtaccagttcctccttgtacctctggtagaatttggctgtgaatccatctggtcctggactctttttcgttggtaagctattgattattgccacaatttcagctcctgttattggtctattcagagattcaacttcttcctggtttagtcttgggagagtgtatgtgtcgaggaatttatccatttcttctagattttctggtttatttgcgtagacgtgtttgtagtattctctgatggtagtttgtatttctgtgggattggtggtgatatcccttttatcattttttattgcatctatttgattcttctctctttttttctttattagtcttgctagcggtctatcaattttgttgatcctttcaaaaaaccagctcctggattcgttaattttttgaagggttttttgtgtctctatttccttcagttctgctctgattttagttatttcttgccttctgctagcttttgaatgtgtttgcttttgcttttctagttcttttaattgtgatgttagggtgtcaattttggatctttcctgctttctcttgtgggcatttagtgctataaatttccctctacacactgctttgaatgtgtcccagagattctggtatgttgtgtctttgttctcgttggtttcaaagaacatctttatttctgccttcatttcgttatgtacccagtagtcattcaggagcaggttgttcagtttccatgtagttgagcggttttgagtgagattcttaatcctgagttctagtttgattgcactgtggtctgagagatagtttgttataatttctgttcttttacatttgctgaggagagctttacttccaactatgtggccaattttggaataggtgtggtgtggtgctgaaaaaaacgtatattctgttgatttggggtggagagttctgtagatgtctattaggtccgcttggtggagagctgagttcaattcctgggtattcttgttgactttctgtctcgttgatctgtctttctctctggctgcccttaacattttttccttcatttcaactttggtgaatctgacaattatgtgtcttggtgttgctcttctcgaggagtatctttgtggcattctctgtatttcctgaatctgaatgttggcctgccttgctagattggggaagttctcctggataatatcctgtagagtgttttccaacttggttccattctccccatcactttcaggtacaccagtcagacgtagatttggtcttttcacatagtcccatatttcttggaggctttgctcatttctttttattcttttttctctaaacttcccttctcgcttcatttcattcatttcatcttccatcgctgataccctttcttccagttgattgcatcggctcctgaggcttctgcattcttcacgtagttcttgagccttggctttcagctccatcagctcctttaagcacttctctgtattggttattgtagttatacattcttctaaatttttttcaaagttttcaacttctttgcctttggtttgaatgtcctcccgtagctcagagtaatttgatcgtctgaagccttcttctctcagctcgtcaaagtcattctccgtccagctttgttccgttgctggtgaggaactgtgttcctttggaggaggagaggtgctctgctttttagagtttgcagtttttctgctctgttttttccccat

SEQ ID NO: 10713 - DNA, 2358 bp, Homo sapiens
  SIMILAR (84)..(530): 511254mologous to Homo sapiens peptidylprolyl isomerase,accession number X52851,Smith-Waterman Score=266.
atgtgggaaagtttggaacttcacggagacttgttgaatgattttgaccaaaatgctaatagtgatatgggtagtgaagtccaggctgagttgagctcagatagaaatgagaaagttattgggaactacagtaaaggtcactcttgctattctttagctaaaagactgatagcattgtgcccttgctgtagagatctatggaactttgaacttgagagagatgatttaaggtatctggcagaagaaatttctaagcagcaaagcactcaagatgtggtctggctgctcctcacagcgtacagtcgtatgtgttcacaaagagatggtctgaaattggaacttatgtttaaaagggaaacagagcataaaagtttggaaaatttgcagcctgaccatgtggttgaaaaaaaaaaagagccattttctggggacaaattcaagctggctgcagaaatttgcataagtaaagacaaaccaaatgttaacagccaagacaatggggaaaatgtctccagggcatgcctggaggcctacgagggaaaaaaggttttgtgggccatgcccagggccctgctgctctgtgccactttgggacatgatgccctgcaacccagcccctccagctccagccatggcaaaaaggagccaagatacagcttgggctgttgcttcggagggtgcaaggcccaggctttggcagcttccacctccttcaatcctatcaccaacaggcacctaaggttgtttgagctggccaaggactatatgaatggaacaggaagatatagagttgtcaaacacatgatctttcctgttggtgatgcttataagaagaaaggactcattcctgcccatcaccaggtcatcatagccgaacttgccaccaagaattccaaactaaaccaggaagacattgaatccctgaacagaccaataacaggttctgaaattgaggcaataattaatagcctaccaaccaaaaaaagtccaggaccagatggattcacagccgatttctaccagaggtacaaacaggagctagtaccattccttctgaaactattccaatcaatagaaaaagagggaatcctccctaattcatttgatgaggccagcatcatcctgataccaaagcctggcagagacacaacaaaaaaagagaattttagaccaatatccctgatgaacattgatgcaaaaattctggcaaaccaaatccagcagcagatcaaaaagtttatccaccacgatcaagttggcttcatccctgggatgcaaggctggttcaacatacacaaatcaataaatgtaatccagcatataaacagaaccaaagacaaaaaccacacgattatctcaacagatgcagaaaaggccttcgacaaaattcaacagcccttcatgctaaaaactctgaataaactaggtattgatgggacgtatctcaaaataataagagctatttatgatgaacccacagccaatatcatactgaatgggcaaaaactggaagcattccctttgaaaactggcacaagacagggatgtcctctctcaccactcctattcaacatagtattggaagttctggccagggcaatcaagcaggataaagaaatacaggatattcagttaggaaaagaagtcaaattgtccctatttgcagatgtcatgattgtatatttagaaaactccatcgtctcagtccaaaatctccttaagctgataagtaacttcagcgaagtctcaggatacaaaatcaatgtgcaaaaatcacaagcattcctctacaccaataaaagacaaagagagagccaaatcatgagtgaactcccattcacaattgcttcaaagagaataaaatacctaggaatccaacttacaagggatgtgaaggacctcttcaaggagaactacaaaccactgctcaatgaaataaaagaggacacaaacaaatggaagaacattccatgctcatggattggaagaatcaatatcgtgaaaatggccatactgcccaagataatttatgcagccaaaaaacacatgaaaaaatgctcatcatcactggccatcagagaaatgcaaatcaaaaccacaatgagataccatctcacaccagttagaatggcgatcattaaaaagtcaggaaacaacagaagtacccgtggcctgctcagctgtgactctgctgacctcaggacctcactggtcaaggaagaagtatcagaccatgatacgattgtgatccctgggaaggaaggaaagaaggaaggaaggaaggaaggaaaagggaaggatggagaaggggagagagggaggaaggaaggaaggcccttgactgtaatgcatttctga

SEQ ID NO: 10714 - DNA, 1686 bp, Homo sapiens
  SIMILAR (1)..(819): 881254mologous to Homo sapiens laminin-binding protein,accession number J03799,Smith-Waterman Score=1259.
atgtcccagggctattccatccaccttgctccagcagcagggtctggggacgagtcagcttctttggaaggccttcatgaaatacaaactgccatcagagaatactacaaacacctctacgcaaataaactagaaaatctagaagaaatggatacattcctcgacacatacactctcccaagactaaaccaggaagaagttgaatctctgaatagaccaataacaggctctgaaattgtggcaataatcaatagtttaccaaccaaaaagagtccaggaccagatggattcacagccgaattctaccagaggtacaaggaggaactgcatataaacagagccaaagacaaaaaccacatgattatctcaatagatgcagaaaaagcctttgacaaaattcaacaacccttcatgctaaaaactctcaataaattaggtattgatgggacgtatttcaaaataataagagctatctatgacaaacccacagccaatattatactgaatgggcaaaaactggaagcattccctttgaaaactggcacaagacagggatgccctctctcaccactcctattcaacatagggttggaagttctggccagggcaatcaggcaggagaaggaaataaagggtattcaattaggaaaagagaaagtcaaattgtccctgtttgcagacgacatgattgtttatctagaaaaccccatcgtctcagcccaaaatctccttaagctgataagcaacttcagcaaagtctcaggatacaaaatcaatgtacaaaaatcacaagcattcttatacaccaacaacagacaaacagagagccaaatcatgagtgaactcccattcacaattgcttcaaagagaataaaatacctaggaatccaacttacaagggatgtgaaggacctcttcaaggagaactacaaaccactgctcaaggaaataaaagaggacacaaacaaatggaagaacattccatgctcatgggtaggaagaatcagtatcgtgaaaatggccatactgcccaaggtaatttacagattcaatgccatccccatcaagctaccaatgactttcttcacagaattggaaaaaactactttaaagttcatatggaaccaaaagagagcccgcatcgccaagtcaatcctaagccaaaagaacaaagctggaggcatcacactacctgacttcaaactatactacaaggctacagtaaccaaaacagcatggtgctggtaccaaaacagagatatagatcaatggaacggaacagagccctcagaaataatgccgcatatctacaactatctgatctttgacaaacctgagaaaaacaagcaatggggaaaggattccctatttaataaatggtgctgggaaaactggctagcgatatgtagaaagctgaaactggatcccttccttacaccttatacaaaaatcaattcaagatggattaaagatttaaacgttagacctaaaaccataaaaaccctagaagaaaacctaggcattaccattcaggacataggcgtgggcaaggacttcatgtccaaaacaccaaaagcaatggcaacaaaagccaaaattgacaaatgggatctaattaaactaaagagcttctgcacagcaaaagaaactaccgtcagagtgaacaggcaacctacaacatggtag

SEQ ID NO: 10715 - DNA, 3154 bp, Homo sapiens
  SIMILAR (398)..(1120): 651254mologous to Homo sapiens laminin-binding protein,accession number J03799,Smith-Waterman Score=675.
atgggagactttaacaccccactgtcaacattaggcagatcaacgagacagaaagtcaacaaggatacccaggaattgaactcggctctgcaccaggcggacctaatagacatctacggaactctccaccccaaatcaacagaatatacatttttttcagcaccacaccacacctattccaaaattgaccacatagttggaagtaaagctctcctcagcaaatgtaaaagaacagaaattataacaaactgtctctcagaccacagggcaatcaaactagaactcaggattaagaaactcactcaaaaccgctcaactacatggaaactgaacaacctgctcctgaatgactactgggtacataacgaaatgaaggcagaaataaagatgttctttgaaaccaacgagaacaaagacacaacataccagaatctctgggacacattcaaagcagtgtgtagagggaaatttatagcactaaatgcccacaagagaaagcaggaaagatccaaaattgacaccctaacatcacaattaaaagaactagaaaagcaagagcaaacacattcaaaagctagcagaaggcaagaaataactaaaatcagagcagaactgaaggaaatagagacacaaaaaacccttcaaaaaattaatgaatccaggagctggttttttgaaaggatcaacaaaattgatagaccgctagcaagactaataaaggaaaaaagagagaagaatcaaatagacgcaacaaaaaatgataaaggggatatcaccactgatcccacagaaatacaaactaccatcagagaatactacaaaaccctctacgcaaataaactagaaaatctagaagaaatggataaattgctggacacatacactctcccaagactaaaccaggaagaagttgaatctctgaacagaccaataacaggatctgaagttgtggcaataattaatagcttaccaaccaaaaacagtccaggaccagatggattcacagccaaatactaccagaggtacaaggaagaactggtaccattccttctgaaactattccaatcaacagaaaaagagggaatcctccctaactcattttatgaggccagcatcatcctgataccaaagcctggcagagacacaaccaaaaaagagaattttagaccaatatccttgatgaacgttgatgcaaaaatcctcaataaaatactggcaaaccgaatccagcagcacatcaaaaagcttatccaccatgatcaagtgggcttcatccctgggatgcaaggctggttcaatatatgcaaatcaatcaatgtaatccagcatataaacagaaccaaagacaaaaaccacatgattatctcaatagatgcagaaaaggcctttgacaaaattcaacaacccttcatgctaaaaactctcaataaattagtgttggaagttctggccagggcaattaggcaggagaaggaaataaagggcattcaattaggaaaagaggaagtcaaattgtccctgtttgcagatgacatgattgtatatttagaaaaccccatcatctcagcccaaaatctccttaagctgataagcaacttcagcaaagtctcaggatacaaaatcaatgtgcaaaaatcacaagcattcttatacaccaataacagacaaacagagagccaaatcatgagtgaactcccattcacaattgcttcaaagagaataaaatacctaggaatccaacttacaagggatgtgaaggacctcttcaaggagaactacaaaccactgctcaatgaaataaaagaggatacaaacaaatggaagaacattccatgctcatggataggaagaatcaatatcgtgaaaatggccatactgcccaaggtaatttatagattcaatgccatccccatcaagctaccaatgactttcttcacagaattggaaaaaactactttaaagttcatatggaaccaaaaaagagcccgcatcaccaagtcaatcctaagccaaaagaacaaagctggaggcatcacgctacctgacctcaaactatactacaaggctatagtaactcaaaacagcatggtactgctaccaaaacagagatatagaccaatggaacagaacagagccctcagaaataatgctgcatatctacaactatctgatctttgacaaacctgagaaaaacaagcaatggggaaaggattccctatttaataaatggtgctgggaaaactggctagccatatgtagaaagctgaaactggatcccttccttacaccttatacaaaaatcaattcaagatggattaaagatttaaacgttagacctaaaaccataaaaaccctagaagaaaacctaggcattaccattgaggacataggcgtgggcaaggacttcatgtccaaaacaccaaaagcaatggcaacaaaagccaaaattgacaaatgggatctaattaaactaaagagcttctgcacagcaaaagaaactaccatcagagtgaacaggcaacctacaaaatgggagaaaattttcgcaacctactcatctgacaaagggctaatatccagaatctacaatgaactcaaacaaatttacaagaaaaaaacaaacaaccccatcaaaaagtgggcgaaggacatgaacagacacttctcaaaagaagacatttatgcagccaaaaaacacatgaagaaatgctcatcatcactggccatcagagaaatgcaaatcaaaaccactatgagatatcatctcacaccagttagaatggcaatcattaaaaagtcaggaaacaacagcttgcaggtggcctattgtgggatctcaccttatgatcatagctttgtcttggatgcgaccagtaagaaactcctgtgggagatttggatggcagagaagtgtgtattggggcagtggcctgctgacatgcagagtttggaacctaaagggtttttagtagcctttagcagttcaccaatagataccggaggctgctgtgacctgtggggaagtttccttgagtttctgacctgcctggaggcaatgtctaatccctcggtagccattagagaagctgaggccagcagtgactggccttcctcaacctcaggactcctttccgtcactttcataagcacatag

SEQ ID NO: 10716 - DNA, 5712 bp, Homo sapiens
  SIMILAR (123)..(989): 1001254mologous to Homo sapiens C protein,accession number M16342,Smith-Waterman Score=1465.
atggtaaagggatcaattcaacaagaggagctaactatcctaaatatttatgcacccaatacaggagcacccagattcataaagcaagtcctgagtgacctacaaagagacttagactcccacacattaataatggaagactttaacaccccactgtcaacattagacagatcaacgagacagaaagtcaacaagaatacccaggaattgaactcagctctgcaccaagcagacctaatagacatctacagaactctccaccccaaatcaacagaatatacatttttttcagcaccacaccacacctattccaaaattgaccacatagttggaagtaaagctctcctcagcaaatgtaaaagaacagaaattataacaaactatctctcagaccacagtgcaatcaaactagaactcaggattaagaatctcactcaaagccgctcaactacatggaaactgaacaacctgctcctgaatgactactgggtacataacgaaatgaaggcagaaataaagatgttctttgaaaccaacgagaacaaagacaccacataccagaatctctgggacgcattcaaagcagtgtgtagagggaaatttatagcactaaatgcctacaagagaaagcaggaaagatccaaaattgacaccctaacatcacaattaaaagaactagaaaagcaagagcaaacacattcaaaagctagcagaaggcaagaaataactaaaatcagagcagaactgaaggaaatagagacacaaaaaacccttcaaaaaatcaatgaatccaggagctggttttttgaaaggatcaacaaaattgatagaccgctagcaagactaataaagaaaaaaagagagaagaatcaaatagacacaataaaaaatgataaaggggatatcaccaccgatcccacagaaatacaaactaccatcagagaatcctacaaacacctctacgcaaataaactagaaaatctagaagaaatggatacattcctggacacatacactctcccaagactaaaccaggaagaagttgaatctctgaatagaccaataacaggctctgaaattgtggcaataatcaatagtttaccaaccaaaaagagtccaggaccagatggattcacagccgaattctaccagagagctatctatgacaaacccacagacaatatcatactgaatgggcaaaaactgcaagcattccctttgaaaactggcacaagacagggatgccctctctcaccactcctattcaacatagtgttggaagttctggccagggcaatcagccaggagaaggaaataaagggtattcaattaggaaaagaggaagtcaaattgtccctgtttgcagacgacatgattgtttatctagaaaaccccatcgtctcagcccaaaatctccttaagctgataagcaacttcagcaaagtctcaggatacaaaatcaatgtacaaaaatcacaagcattcttatacaccaacaacagacaaacagagagccaaatcatgagtgaactcccattcacaattgcttcaaagagaataaaatacctaggaatccaacttacaagggatgtgaaggacctcttcaaggagaactacaaaccactgctcaaggaaataaaagaggacacaaacaaatggaagaacattccatgctcatgggtaggaagaatcaatatcgtgaaaatggccatactgcccaaggtaatttacagattcaatgccatccccatcaagctaccaatgactttcttcacagaattggaaaaaactactttaaagttcatatggaaccaaaaaagagcccgcatcgccaagtcaatcctaagccaaaagaacaaagctggaggcatcacactacctgacttcaaactatactacaaggctacagtaaccaaaacagcatggtactggtaccaaaacagagatatagatcaatggaacagaacagagccctcagaaataatgccgcatatctacaactatctgatctttgacaaacctgagaaaaacaagcaatggggaaaggattccctatttaataaatggtgctgggaaaactggctagccatatgtagaaagctgaaactggatcccttccttacaccttatacaaaaatcaattcaagatggattaaagatttaaacgttagacctaaaaccataaaaaccctagaagaaaacctaggcattaccattgaggacataggcgtgggcaaggacttcatgtccaaaacaccaaaagcaatggcaacaaaagccaaaattgacaaatgggatctaattaaactaaagagcttctgcacagcaaaagaaactaccatcagagtgaacaggcaacctacaacatgggagaaaattttcgcaacctactcatctgacaaagggctaatatccagaatctacaatgaactcaaacaaatttacaagaaaaaaacaaacaaccccatcaaaaagtgggcgaaggacatgaacagacacttctcaaaagaagacatttatgcagccaaaaaacacatgaagaaatgctcatcatcactggccatcagagaaatgcaaatcaaaaccactatgagatatcatctcacaccagttagaatggcaatcattaaaaagtcaggaaacaacaggagagacagaacagctgaggaaacagcagaacggtggaaaatttttgaaagtgttttgagcccacccaacctgaggagagcattcaaagaaaaacaggaagaagaagtcggcttcagaaggtgggttataacaaactcctccaagctaaaacagcatgttttaacccaatgcaaggaagctaagaaccttgaaaaaaggttagaggaatttctaactagaataaccagtttagagaagaacataaatgacctaatggacctgaaaaacacagcacgagaacttcttgacgcctacacaagtatcaatagccaaattaatcaagcggaagaaaggttatcagagactgaagatcaacttaatcaaataaagcatgaggacaagattagagggaaaaaaatgaaaaggaacaaacaaagcctccaagaaatatgggactatgtgaaaaggccaaatctacgtctgattggtgtagctgaaagtgacagggagaatggagccaagttagaaaacactcttcagtatattatccaggagaacttccccaacctagcaagacaggccaacactcaaattcaggaaacacagagaccaccacaaagatactccttgagaaaagcaaccccaagacacataattgtcagattcaccaaagttgaaatgaaggaaaaaatgttaagggcagccagagagaaagaaatacaaactaccatcagagaatactacaaacacctctacgcaaataaactagaaaatctagaagaaatggatacattcctcgacacatacactctcccaagactaaaccaggaagaagttgaatctctgaatagaccaataacaggctctgaaattgtggcaataatcaatagtttaccaaccaaaaagagtccaggaccagatggattcacagccgaattctaccagaggtacaaggaggaactggtaccattccttctgaaactattccaatcaatagaaaaagagggaatcctccctaactcattttatgaggccagcatcattctgataccaaagccgggcagagacacaaccaaaaaagagaattttagaccaatatccttgatgaacattgatgcaaaaatcctcaataaaatactggcaaaccgaatccagcagcacatcaaaaagcttatccaccatgatcaagtgggcttcatccctgggatgcaaggctggttcaatatacgcaaatcaataaatgtaatccagcatataaacagagccaaagacaaaaaccacatgattatctcaatagatgcagaaaaagcctttgacaaaattcaacaacccttcatgctaaaaactctcaataaattaggtattgatggtacatatttcaaaataataagagctatctatgacaaacccacagccaatatcatactgaatgggcaaaaactggaagcattccctttgaaaactggcacaagacagggatgccctctctcaccgctcctattcaacatagtgttggaagttctggccagggcaatcaggcaggagaaggaaataaagggtattcaattaggaaaagaggaagtcaaattgtccctgtttgcagacgacatgattgtttatctagaaaaccccattgtctcagcccaaaatctccttaagctgataagcaacttcagcaaagtctcaggatacaaaatcaatgtacaaaaatcacaagcattcttatacacgaacaacagacaaacagagagccaaatcatgggtgaactcccattcacaattgcttcaaagagaataaaatacctaggaatccaacttacaagggatgtgaaggacctcttcaaggagaactacaaaccactgctcaaggaaataaaagaggacacaaacaaatggaagaacattccatgctcatgggtaggaagaatcaatatcgtgaaaatggccatactgcccaaggtaatttacagattcaatgccatccccatcaagctaccaatgactttcttcacagaattggaaaaaactactttaaagttcatatggaaccaaaaaagagcccgcattgccaagtcaatcctaagccaaaagaacaaagctggaggcatcacactacctgacttcaaactatactacaaggctacagtaaccaaaacagcatggtactggtaccaaaacagagatatagatcaatggaacagaacagagccctcagaaataatgccgcatatctacaactatctgatctttgacaaacctgagaaaaacaagcaatggggaaaggattccctatttaataaatggtgctgggaaaactggctagccatatgtagaaagctgaaactggatcccttccttacaccttatacaaaaatcaattcaagatggattaaagatttaaacgttaaacctaaaaccataaaaaccctagaagaaaacctaggcattaccattcaggacataggcgtgggcaaggacttcatgtccaaaacaccaaaagcaatggcaacaaaagacaaaattgacaaatgggatctaattaaactaaagagcttctgcacagcaaaagaaactaccatcagagtgaacaggcaacctacaacatgggagaaaatttttgcaacctactcatctgacaaagggctaatatccagaatctacaatgaactcaaacaaatttacaagaaaaaaacaaacaaccccatcaaaaagtgggcgaaggacatgaacagacacttctcaaaagaagacatttatgcagccaaaaaacacatgaagaaatgctcatcatcactggccatcagagaaatgcaaatcaaaaccactatgagatatcatctcacaccagttagaatggcagtcattaaaaagtcaggaaacaacaggtcacatttcaacatgagatttggagaggacagacacccgaatcacagcaatgggtctcagcaagcagctccatcagctgcctcagacttgtctggaaggtggcagacgtgggcaattcctgccttgctgaagagggatacactgctgagtgaatgctctgaagcagaggagcatttggtgcaactgaagttgtctgaa

SEQ ID NO: 10717 - DNA, 3351 bp, Homo sapiens
  SIMILAR (558)..(1322): 701254mologous to Homo sapiens dJ591C20.5 (KIAA1196),accession number AL118506,Smith-Waterman Score=843.
atggtaaaggaatcaattcaacaagaggagctaactatcctaaatatttatgcacccaatacaggagcacccagattcataaagcaagtcctgagtgacctacaaagagacttagactcccacacattaataatgggagactttaacaccccactgtcaacattagacagagcaacgagacagaaagtcaacaaggatacccaggaattgaactcagctctgcaccaagcggacctaatagacctaatagacctaatctacagaactctccaccccaaatcaacagcaatatacatttttttcagcaccacaccacacctattccaaaattgaccacatagttggaagtaaagctctcctcagcaaatgtaaaagaacagaaattataacaaactatctctcagaccacagtgcaatcaaactagaactcaggattaagaatctcactcaaagccgctcaactacatggaaactgaacaacctgctcctgaatgactactgggtacataacgaaatgaaggcagaaataaagatgttctttgaaaccaacgagaacaaagacaccacataccagaatctctgggacgcattcaaagcagtgtgtagagagaagtttatagcactaaatgcctacaagagaaagcaggaaagatccaaaattgacaccctaacatcacaattaaaagaactagaaaagcaagagcaaacacattcaaaagctagcagaaggcaagaaataactaaaatcagagcagaactgaaggaaatagagacacaaaaaacccttcaaaaaatcaatgaatccaggagctggttttttgaaaggatcaacaaaattgatagaccgctagcaagactaataaagaaaaaaagagagaagaatcaaatagacacaataaaaaatgataaaggggatatcaccaccgatcccacagaaatacaaactaccatcagacaatactacaaacacctctatgcaaataaactagaaaatctagaagaaatggatacattcctcgacacatacactctcccaagactaaaccaggaagaagttgaatctctgaatagaccaataacaggctctgaaattgtggcaataatcaatagtttaccaaccaaaaagagtccaggaccagatggattcacagccgaattctaccagaggtacaaggaggaactgccgggcagagacacaaccaaaaaagagaattttagaccaatatccttgatgaacattgatgcaaaaatcctcaataaaatactggcaaaccgaatccagcagcacatcaaaaagcttatccaccatgatcaagtgggcttcatccctgggatgcaaggctggttcaatatacacaaatcaataaatgtaatccagcatataaacagagccaaagacaaaaaccacatgattatctcaatagatgcagaaaaaaagcctttgacaaaattcaacaacccttcatgctacaaactctcaataaattaggtattgatgggacgtatttcaaaataataagagctatctatgacaaacccacagccaatatcatactgaatgggcaaaaactggaagcattccctttgaaaactggcacaagacagggatgtcctctctcactgctcctattcaacatagtgttggaagttctggccagggcaatcaggcaggagaaggaaataaagggtattcaattaggaaaagaggaagtcaaattgtccctgtttgcagacgacatgattgtttatctagaaaaccccatcatctcagcccaaaatctccttaagctgataagcaacttcagcaaagtctcaggatacaaaatcaatgtacaaaaatcacaaacattcttatacaacaacaacagacaaacagagagccaaatcatgagtgaactcccattcacaattgctttaaagagaataaaatacctaggaatccaacttacaagggatgtgaaggacctcttcaaggagaactacaaaccactgctcaaggaaataaaagaggacacaaacaaatggaagaacattccatgctcatgggtaggaagaatcaatatcgtgaaaatggccatactgcccaaggtaatttacagattcaatgccatccccatcaagctaccaatgactttcttcacagaattggaaaaaactactttaaagttcatatggaaccaaaaaagagcccgcatcgccaagtcaatcctaagccaaaagaacaaagctggaggcatcacactacctgacttcaaactatactacaaggctacagtaaccaaaacagcatggtactggtaccaaaacagagatatagatcaatggaacagaacagagccctcagaaataatgccgcatatctacaactatctgatctttgacaaacctgagaaaaacaagcaatggggaaaggattccctatttaataaatggtgctgggaaaactggctagccatatgtagaaagctgaaactggatcccttccttacacgttatacaaaaatcaattcaagatggattaaagatttaaatgttagacctaaaaccataaaaaccctagaagaaaacctaggcattaccattcaggacataggcgtgggcaaggacttcatgtccaaaacaccaaaagcaatggcagcaaaagccaaaattgacaaatgggatctaattaaactaaagagcttctgcacagcaaaagaaactaccatcagagtgaacaggcaacctacaacatgggagaaaattttcgcaacctactcatctgacaaagggctaatatccagaatctacaatgaactccaacaaatttacaagaaaaaaacaaacaaccccatcaaaaagtgggcgaaggacatgaacagacacttctcaaaagaagacatttatgcagccaaaaaacacatgaaaaaatgctcatcatcactggccatcagagaaatgcaaatcaaaaccactatgagatatcatctcacaccagttagaatggcaatcattaaaaagtcaggaaacaacagaatcagaaggcatttccagccaagatcagccatgttcttctgctgctgccctgggggcgagggctcagggctgcagtgggagctgctgctggcagcatggactgtgctcccctacccctgccctgcagccacagttgggagattcctcaagcaggcacagactgctgaccattccttcctgggccatgtttggagggtgcccagcagcaggagctggactgataaagaaatcctgagcttggtcgtcaacagacagaaccaggaagttgtgcagctcatagggggcctctgtgggacacacaccatctcgcccacacagcacccagccacgggttga

SEQ ID NO: 10718 - DNA, 6042 bp, Homo sapiens
  SIMILAR (1043)..(1660): 971254mologous to Homo sapiens AF-1,accession number U05875,Smith-Waterman Score=1040.
atgacaggatcaaattcacacataacaatattaactttaaatataaatggactaaattctgcaattaaaagacacagactggcaagttggataaagagtcaagacccatcagtgtgctgtattcaggaaacccatctcatgtgcagagacacacataggctcaaaataaaaggatggaggaagatctaccaagcaaatggaaaacaaaaaaaggcaggggttgcaatcctagtctctgataaaacagactttaaaccaacaaagatcaaaagagacaaagaaggccattacataatggtaaagggatcaattcaacaagaggagctaactatcctaaatatttatgcacccaatacaggagcacccagattcataaagcaagtcctgagtgacctacaaagagacttagactcccacacattaataatgggagactttaacaccccactgtcaatattagacagatcaacgagacagaaagtcaacaaggatacccaggaattgaactcagctctgcaccaagcagacctaatagacatctacagaactctccaccccaaatcaacagaatatacatttttttcagcaccacaccacacctattccaaaatcgaccacatagttggaagtaaagctctcctcagcaaatgtaaaagaacagaaattataacaaactatctctcagaccacagtgcaatcaaactagaactcaggattaagaatctcactcaaagccgctcaactacatggaaactgaacaacctgctcctgaatgactactgggtacataacgaaatgaaggcagaaataaagatgttctttgaaaccaacgagaacaaagacaccacataccagaatctctgggacgcattcaaagcagtgtgtagagggaaatttatagcactaaatgcctacaagagaaagcaggaaagatccaaaattgacaccctaacatcacaattaaaagaactagaaaagcaagagcaaacacattcaaaagctagcagaaggcaagaaataactaaaatcagagcagaactgaaggaaatagagacacaaaaaacccttcaaaaaaatcaatgaatccaggagctggttttttgaaaagatcaacaaaattgatagactgctagcaagactaataaagaagaaaatagagaagaatcaaatagatgcaataaaaaatgataaagggaatatcaccaccaatcccacagaaatacaaactaccatcagagaatactataaacacctctatgcaaataaactagaacacctagaagaaatggataaattcctggacatatacaccctcccaagactaaaccaggaagaagttgaatctgtgaatagaccaataacaggttctgaaattgaggcaataattaatagtctaccaaccaaaaaaagtccaggaccagacagattcacagctgaactctaccagaggtacaaagaggagctggtaccattccttctgaaactattccaatcaatagaaaaagagggaatcctccctaattcattttatgaggccagcatcatcctgatatcaaagcctggcagagacacaacaaaaaaagagaattttagaccaatatccctgatgaacatcgatgcaaaaatcctcaataaaatactggcaaaccaaatccagcagcacatcaaaaagcttatccaccaccatcaagttggcttcatccctgggatgcaaggctggttcaacatactcaaatcaataaacgtaatccatcatataaacagaaccaaagacaaaaaccacatgattatctcaatagaagcagaaaaggcctttgacaaaattcaacagccctttatgctaaaaactctcaataaactaggtattgatgggacatatctgacatatctcaaaataataagagctatttatgacaaacccacagccaatatcatactgaatgggcaaaaactggaagcattcccttttaagactggcacaagacagggatgtcctctctcaccactcctattcaacatagtgttggaagctctggccagggcaatcaggcaagagaaagaaataaagggtattcaattaggaaaagaggatgtcaaattgtccctgtttgcagatgacatgattgtatatttagaaaaccccatcgtctcagcccaaaatctccttaagctgataagcaacttcagcgaagtctcaggatacaaaatcaatgtgcaaaaatcacaagcattcctatacaccaataacagacagacagagagccaaatcatgagtgaactcccattcacaattgcttcaaagagaataaaatacctaggaatacaacttacaagggatgtgaaggacctcttcaaggagaactacaaaccactgctcaatgaaataaaagaggacacaaacaaatggaagaacattccatgctcatgggtaggaggaagaatcaatctcgtgaaaatggccatactgcccaaggtaatttacagattcaatgccatccccatcaagctaccaatgactttcttcacagaattggaaaaaactactttaaagttcatatggaaccaaaagagagccctcattgccaagtcatccctaagccaaaagaacaaaactggaggcatcacgctacctgacttcaaactatactacaaggctacagtaaccaaaacatcatggtactggtaccaaaacagagatatagatcaatggaacagaacagagccctcagaaataatgccacatatctacaactatctgatctttgacaaacctgacaaaaacaagcaatggggaaaggattccctatttaataaatggtgctgggaaaactggctagccatatgtagaaagctgaaactggatcccttccttacaccttatacaaaaatcaattcaagatggattaaagatttaaacgttagacctaaaaccataaaaaccctagaagaaaacctaggcattaccattcaggacataggcatgggcaaggacttcatgtccaaaacaccaaaagcaatggcaacaaaagccaaaattgacaaatgggatctaattaaactaaagagcttctgcacagcaaaagaaactaccatcagagtgaacaggcaacctacaacatgggagaaaattttcgcaacctactcatctgacaaagggctaatatccagaatctacaatgaactcaaacaaatttacaagaaaaaaatcaaacaaccccatcaaaaattgggcaaaggatatgaacagacacttctcaaaagaagacatttatgcagccaaaaaaacacatgaaaaaatgctcaccatcaatggccatcagagaaatgcaaatcaaaaccacaatgagttatcatctcacaccagttagaatggcaatcattaaaaagtcaggaaacaacaggagctggtattttgaaaagatcaacaaaattgatagactgctagcaagactaataaagaaaaaaagagagaagaatcaaatagacgcaataaaaaatgataaaggggatatcaccactgatcccacagaaatacaaactaccaccagagaatactataaacacctctatgcaaataaactagaaaatctagaagaaatggataaattcctcgacacatacaacctcccaagactaaagcaggaagaagttgaatctctgaatagaccaataagaggctctgaaattgtggcaataatcaatagcttaccaaccaaaaaaagtccaggaccagatggattcacagccgaattctaccacaggtacaaagaggagctggtaccattgcttctgaaactattccaatcaatagaaaaagaggtaatcctccctaactcattttatgaggccagcatcatcctgataccaaagcctgacagagacacagcaaaaaaagagaattttagaccaatatccttgatgaacatcgatgcaaaaatcctcaataaaatactggcaaaccgaatccagcagcacatcaaaaagcttatccaccatgatcaagtgggcttcatccctgggatgcaaggctggttcaacatacgcaaatcagtaaatgtaatccagcatataaacagaaccaaagacaaaaaccacatgatcatctcaatagatgcagaaaagtcctttgataaaattcaacaacacttcatgctaaaaactctcaataaattaggtattgatgggtcatatctcaaaataataagagctacctatgacaaacccacagccaatatcatactgaatgggcaaaaactggaagcattccctttgaaaactggcacaagacacggatgccccctctcaccactcctattcaacatagtgttggaagttctggccagagcaatcaggcaggagaaggaaataaagggtattcaattaggaaaagaggaagtcaaattgtccctgttcatagatgacatgattgtatatctagaaaaccccatcatctcagcccaaaatctccttaagctgataagcaacttcagcaaagtctcaggatacaaaatcaatgtacaaaaatcacaagcattcttatacaccaacaacagacaaacagagagccaaatcatgagtgaactcccattcacacttgcttcaaagagaataaaatacctaggaatccaacttacaagggatgtgaaggacctcttcaaggagaactacaaaccactgctcaacgaaataaaagaggatacaaacaaatggaagaacattccatgctcatgggtaggaagaatcaatatcgtgaaaatggccatactgcccaaggtaatttacagattgaatgccatccccatcaagctaccaatgcctttcttcacagaattggaaaaaactactttaaagttcatatggaaccaaaaaagagcccgcgttgccaagtcaatcctaagccaaaagaacaaagctggaggcatcacactacctgacttcaaactatactacaaggctatagtaaccaaaacagcatggtactggtaccaaaacagagatatagatcaatggaacagaacagagccctcagaaataacgccgcatatcaacaactatctgatctttgacaaacctgacaaaaacaagcaatggggaaaggattctctatttaataaatggtgctgggaaaacgggctagccatatgtagaaagctgaaactggatcccttccttacaccttatacaaaaattaattcaagatggattaaagacttaaacgttagacctaaaaccagaaaaaccctagaagaaaacctaggcattaccattcaggacataggcatgggcaaggacttcatgtctaaaacaccaaaagcaatggcaacaaaagacaaaatagacaaatgggatctaattaaactaaagagcttctgcacagcaaaagaaactaccatcagagtgaacaggcaacctacaaaatgggagaaaattttcgcaacctactcatctgacaaagggctaatatccagaatctacaatgaactcaaacagatttacaagaaaaaaacaaacaaccccatcaaaaagtgggcgaaggacatgaacagacacttctcaaaagaagacatttatgcagccaaaaaacacatgaaaaaatgctcatcatcactggccatcagagaaatgcaaatcaaaaccacaatgagataccatctcacaccagttagaatggcaatcattaaaaagtcaggaaacaacagcactattcacagtagcaaagacatggattcaacccaaatgtgcatcaatgatacactgtatgaagaaagtgtagaacatatacaccatgaaatacaatccagccataaaaaaggagttcacatcctttgcagcaatatggatggagctgaaagccactttcctaagcaaactaatgcaagaacagaaagccaaatactgcatgttctcacttggctttcttttaacccaccagttacaattactaaagttcatgaaaatgtctaccagccaagtaccactcgtaacactgaaacaacgcagggagtcccaagaaccagggaagaccaagaagcatatttataa

SEQ ID NO: 10719 - DNA, 585 bp, Homo sapiens
  SIMILAR (1)..(684): 961254mologous to Homo sapiens putative protein kinase NY-REN -64 antigen,accession number AF155118,Smith-Waterman Score=1141.
ttaagggacccagccaaggacacgggaaacggggtacaaccaccatgtccaaaaaacccctggtgaaaattcctgtgtcgccccccgattattcggcccccgaaaactttcaatacgctcatagtgctggcgcgtcggtgcatacagtgctttcgctttttcgatatcgcctgctttaatcgcgtcggtaaaggctttggtgtcggtcaccagctgcgtggtttccgccatgacatacgtggattcgcccaatggacccatttgcctgacggctgcgcttttcgcgatcgttgctatgcggcaggtgcacagtgtgaaaacgtcccggcgctgacagcgtgtggtgacaacaaccaacgctggggcctgttggtatccgcagcaggaggttataagtgtctgacacgttattaacgttacgcgacgtccatatcaatttcccggcccgtaaaaactgggttgggaaaactacggaacatggtcatgcctttaaggggatggatttacagaaccctttaaagtcgacctgaagggctgccagcttgggcactgggcctcggttaaaaacgtctggaatgggaaaaa

SEQ ID NO: 10720 - DNA, 918 bp, Homo sapiens
  SIMILAR (550)..(915): 831254mologous to Escherichia coli similar to E. coli yhaD,accession number U82664,Smith-Waterman Score=468.
atgcgcatagttaccgctgccgtcatggcctcaacgctggcagtcagttcattaagccacgctgctgaagtcggttcaggcgataactggcatccgggtgaagaacttacgcagcgcagtacgcagagccatatgttcgacggcataagtttaaccgaacatcagcgtcagcagatgcgagatcttatgcaacaggcccggcacgaacagcctcctgttaatttggatgtggcccatgggaagcacggaagaacaggaatgtgggaaagagtgagcccaggggttcccgccccgtacttgggcaatgcggcgaacgaagaaattatgcaactggcgcatctggaatgtgcaaaatggctgatcctgacgattcccaacggttatgaagcgggtgagattgtggcatctgcccgcgcgaaaaatccggatattgagattattgcccgcgcccattatgacgatgaagtggcgtatatcaccgaacgtggtgcgaatcaggtagtgatgggcgagcgtgaaatcgcccgtaccatgctggaactgctggataagccaccggcggagggtgacctgcaggcatgtaagattcgcgccagggttcaatcttgcgaaggcagtgcaggcgcagcactggtgattaccgggaagggccgcatcgactcgcaaacggcaggcggtaaagcgccgctgggtgtggcgtcggtggcgaaccagtttaatgtaccggtgattgggattgctggcgtattgggtgatggcgtggaagtggtgccccagtacggcattgacgcggtattcagcattttgcctcgtctggcacctttagccgaagtgctcgccagcggtgaaaccaatctcttcaacagcgcgcgaaatattgcctgcgccattaaaataggtcagggaattaaaaactaa

SEQ ID NO: 10721 - DNA, 909 bp, Homo sapiens
  SIMILAR (520)..(906): 1001254mologous to Escherichia coli putative,accession number L31628,Smith-Waterman Score=657.
atgtcaaacacgccaatcgagcttaaaggcagtagcttcactttatctgtggttcatctgcatgaggcagaacctaaggttatccatcaggcgctggaagacaaaatcgctcaggcccccgcatttttaaaacatgcccccgttgtactcaacgtcagtgcactggaagacccggtaaactggtcagcgatgcataaggcggtttcggcaaccggtttgcgggttattggctcgtgcacgtccatcgactcgcaaacggcaggcggtaaagcgccgctgggtgtggcgtcggtggcgaagcagtttaatgtaccggtgattgggattgctggcgtattgggtgatggcgtggaagtggtgcaccagtacggcattgacgcggtattcagcattttgcctcgtctggcacctttagccgaagtgctcgccagcggtgaaaccaatctcttcaacagcgcgcgaaatattgcctgcgccattaaaatagcctatatcatctcgcagagttacgtaaatattattaataacagccagacaccgcttggcgagattttcactgaaaaaggcatcaagccgacattaattatcgatgcggcttgtcatccttctatcctgaaagaggccgtaacgctggcttctccagcggcacgtattgtattgatggggttctccagtgaaccgtctgaagtgattcagcaaggaattaccggaaaagaactctctattttctcttcacgcttaaatgcaaataaattcccgatcgttatcgactggttaagtaaagggttaattaaaccagaaaaattaattacccatacgtttgatttccagcatgttgctgatgccattagtttatttgaacaggatcaaaaacattgctgcaaagtcttactcactttttctgaataa

SEQ ID NO: 10722 - DNA, 713 bp, Homo sapiens
  SIMILAR (160)..(489): 741254mologous to Escherichia coli similar to E. coli yhaD,accession number U82664,Smith-Waterman Score=377.
gtccatattgaaagtagcatgtgacgttgataacccgctggtaggggcacgcggcgcggcggcggtgtttggcccgcaaaaaggggcaacgccggagatggtcgaagaacttgaacaggggctgcaaaattacgcccgtgttttacaccagcaacctgaaattaatgtctgccagatggcggggcgcgggcgctgcgggcggtatgggtattgcggcgccgggtatttttcaatggggatattaaaccgggcattgaaattgtgttgaatgcggtcaatcttgcgcaggcagtgcagggcgcagcactggtgattaccggggaagggcgcatcgactcgcaaacggcaggcggtaaagcgccgctgggtgtggcgtcggtggcgaagcagtttaatgtaccgtgtgatctgggattgctggcgtatgtgggtgatggcgtggaagtggtgcaccagtacgggattgacgcgggattcaacattttgccttgttttggcacctttagccgaagtgctcgccagcggtgaaaccaatctcttcaacagcgcgcgaaatattgcctgcgccattaaaataggtcagggaattaaaaactaacccttacctttaaagcggatgcgatttatatcgcataagagtgcagtactcatcccccatgcggcatgagtaccatatccttcctgaaaatcgcgcaaattctatatattgcaga

SEQ ID NO: 10723 - DNA, 1143 bp, Homo sapiens
  SIMILAR (10)..(1659): 1001254mologous to Homo sapiens EH domain-binding mitotic phosphoprotein,accession number AF073727,Smith-Waterman Score=2937.
atgagcacaggacggagcccatcgccgactcgccgcagcaatattatcggcatcaaagacaccatcgactccgtcgcccacgtgcgcagcatgatccataccgtcaaaggtgcccatccgcacttcaccgtgctctgcggctacgacgatcatctgttcaatacctggctgctcggcggcgacggggcgatatcggcgagcggcaactttgccccgcaggtgtcggtgaatcttctgaaagcctggcgcgacggggacgtggcgaaagcggccgggtatcatcagaccttgctgcaaattccgcagatgtatcagctggatacgccgtttgtgaacgtgattaaagaggcgatcgtgctctgcggtcgtcctgtctccacgcacgacgacgcgttttatgcggtgatcacccacgcggcggggccgcagggcgctctgccgctgaccccgcagatgctgatggaatctcccagcggcaacctgttcggcatgacgcagaacgccgggatgggctggcacgccaacaagctcaccggcaaagaggtgctccagtggcttctgtttctatcagctgtccctcctgttcagctactgacggggtggtgcgtaacggcaaaagcactgccggacatcagcgctatctctgctctcactgccgtaaaacatggcaactgcagttcacttacaccgcttctcaacccgccgggcagtgacgtcatcgtctgcgcggaaatggacgaacagtggggatacgtcggggctaaatcgcgccagcgctggctgttttacgcgtatgacaggctccggaagacggttgttgcgcacgtattcggtgaacgcactatggcgacgctggggcgtcttatgagcctgctgtcaccctttgacgtggtgatatggatgacggatggctggccgctgtatgaatcccgcctgaagggaaagctgcacgtaatcagcaagcgatatacgcagcgaattgagcggcataacctgaatctgaggcagcacctggcacggctgggacggaagtcgctgtcgttctcaaaatcggtggagcagcatgacaaagtcatcgggcattatctctttagagcacagggcgagaatcactacaccttagaatatcaggaactcacttag

SEQ ID NO: 10724 - DNA, 912 bp, Homo sapiens
  SIMILAR (347)..(889): 971254mologous to Mus musculus splicing factor U2AF,accession number X64587,Smith-Waterman Score=908.
tgatgctgctgactactaataccagctcggcccccggggatcaacccctactactggaaagtgtcggaagctaacctgatccgctatttccagcaggtgggggacagcgtcacgctgccggtgatgctctataacttcccggcgctgaccgggcaggatctgactccggcgctggtgaaaaccctcgccgactcgcgcagcaatattatcggcatcaaagacaccatcgactccgtcgcccacctgcgcagcatgatccataccgtcaaaggtgcccatccgcacttcaccgtgctctgcggctaccacgatcatctgttcaataccctgctgctcggcggcgacggggcgatatcggcgagcggcaactttgccccgcaggtgtcggtgaatcttctgaaagcctggcgcgacggggacgtggcgaaagcggccgggtatcatcagaccttgctgcaaattccgcagatgtatcagctggatacgcccgtttgtgaacgtgattaaagaggcgatcgtgctctgcggtcgtcctgtctccacgcacgtgctgccgcccgcctcgcccctggacgagccgcgcaaggcgcagctgaaaaccctgctgcaacagctcaagctttggtgagccggaccaatacgatgacctttgggaaaatttttacccccgcaggaacgacgcggtttaatgcgggggacaacccacgcggcggggccgccagggcgcttctgccgcttacccccgcagaagctgatggaaatttcccacgggcaaccctggtcgcgcatgaccccaaaacgcccgggatggggctgggaaccgccaccaagcttccccgggaaaaaaggggctggaataatcggccttcagggggggatcccgggccgggagcacggacgccccattcgccg

SEQ ID NO: 10725 - DNA, 1188 bp, Homo sapiens; identical to SEQ ID NO: 9280
  SIMILAR (24)..(341): 491254mologous to Homo sapiens dJ718D20.1 (A novel protein),accession number AL121830,Smith-Waterman Score=214.

SEQ ID NO: 10726 - DNA, 541 bp, Homo sapiens
  SIMILAR (1)..(153): 1001254mologous to Homo sapiens hepatocellular carcinoma- associated antigen 67,accession number AF243495,Smith-Waterman Score=254.
aagctgaaaattgaaacactgaacaacgatagttgttcgtgagtctctcaaattttcgcaacacgatgatgaatcgaaagaaacatcttcgggttgtgaggttaagcgactaaccgtacaacggtggatgccctggcagtcaaaggcgatgaaggacgtgctaatctgcgataagcgtcggtaaggtgatatgaaccgttattaccggcgatttccgaatggggtaacccagtgtgtttcgacacactatcattaactgaattcataggttaatgaggcgaaccggtggaactgaaacatctaagtaccccgaggaaaagaaatcaaccgagattcccccagtagcggcgagcgaacggggagcagcccagagcctgaatcagtgtgtgtgttagtggaagcgtctggaaaggcgcgcgatacagggtgacagccccgtacacaaaaatgcccgtgctggggagctcgatgagtaagccgctacacgtgcaatccctggctgaaatatgaggggaccatcctccaaggctaaatactcctg

SEQ ID NO: 10727 - DNA, 613 bp, Homo sapiens
  SIMILAR (65)..(265): 881254mologous to Escherichia coli K12 orf, hypothetical protein,accession number AE000299,Smith-Waterman Score=266.
cctccatcccgcgggttctttaagagatattgccggtcccaggcccggtagtcatcgcatggggatttttcgtcgcattgccggagaaagctggtcagcgattgttatttccggcctttcaattgcgcgacatgcacagcaaaaacgcatcattacgttcaccgcctcactggcggcgcggctggagattgcgctaaaaattgtgcgcaatgccgacggcacggaatccgccagcgaacagctttaccaggtcgttggcgcagggtgcaagatgccctggcagtcagaggcgatgaaggacgtgctaatctgcgataagcgtcggttaatgaggcgaaccgggggaactgaaacatctaagtaccccgaggaaaagaaatcaaccgagattcccccagtagcggcgagcgaacggggaggagcccagagcctgaatcagtgtgccaccgaagccgtggtcctgacgcgagtcgattcccacctgaaggttggtgatagcctcagtcacacgacaagttttttaaaaaagtttgctgctaggtttggaggacagctggaaaaagcccttggacttggatccatgcaagccttctcagacatcaggggcctatga

SEQ ID NO: 10728 - DNA, 718 bp, Homo sapiens
  SIMILAR (706)..(119): 701254mologous to Escherichia coli similar to E. coli yhaD,accession number U82664,Smith-Waterman Score=611.
tctgcaatatatagaatttgcgcgattttcaggaaggatatggtactcatgccgcatgggggatgagtactgcactcttatgcgatataaatcgcatccgctttaaaggtaagggttagtttttaattccctgacctattttaatggcgcaggcaatatttcgcgcgctgttgaagagattggtttcaccgctggcgagcacttcggctaaaggtgccagacgaggcaaaatgctgaataccgcgtcaatgccgtactggtgcaccacttccacgccatcacccaatacgccagcaatcccaatcaccggtacattaaactgcttcgccaccgacgccacacccagcggcgctttaccgcctgccgtttgcgagtcgatgcgcccttccccggtaatcaccagtgctgcgccctgcactgcctgcgcaagattgaccgcattcaacacaatttcaatgcccggtttaatatccccattgaaaaatacccggcgccgcaatacccataccgcccgcagcgcccgcgccccgccatctggcagacattaatttcaggttgctggtgtaaaacacgggcgtaattttgcagcccctgttcaagttcttcgaccatctccggcgttgcccctttttgcgggccaaacaccggcggcgggccgcgtgcccctaccagcggttattacggcacatgcttatttcatatggcattcgccagacgc

SEQ ID NO: 10729 - DNA, 1710 bp, Homo sapiens
  SIMILAR (1)..(867): 951254mologous to Escherichia coli K12 putative 2-component sensor protein,accession number AE000485,Smith-Waterman Score=1408.
atgacgcgagatgggctagccaacaaggcactggcagtggcgcgtaccctcgccgactcgccggaaatccgtcagggcttgcagaaaaaaccgcaggagagtggcatccaggccatcgcggaagccgtacgcaaacgcaacgatctgctgtttattgtcgttaccgatatgcaaagtcttcgctactcgcatcctgaagcccagcgtattggtcagccatttaaaggtgatgacatccttaaagcgctgaatggcgaagaaaatgtcgctatcaatcgcggttttctggcgcaggctttacgcgtatttacccccatctacgatgaaaatcataaacaaattggcgtgatcaatgacagtcgctggagcattatctggtcggtattatttggcatgctggtcggactgattggcacctgcattctggttaaggtactgaaaaaaatccttttcggcctggaaccctacgaaatctccacgctgtttgagcaacgccaggccatgttgcagtctatcaaagaaggcgtcgttgccgtggacgatcgcggcgaggtcacgctgatcaacgatgccgcacaagaattgctgaattaccgtaagtcgcaggacgatgagaaactgtcgacgctaagccactcatggtcacaggtggtagatgtctcggaagtgttacgcgacggtaccccgcgccgcgacgaagagattacgattaaagaccggctattactgatcaacaccgttccggtgcgcagtaatggcgttatcatcggtgccatttcaaccttcagggacaaaactgaagtacgtaaactgatgcagcgactcgacggtctggtcaactatgctgacgcacttcgtgaacgatcccgcttagagcacattctccacaatcaaagagtgccatttatcatgaaattgcaccatagaatgctccggcattttatcgccgcaagtgtcattgtgctgacatcttccttccttatttttgaacttgtcgccagcgacagagcaatgagtgcctatctgcgctatatcgtgcagaaagcagactcctcctttctttatgataagtatcagaatcagagtattgccgcgcatgtgatgcgcgctctcgctgctgagcagtcggaagtgtcgccagaacagcggcgcgccatctgcgaggcttttgagtctgccaataacacccatggcttaaacctgactgcccataaatacccgggcttacgcggcacactacaaaccgcatccactgactgcgacacaattgtggaagctgcagcactattacccgcttttgatcaggcagtggaaggcaaccgccaccaggatgattacggttcaggtcttgggatggccgaagagaaatttcactattatctcgatctctttagagcagtaggagacggccacaactctaaggaagatgccacttttggcctcggctggcgcgtgaatggtaatgccaccatgacgccaacgtttggcacgctggcaagcccgcaaacctacggtcacactggctggaccggaacggtgaccgttatcgatccggtgaatcatatgacgattgtgatgttaagcaacaagccacattcgccggttgccgatccgcaaaagaatcccaatatgttcgaaagcggtcagttgccgattgcaacttatggttgggtagttgatcaggtgtatgcggcgttaaagcagaagtaa

SEQ ID NO: 10730 - DNA, 551 bp, Homo sapiens
  SIMILAR (271)..(1470): 991254mologous to Homo sapiens dA59H18.1 (KIAA0767 protein),accession number AL096766,Smith-Waterman Score=2068.
tcaatgcggaaacgtgaagatgttcaccaccagctctaaggaagatgccacttttggcctcgctggcgcgtgaatggtaatgccaccatgacgccgacgtttggcacgctgcaagcccgcaaacctacggtcacactggctcgcctccccttcccccaatttgtcctgtgcggccccctggttatctccgccgtctttccccgcgttttccccgattatttggtatctcattgccgcagcggccccctggtatcctggagcgctcactccaacgccgccgtaacccctctggttggcgtcgtcgcaaccagtaatgaccgtgatgggatgctgccttatgggtgatggcgtgaaatgcctacctttaaagcggatgcgatttatatcgcataagagtgcagtactcatgcggatgcggcatgagtaccatatccttcctgaaaatcgcgcaaattctaatattgcagagatcatgtaggcctgataagcgaagcgcatcaggcaatgtacaaaaaaagccacggtataaaccgtggcaaaatccaacatag

SEQ ID NO: 10731 - DNA, 1992 bp, Homo sapiens
  SIMILAR (33)..(485): 991254mologous to Homo sapiens PPP5_HUMAN,accession number AC007193,Smith-Waterman Score=787.
  misc_feature (1)...(1992): n = a,t,c or g
atggacgtacaaagtgcagctgatgacaccggtttaccaatgctggtcgtacgcgggccgttcaatgtggtttggcaacgtctgccagcggcgctggaaaaagtgggcatgaaagtgaccgacagcacccgttcgcagggcaacatggccgtaacttataagccgctgtctgacagcgactggcaggaactgggcgcgagcgatccaggcctggcatccggtgactataaactgcaggttggcgatttagataaccgcagcagcctacagttcatcgatccgaaaggtcatactctgactcagagtcagaacgacgcgctggaaaacgcgattttagcggtaattcgccacgaaatttgtttgtcggacgtagttcggataagggcgtcacgccgattcgacaaaacatccggcacaccagacaggcaaaagattttaaaactcggttatctgctgcctgctggctggcttgctgatgtggatccccgactggttggcgtgatgaatgtctggacgctgctcgttcccgccgcgctgttctttttcggtgccgggatgctgtttccgctggcgaccagcggcgcgatggagccgttccccttcctggcgggcacggctggcgcgctggtcggcggtctgcaaaacattggttccggcgtgctggcgtcgctctctgcgatgttgccgcaaaccgggcagcctggggttgttgatgaccttaatgggattgttgatcgtgctgtgctggctgccgctggcgacgcggatgtcgcatcaggggcagcccgtttaagcgcacgtcaccgcagcatcgtcatcagctccatgggagaacgatgctgctttatcagatcacgcatcacccgcatatgcggatttctggcggcgggggttgggcttgatcaacttgcgccagatttcgccacgcccgtcattcgcgaactgctggcgttgttgttgtgtctgttttccggcgggttagcgatgtatggctacttgcgctggttacgcaatgaaaaagcgatgcgtctgaaagaggacctgccctacaccaacagcttattaatcattagcttaatattgatggtcgtggcggtgatcgttatgggactgtggatccccccaacttgcatcgttgacgatcggatggcgaaatatattccggggttggccgatagtccaaatgacaccattaaaggcaaaaacaccctgcggatttctgacctgctgcatcacagcggcggtttcccggcagatccgcaatacccgaataaagcggtcgcgggcgcgttatattcccaggataaaggccagacgctggagatgatcaagcgcacgccgctggaatatcagcccggcagcaaacatatctacagcgatgtcgattatatgctgctgggatttatcgtcgagtcggttaccggtcagccgcttgaccgctatgttgaagagtcgatttatcgcccgctcggcctgacacatacggtatttaacccgctgctgaaaggctttaaaccgcaacaaattgccgccacggaattgaacggcaatacccgcgatggcgtgatccatttcccgaatatccgcacctccactctctggggtcaggtgcacgatgaaaaagccttttattcgatgggcggcgtttccgggcacgcaggtttgttttccaataccggcgatattgcgctgttcaatgcggaaacggtgaagatgttcaccaccagctctaaggaagatgccacttttggcctcggctggcgcgtgaatggtaatgccaccatgacgccgacgtttggcacgctggcaagcccgcaaaccctacggtcacactggctggaccggaacggtgaccgttatcgatccggtgaatcatatgacgattgtgatgttaagcaacaagccacattcgccggttgccgatccgcaaaagaatcccantatgttcgaaagcggtcagttgccgattgcaacttatggttgggtagttga

SEQ ID NO: 10732 - DNA, 322 bp, Homo sapiens
  SIMILAR (157)..(321): 981254mologous to Escherichia coli caiA,accession number X73904,Smith-Waterman Score=282.
gaactgtttgtcgccggtatccgcgaactgatggccagcgaaaactgggaggcctattttgccgagtgcgaccgtgacagcgtctacccggaacgttttgtcaaagcactggcggatatgggtatcgacagtctgctgatccctgaagagcacgtgttgccgggcgggtgcaacaccttcctgcgcgaaggcacacaagagcagatcgacaaaattatggctttccgcggcaccggtaagcagatgtggaactcagcgattaccgaaccgggcgcgggctccgacgtgggtagcctgaaaacgacttatacccgtagaaatg

SEQ ID NO: 10733 - DNA, 1374 bp, Homo sapiens
  SIMILAR (550)..(723): 931254mologous to Homo sapiens put. HMG-17 protein,accession number X13546,Smith-Waterman Score=277.
tcagcaaattgtgaacatcatcacgttcatctttccctggttgccaatggcccattttcgatacattgggatgatactggggcctgcgaacatttgcccggcaaacggtccggcgatttcgataccggagaagacaacgcgcaatccggccaacggccgaatttcggcatgggtagatgatccattatttgctcctgaaaaatttatgtagcgcatgactgccggatgcggcgtaaacgctttatccggcctacattcgtgctcccgtaggcgacccagcgtcaggatctgcatttcgtcagatcccccggagacgcggtctacacgcagatcacgccagaagcggctgatgcggtggttgcccgcaatcccgacaccgcccagcacctgcattgcgctatccacaacttcaaatgccgcattggcgcagaagtatttgcacatcgctgcatcgccagaggtgatggtgccgttgtctgctttccacgctgcttcatacagcatgtttttcatggagtttaatttgatcgccatgtgggcgaatttttcctgaatcaactggaaacgaccaatagcctcgccaaactgcacgcgctgattggcgtacgcgccgcatatcgccgtaccgtagttggtgagggctaccaggaaacgttcatggtcgaactcttctttgacgcggttaaagccgttaccttcccgaccgaacatgtctttctcgtccagttccacgtcgtcaaaggtgatttcacagcagctatccatacgcagaccgagcttttcaagtttggtcactttgatgcccggtttgctcatatcaacaaaccattcggtgtagacaggtttgtccggagaagccccgtcgcgcgccatcaccacgatgtacggggtgtaggcgctgctggtaataaaacacttactaccattaagataaatcttaccatttctacgggtataagtcgttttcaggctacccacgtcggagcccgcgcccggttcggtaatcgctgagttccacatctgcttaccggtgccgcggaaagccataattttgtcgatctgctcttgtgtgccttcgcgcaggaaggtgttgaacccgcccggcaactggtacagcacataggttggtgcccccagacgtcccagctccatccacacggcggcgagagtaacaaaccccgcgtccagaccaccgtgctcttcagggatcagcagactgtcgatacccatatccgccagtgctttgacaaaacgttccgggtagacgctgtcacggtcgcactcggcaaaataggcctcccagttttcgctggccatcagttcgcggataccggcgacaaacagttcctgctcatcatttaaattaaaatccat

SEQ ID NO: 10734 - DNA, 3141 bp, Homo sapiens; identical to SEQ ID NO: 9243
  SIMILAR (298)..(483): 911254mologous to Homo sapiens beta-catenin-interacting protein ICAT,accession number AB021262,Smith-Waterman Score=282.

SEQ ID NO: 10735 - DNA, 1083 bp, Homo sapiens
  SIMILAR (154)..(612): 451254mologous to Human endogenous retrovirus K gag protein,accession number Y10392,Smith-Waterman Score=384.
atggattttaatttaaatgatgagcaggaactgtttgtcgccggtatccgcgaactgatggccagcgaaaactgggaggcctattttgccgagtgcgaccgtgacagcgtctacccggaacgttttgtcaaagcactggcggatatgggtatcgacagtctgctgatccctgaagagcacggtggtctggacgcggggtttgttactctcgccgccgtgtggatggagctgggacgtctgggggcaccaacctatgtgctgtaccagttgccgggcgggttcaacaccttcctgcgcgaaggcacacaagagcagatcgacaaaattatggctttccgcggcaccggtaagcagatgtggaactcagcgattaccgaaccgggcgcgggctccgacgtgggtagcctgaaaacgacttatacccgtagaaatgccgacgataatactccagacgttgtagatataacggcacgctttcatcgggtattccggacggaatcgcgttacggaggaagttttttcagatactcccggaacgcctggcttgatgccatgaaatctacggctttatcgataagaagcggaactgcatggaaataccgctttttctgtccggtaatatttgcggcaataataacgcattcccccaccgccggcctttatacccgtggaccgggccttcgccgtaacccacgaacatctggtggtacccattttgcaggtcccgcacggatggaagccggtttcggcgtggttacgcccgaactcatcaagctgttcatccgtctggcattcgacaccggggctgatttcgcggccacgatactgatccagcgcgggttaatgcatgatctcgcgggtgatgcgaattgcgtcgcggaactcctgccagtcctgctcgtgcgacatgtagttaaacagaatcgccggatgctggaaatggtactgaatattcggccacgcaaattcctcacggctgcgaataaatccacctgcttcaaagtggttgctggcaccaacgccagtgccgccaaacagccactccgcaccgattttcggctggttccaccactgcagggcagg

SEQ ID NO: 10736 - DNA, 1648 bp, Homo sapiens
  SIMILAR (419)..(249): 271254mologous to Paramecium bursaria Chlorella virus 1 a648L,accession number U42580,Smith-Waterman Score=66.
atgtggcgctggttatacgctggtgcgcggatgacggtacgtgataaacagccattggagcaaatgctggcaggctgtactcacgcttcactggtgccaacacaactctggcgtttgctggttaaccgtagttccgtttccctgaaagcggtgttacttggcggcgcggctatcccggtcgagttgacggaacaggcgcgcgacatggggattcgttgcttttgcggctatggtctgaccgagtttgcctccacggtgtgtgcgaaagaagccgacggcctggcagacgttggttcgccgctgccgggtcgggaagtgaaaatcgttaataatgaagtgtggctgcgggctgccagtatggcagaaggttactggcgtaacgggcaactggtttcactggttaatgacgaaggctggtacgctacgcgcgatcgccgtgagatgcataatggcaagctgaccattgtcggacgtttagacaatctattcttcagtggcggagagggtattcagccggaagaagtcgagcgcgtaattgctgcacatcctgcggttttgcaggtgtttatcgtccccgttgccgacaaggagttttgtcatcgaccggtggcggtgatggagtatgaccacgagagcgttgatcttagtgaatgggtgaaagataagctggcccgttttcaacacctggtgcgctggctaactctgcccgcggagcctaaaaacggcggtattaaatttcacgtcagcgctaaaagagtgggtgcactaaccacgcggatggaagccgcacagcaacatgctgacgataaaattcgccagatgattaacagcgagcagcgcctcagtgagcagtttgaaaacctcgccaaccgtatttttgagcacagcaatcgccgggttgatgagcaaaaccgtcagagtctgaacagcctgttgtcgccgctacgtgaacaactggacggtttccgccgtcagttcaggacagcttcgttaatgaaagtagccggatgggattacctgatgaattcactctacaacgcgaattcgagcgcgctcgtcaacagggtgcgctagcacaatggttgcggcttttgaaggtggtttcactggtatcgtcgccaccctggataccggtcgccccggtccggtgatggctttccgtgtcgatatggacgcgctggatctcagtgaagagcaggatgtcagccatcgcccctaccgcgacggttttgcgtcatgtaacgccggaatgatgcatgcctgtggtcatgatggacataccgccattgggcttgggctggcgcatacccttaaacagttcgagtccggactacatggcgtcatcaaactgatttttcagcctgcagaggaaggtacgcgtggcgcgcgggcgatggtcgatgcaggtgtcgtagatgatgttgattattttactgccgtgcacattggcactggcgtacctgcgggcactgttgtgtgcggcagtgataattttatggcaaccaccaaatttgacgcgcacttcaccggtaccgccgctcacgcaggcgcaaaaccagaagacggtcacaatgccttgttggcggcacacaagccactcttgcactgcatgcaatcgccccgcacagcgaaggagcttccagagtaa

SEQ ID NO: 10737 - DNA, 3132 bp, Homo sapiens
  SIMILAR (1026)..(361): 421254mologous to Human endogenous retrovirus gag,accession number X72791,Smith-Waterman Score=496.
tcacactgtttctgccttaggaactgcctccaccagcgcagagagacagacctgttctgtctccccccggttgtccccttttctgtgttccccgcacgtgtgataccccgtgggcgtccacggcccacgccctcggaggtgtgcccggctgtggtcctgcgacggggtgcctacggggtgccgcctggtcatgaccgttccgcgggtcggcccgtgggtgtgcttggccggcgttgcttcacgcgttttcaccactgcgccgctaaattgttctttgccactttcatctttaaagcggtaaagcaccgccagataatggtcgaacaagttatgtttccattccggttgggaataggtgtcatattccagattgccattgtcctggcagtcaacgtcgtataacggcaggaaatctaacagtgaggtaatacgtaatgccagttcacgcatttccgcattattaattgcatgaatgattgctcgcgccagcatttcaatctgcaactcattgacgactaactcacatttgctaccgtcatgtagcgttaatacgaaggtaagattttcgccttgattatcggtaagttccagcgtgttaacccgacgattaatatcggcatttttaagctcatcaaccagaatttctgggatgttttctgccattttcttaatgactttatcgcgagcttgctcatactgaaggtgtgcagcagcatccagtttatgcttttgatgcagacgactttccagcgcaatcagcaggtcgcgcagttccagacagatatcacagttgtatctgttgttatttagaaaaacaactttcccgaacggtaccagattagtttgatacagcaggatgtccgctgccatcagcaccggatagtcaaacagaccagcgttgatgttctcggcataacgcgcagatttatctttaaactgcgtcatgcagaccagttcgccatatttacgcagattctctggttcacctgtcaggccaattacgccgacaatttcaccttccagccgtaacggtagattaatcccctgccgcacaccgtgcagatgacgtgctaccgcgtcatcgatatcgacgactcgcgcgataccggataccgcgacgaataggactttttttatttcgtcgatcgccgctgcaatatgattaaacgtggcggcgagaatgtctcctgcgtggagctggaaaatattatcgccgcgcacccgaaaattcaggacatcgtggttgtgggtattaaagattcgattcgcgatgaagccatcaaagcatttgtggtgctgaatgaaggtgaaacattgagcgaagaggaatttttccgcttctgcgaacaaaatatggcgaaatttaaagtgccctcttatttcaaatgccgcattggcgcagaagtatttgcacatcgctgcatcgccagaggtgatggtgccgttgtctgctttccacgctgcttcatacagcatgtttttcatggagtttaatttgatcgccatgtgggcgaatttttcctgaatcaactggaaacgaccaatagcctcgccaaactgcacgcgctgattggcgtagcgcgccgcatcttcaaaggcgcacatcgccgtaccgtagttggtgagggctaccaggaaacgttcatggtcgaactcttctttgacgcggttaaagccgttaccttcccgaccgaacatgtctttctcgtccagttccacgtcgtcaaaggtgatttcacagcagctatccatacgcagaccgagcttttcaagtttggtcactttgatgcccggtttgctcatatcaacaaaccattcggtgtagacaggtttgtccggagaagccccgtcgcgcgccatcaccacgatgtacggggtgtaggcgctgctggtaataaaacacttactaccattaagataaatcttaccatttctacgggtataagtcgttttcaggctacccacgtcggagcccgcgcccggttcggtgatcgctgagtacgaaccgacagcaccactaccgttggtcaccgggattgcataatcaccggaggtcaccggcaaaatcattccagccggggcatgaagctccgcaagcggtgccgcttccaggtaggtttcatcaccactgaccgtctcacgaccactgtcggtgattggtgtcattggcaggcgcagcgtatcggtcgccacaagacccagttccttacatgcccatttcaccgggattggattgggttcgacaaatagtttgttgtgtaatggcatcagacgctgattaataacgcgtgcctcggcaaaatgcccttctgctgccagtttgcacatctgggccatatcacgcgctggcgactggctgtggatttcgccgcggccagatgctgaaaaccactgttctccctcggcactacaaactttacttgggcgcgagttccggcatgcggtattcgacgcccgccacggctttgatgccgctgcctttgccgcacttagcggaacgttgaaagcgggaagctggctggttttgttactccggcggataacgaggctatcctctggcggcaaaaccagccattctcgttggcgcattttactccgggtcaccccagagatggaaggcggtgaaggtgtgctgatgacttccgctttactctgggcttctgctaccagcggtgttaatggctgagctggtgtgccgggggcgtcatcaggctgtgctgttgtgagttgctcagaagtcagttttgtgaagagcgttggtttctctgtcggtaacacggttgacggcgcatcagtcactttgggcgtattgtcaaaacccggcaacatcgcaaaaagggcgctcaggcttgcggtgacgtcttcattcagatcatccgctttttcgtcttttgtcgtatttttgtcagccaccgcagccaacgccatcgtctgagcggtggttaacggtgttgatgtggattgttcgtcgttgatgacaggcggtgtttcatccacagggatcagtaaattagcttgttgcgcgtcggaaacaatatcgctgatcagcggctcgccttttgtcgtgggcttatcagcaactggggggccgctttgtcggtagttgtctcgcctgcggggatgctctatcat

SEQ ID NO: 10738 - DNA, 3618 bp, Homo sapiens
  SIMILAR (1171)..(1461): 981254mologous to Homo sapiens ATP synthase subunit c precursor,accession number D13118,Smith-Waterman Score=470.
atggttgacctgcacgaaaaaggtctgatccgcaaactgctggatgtgcagagctttgacagccatgctgcgcaatcgctggcccgtaaccccaatcacatcgaaatcagcgccaaccagtacgctaactggggttcgaaaggcgcatcggttgatcgtctcgacgtggtggtactgagcgcgctggaaattgacacccagttcaacgttaacgtgctgaccggctctgacggcgtactgcgtggtgcttccggtggtcactgcgataccgcgattgcctctgcgctttccatcatcgtcgcgccgctggtacgcggtcgtattccgactctggtggataacgtactgacctgcatcaccccaggctccagtgtcgatattctggtcacagaccacggtatcgcagttaacccggcacgtccggaactggcagaacgtctgcaggaagcgggcattaaagtggtttccattgagtggctgcgcgaacgtgcgcgtctgctgaccggtgaaccacagccgattgaattcacagaccgcgtcgttgccgttgtgcgttaccgcgatggctcggtgatcgatgttgtgcatcaggctattatggtagcggcattcgctggcttcatcggttatgcggtaatgaacctcgcggtaaacttctggttgaccaataaaggcattctgccaaccacggatgccgcggttctgaaagccaataacatccagagcattcttgggatccagtcgatcgataccgggatcctcggtgcggtgatcgccggtattatcgtctggatgctgcatgagcgtttccataatatccgcctgccggatgcgctggcattcttcggcggtacgcgcttcgtaccaattatctcctcgctggtgatgggccttgtcggcctggtgattccattagtctggccgattttcgccatgggtattagcggcttgggccatatgataaacagcgcgggtgatttcggaccgatgctgtttggtaccggtgaacgtctgctgttgccgtttggtctgcatcacattctggtggcattaattcgctttaccgacgcaggcggcacgcaggaagtctgcggtcaaaccgtcagcggcgcactgaccatcttccaggcgcaattgagttgcccgaccactcacggtttttctgaaagcgccacgcgtttcctttcgcaagcaccgccaccatgtgggcttcttcatctctgctttattgccaccgttacgctggttaacgcctgctcttataccctggcgatgtccacttgccgcgaagtacgcgatggtgaagaaccacctctgctggtgcgtatcggttggtcaattctggttggcattatcggtattgttctgctggcgctcggcggcctgaaaccgattcaaaccgccattatcgccggaggatgcccgctgttcttcgtcaacattatggaactgtttgtcgccggtatccgcgaactgatggccagcgaaaactgggaggcctattttgccgagtgcgaccgtgacagcgtctacccggaacgttttgtcaaagcactggcggatatgggtatcgacagtctgctgatccctgaagagcacggtggtctggacgcggggtttgttactctcgccgccgtgtggatggagctgggacgtctgggggcaccaacctatgtgctgtaccagttgccgggcgggttcaacaccttcctgcgcgaaggcacacaagagcagatcgacaaaattatggctttccgcggcaccggtaagcagatgtggaactcagcgattaccgaaccgggcgcgggctccgacgtgggtagcctgaaaacgacttatacccgtagaaatggtaagatttatcttaatggtagtaagtgttttattaccagcagcgcctacaccccgtacatcgtggtgatggcgcgcgacggggcttctccggacaaacctgtctacaccgaatggtttgttgatatgagcaaaccgggcatcaaagtgaccaaacttgaaaagctcggtctgcgtatggatagctgctgtgaaatcacctttgacgacgtggaactggacgagaaagacatgttcggtcgggaaggtaacggctttaaccgcgtcaaagaagagttcgaccatgaacgtttcctggtagccctcaccaactacggtacggcgatgtgcgcctttgaagatgcggcgcggctacgccaatcagcgcaggaaagcacaatggaagcattaggaatgatcgaaacccggggcctggttgcactgattgaggcttctgacgcgatggtgaaagctgcgcgcgtcaagctggttggtgttaagcagattggcggcggcctgtgtactgccatggttcgtggtgatgttgcagcctgtaaagccgcgaccgatgcaggtgccgcagcggcacagcgtatcggcgagctggtatctgtacacgttatcccgcgtccgcacggcgacctggaagaagtcttcccgatcggcctgaaaggcgatagcagcaacctggggagcttttacctgaaatacgccacggaggcgggtatgaaactggcagtcgtcactggacaaattgtttgtaccgtacgccatcacggactggcgcatgacaaattgctgatggtggaaatgattgatccacaaggtaatcctgacgggcaatgcgccgtcgccatcgacaatattggcgcgggaaccggggagtgggtgttactggtgagtggcagttccgcccgccaggcgcataaaagcgaaacgtcaccggtcgatctgtgcgtgattggcattgtcgatgaggtggtgtctggcggtcagcgatatagcgcagttgatgcaaaacacagcgatgtgaccgtgcaggaggctgccgccatcgcatggcatatgccgtttgatgacgatcaatatcaccgtttactctccgctgccgggttatcgaaaagctggacgcggacgatgcaaaagcgccgactgagcggcaagatcgaagatttttcccgccggttcggcaaccaaatcaccagccgtaaaggcccacaacccgcaaatttgtgggccaaaccggagcttctgcccggaatgcaaacaacgcgcgacctgatcatcgacgatacagatgtactgctggtgtattcgacgcagaacgttttggcattaaggttgtttcatcacccgcgtcacgccgatattttgttatttactggcgcagtcacccgggcgatgcgtatgcctgcacttcgggcgtatgagtctgcccccgatcataaaatttgtgtttcctacggcgcgtgcggtgtcggcggcggtattttccacgatctctacagcgtctggggcggtagcgacaccattgtccccattgatgtttggatccccggctgcccgccaacaccggccgccaccattcacggtttcgccgtggcgctcggtttgctgcaacagaagattcacgctgtggattatcgcgatcccaccggggtgactatgcaaccgttgtggccgcagatcccgccatcacagcgtatcgccattgagcgagaagcgcggaggctggcgggctatcgtcaggggcgagcaatttgccgatcaggctcctgcgccctttaa

SEQ ID NO: 10739 - DNA, 1209 bp, Homo sapiens
  SIMILAR (475)..(729): 821254mologous to Mus musculus glyceraldehyde-3-phosphate dehydrogenase,accession number M32599,Smith-Waterman Score=369.
tcactggtatcgtcgccaccctggataccgtcgccccggtccggtgatggctttccgtgtcgatatggacgcgctggattcagtgaagagcaggatgtcagccatcgcccctaccgcgacggttttgctcatgtaacgccggaatgatgcatgcctgtggtcatgatggacataccgcattgggcttgggctggcgcatacccttaaacagttcgagtccggactaatggcgtcatcaaactgatttttcagcttcaccggtacgccgctcacgcaggcgcaaaaccagaagacggtcacaatgccttgttggggcagcacaagccactcttgcactgcatgcaatcgccccgcacagcgaagagcttccagagtaaacgtgggcgttatgcaggcaggaagcggtcgtaagttgttcctgcctcggcgttgcttacgccagcctactcgtagtgcactcaacactacacaacagcttaacgctcgttgaataccaacagtcccatagacgacatacaaggtgtacagcttataatagtcgtgcatcgccacgggaacgccgagtcgagccaccacccaccctgttctggatgctaatagcggtgaaaccattctcgacgcagctctgcgaacggtatcgagattgaacacgcctgtgaaaaatcctgtgcttgcaccactgccactgcatcgttcgtgaaggttttgactcactgccggaaagctcaagcaggaagacgacatgctgggaacaaagcctggggactggagccggaagccgtttaagctgccaggcgcgcgtttacgacgaagatttagtagtcgaatcccggcgttacattgccgcttcctgcaacgcgaatcatttagcggaaaaatcctggggctgccaactgcggcccttttacaaagaaggataactaaaatgacagaagcgatgaagataccctctctacccaaccctgcatttgaacggggcagacgactggggctgatccagcgtggcgggcgcagattgcggtctgggctcacgcgttccgttagcgctaaggctcgatccgatcgcgctgggcttctgcaagtaaaggccgaaaggccgtaatgcgttgcgcgcatttctacggtataagtcgttttcaggctacccacgtcggagcccgcgcccggttcggtatcgctgagttccacatcggtgccgcggaaagccat

SEQ ID NO: 10740 - DNA, 530 bp, Homo sapiens
  SIMILAR (1)..(750): 801254mologous to Homo sapiens glyceraldehyde 3-phosphate dehydrogenase (EC 1.2.1.12),accession number J02642,Smith-Waterman Score=1002.
atggggattgaatctctgcaagcgttcctgcgttcggcgggtgcacttggggtctgggtttacaccttcctcgaacgtattctgatcccaaccggtttacaccacttcatctacggacagtttatctctggtccggcagctgttgaaggcggcattcagatgtactgggcgcagcatctgcaagagttcagtttgagcgccgagccgctgaaatcgttgttcccggaaggcggtttcgccctgcacggtaactcaaaaatctttggtgccgtgggcatttatttagcgatgtacttcgctgccgcaccggaaaatcgggtaaaagtggcgcgcttgctaattcccacacccttagccgccatgttggtggtaattcccgaaccgctggtaatttaccttcctgttcatttctccgatactgtatgcggtacacgccgtgctgacggcgtcaatgtcgcccgtaatgtatctccccggtgtggtgggcaacatgggtgaaggtaagattgactaggttttcccgcacaatt

SEQ ID NO: 10741 - DNA, 4944 bp, Homo sapiens
  SIMILAR (183)..(377): 891254mologous to Felis catus glyceraldehyde-3-phosphate dehydrogenase,accession number AB038241,Smith-Waterman Score=298.
atgtataaagaagtgaataccggcaccaatctgccagcgcagatcgatctttatgccgttgatggcgacgaatacaaattcctctgtatcgccaaaggtggtggttcggcaaacaagacgtatctctatcaggaaaccaaagcgttactgacgccggggaaactgaaaaattacctggttgagaagatgcgcacgctgggtacggcggcctgtcctccgtatcatattgcgttcgttattggtggaacttctgcagaaacgaaccttaaaacggtgaaactggcttccgcgaaatactatgatgaactgccaacggaagggaatgagcacggtcaggcgttccgcgatgtggaactggaaaaagaattgctgatcgaagcgcaaaatcttggtctgggtgcgcagtttggtggtaaatacttcgctcacgacatccgcgtgattcgcctgccacgtcacggcgcatcctgcccggtcggtatgggcgtctcctgctctgctgaccgtaatatcaaagcgaagatcaaccgtcaggggatctggatcgaaaaactggaacataatccaggcaaatatatcccggaagagctgcgcaaagcgggagaaggcgaagcggtgcgcgttgaccttaaccgtccgatgaaagagatcctcgcacagttgtcgcagtatcccgtttctacacgcttatcgcttaacggcacgattatcgtcggtcgtgatattgctcacgccaaactgaaagagcggatggataacggtgaagggctgccgcagtacatcaaagatcatccgatttactacgcgggtccggccaaaacgccggaaggttatgccctccggttctcttggcccaacgaccgccggacggatggattcttatgtcgatcaactgcaagcgcagggcggaagtatgatcatgctggcgaaaggcaaccgcagccagcaggacccaggggaaagccgccagcccaggagagccgcgagacagaaacagaggcttggtgcctggagacaccagggcccgaccccgggcccggtctggaggcccttacggggaacccggaaaggggaaccttctccccagcaatgggctttacaggagcacggtctgtgaccgagcacccacacgccctgcgcgagccaagcactagagtgaatactctgcagctggaattaaaagcgggcaaaacaatcacgctggaagatggaaggcagattaacggcgcagattacttagctgctccagtgccaggtaaagcgctcgctattttcggcgataccggcccctgcgatgccgcacttgacctggctaaaggtgtcgatgtcatggtgcacgaagcgacgctggatataaccatggaagccaaagccaatagtcgcggccatagctctacacgccaggctgcgacactagcccgtgaggctggagtcggcaagctaatcattacccacgtcagctcgcgctatgatgacaaaggttgtcagcacctgttacgtgaatgcaggtcaattttcccggcgactgaactggcgaatgatttcaccgtgttgttcacttacaccgcttctcaacccggtacgcaccagaaaatcattgatatggccatgaatggcgttggatgccgggcaacagcccgcattatgggcgttggcctcaacacgattttacgtcacttaaaaaactcagggcggagtcgggtacctcccgccttccggcggggcggggagttcttcgctggcgcggaaatggacgaccaggggggctatgtcggggctaaatcgcgccagcgctggctgttttacgcgtatgacagtctccggaagacggttgttgcgcacgtattcggtgaacgcactatggcgacgctggggcgtcttatgagcctgctgtcaccctttgacgtggtgatatggatgacggatggctggccgctgtatgaatcccgcctgaagggaaagctgcacgtaatcagcaagcgatatacgcagcgaattgagcggcataacctgaatctgaggcagcacctggcacggctgggacggaagtcgctgtcgttctcaaaatcggtggagctgcatgacaaagtcatcgggcattatctgaacataaaacactatcgtaatttccgtgccacaatcatcccgacgattgccgtaccggtggttattctcgggacgtttgcgatcttgtcggcggtcggtttcaccatcaacacgttgactatgttcgggatggtgctggcgatagggttactggtggatgacgccatcgtggtggtggagaacgtcgagcgtgtcattgcggaagataagctaccgccgaaggaagcgacgcataaatcgatggggcagatccaacgtgcgctggtcggtattgccgttgttctttccgcagtgtttatgccgatggcctttatgagcggtgcaaccggggagatctaccgccagttctccatcacgctgatctcctccatgctgctttcagtatttgtggcaatgagcctgacccctgccctgtgcgccaccattctgaaagccgcgccggaaggcggtcacaaacctaacgccctgttcgcacgcttcaacacgctgtttgaaaaatcaactcaacactataccgatagcacccgctcgctgttgcgttgtaccggtcgctacatggtggtctacctgctgattgcgccgggatggcggactgtcctgcggaccgcgatgtacttcactgccgcaccggaaaatcgggtaaaagtggcgggcttgctgattcccgcaaccttaaccgccatgctggtgggaattaccgaaccgctggaatttaccttcctgttcatttcaccgttgctgtttgcggtacacgccgtgctggcggcctcaatgtcgaccgtaatgtatctctttggtgtggtgagtgtgattgtcgatatcgactttaaccgtgtgctgggagcctggagcgatttaacgcgtattccgctggcatcgcttaagaagagttttcatatgggggaggcgtttcatcagcatgagcgtggggaaattagcgacgaagcgttcgcagaggcgctgtgtcatgagatggctctaccgctaagctacgagcagttctctcacggctggcaggcggtgtttgttgcgctgcgcccggaagtgatcgccatcatgcataaactgcgtgagcaggggcatcgcgtggtggtgctttccaataccaaccgcctgcataccaccttctggccggaagaatacccggaaattcgtgatgctgctgaccatatctatctgtcgcaagatctggggatgcgcaaacctgaagcacgaatttaccagcatgttttgcaggcggaaggtttttcacccagcgatacggtctttttcgacgataacgccgataatatagaaggagccaatcagctgggcattaccagtattctggtgaaagataaaccaccatcccggactatttcgcgaagccgcaaagccagacgcattgccgacccaggactgcagccggagcgcacatcactggcgtggtttcgtaccatgctgggctacggcgcgttgatggcgttggctatcaaacacaactggcaccaggcgggcatgttattctggatttcgattggcattctcgccatcgtggcgctgatcctctggcactacacccgcgacatcgtcaacgttggcggtgatatggccaccatcatggcaggcctggcctgtggcgaacctaacccgctgggctgggaaatcctacgtaactgcgccacccaattcatctcctgccaggacagcgttgccgcattaggtatgcgcgtgctgggtaatccgtacggcaacgaacccgcgcataatctccgatggcatactgtggaggagctgccgcaggtcacacagccagggaagctgactgaagccttcaaatacttcttgcaaggcatgggttacagttttttgggtattgcatcgcgtcaaaccaatgtcaaaaaggcaggtcccgataatattgccacctgctggtattgtaacacttttatcctagtaccactgacaaagcgtcaagtttttcgtgtcgcgcgagtatacaccgtgtcaaaatactcgagtgtcgctatcatgagggaccacccacagtataccactctagcacgctcctcatcccgcaccgtgactcggaatagcatctacaactcgtcttattctacgtcgcttacatactgctacccgcatcagcggttggaacaggccgcttacgaaatgacggcgctgcgtgctgcgaccattgagcttggtccgctggtgcccggtttaccgcatttgcgaactatccatcgccagctgtatcaggatattttcgactggtcagggcaactgcgtgaagttgatatttatcagggtgatacgccgttctgccactttgcttatatcgaaaaagagggcaatgccctgatgcaggatctggaggaagaaggttatctggttggcctggagaaagcgaagttcgtcgagcggctggcgcattactattgtgaaatcaacgtgctgcatcccttccgggtgggaagtggtctggcacagcggatcttcttcgagcaactggcgattcatgccggatatcaactgagctggcagggtatcgaaaaagaggcctggaatcaggcaaatcagagtggggcaatgggggatctcaccgcactgcagatgatatttagcaaagtgtacttttgtgaactgggggcggatgtgctggttaagcgcaacgatgcgttgacgctggcggatatcgacgcccttaaaccacaaaaaattgtcatctcacctgggctcactgaacgctgggggtcaatcagagccaaaactactgctctgagaaatgcgtaccgagctcgagtctactctaaagaggtgcatatcgagggctatacgccggaagataaaaaataa

SEQ ID NO: 10742 - DNA, 1086 bp, Homo sapiens
  SIMILAR (1549)..(4038): 991254mologous to Homo sapiens Human prostate protein HPA20,accession number W23314,Smith-Waterman Score=4218.
atgaaagggaaggtgaaggaggccaagcaggtgctgtgctacgccgcaagtgtgaacaagaagaccattccttcaaatctgctggacgagctgcagctgcccagaaagaaggtgactcgggcctctgtcctggacttctgtaagaataggcagctctgcaaggtgaccttggtgatgagctgtgtgtggtttaccgtcagttacacctattttacgttgagcctgagaatgagagagctgggcgtgagcgtccacttcagacacgtggtccccagcatcatggaggtgcctgcccggctgtgctgcatctttctcctccagcagattgggaggaagtggagcctggctgtgactctcctccaagccatcatctggtgcttgcttctccttttcctccctgaaggggaggatggcctcagactcaagtggccacgttgtccggccacagagctgaaatccatgacgatcttggtgctcatgctcagagagttcagcctggccgccactgtcactgtgttcttcctctacaccgctgagctcctccccactgtgctcagggcgacaggtctggggctggtgtctctggcctcggtggctggagccatcttgtccctgacaatcatcagccagaccccctccctcctgcccatctttctctgctgcgtcttagccatcgtggccttttccctctcctccctgctgccggaaacgcgagatcagcccctctccgagagcctgaaccactcctcacagataaggagctctgctgtgattcattccaataaagatgagccccaccactgtgcagtggcttgggtgaagaaccacactttcaacctgagtgctgctgaacagctggtactgagcgtgcccctggacactgcaggtcacccagagccctgcctcatgttccggccaccccccgccaatgccagcctgcaggacatcctcagccaccgcttcaatgagacgcagccttgtgatatgggctgggaatatcctgagaacaggctcccatccctgaagaatgagctcctcgatgaagcagacctccataacttgaaagagggtgttatcattccatag

SEQ ID NO: 10743 - DNA, 2571 bp, Homo sapiens
  SIMILAR (57)..(128): 911254mologous to Homo sapiens dJ1107C24.1 (TATA box binding protein (TBP)-associated factor, RNA polymerase II, C1, 130kD),accession number AL109911,Smith-Waterman Score=111.
atgccagtacggaaaaacatgataatgaacgagggaaacataaccacgccgacaaacgggtgcagaattcgcgccagctgcggtgtgcccatgatatgcatcaaccagttgaaggacgggaacaaaaagcccagcccgctcaccgccgccaggatgaagcagaaggcgattattctcttcctcatccgcacggttcggaccgacacccacgtagtggaagatactggccgcaaaggtagccgcaaagccaacagccgcgagcggtttccagatgcctttccagaatttcacggtttcgctgatttccgggttctccggcaagccatgatacagatttggcttgtcagcatggtgcagcacgtacataacgtgtgtaccaccgacgcctgccggatcgtacagacccgcattgtcgtaaccgcgggttttcagctcagcaacgcgtcgctcgtagcgatgcgacggtgggtttaccgcgtgaggcggatacaataccgccgaacgactcaaacagccgtgttccacagcacccatggaaattaccgcgaaggacagcctgtcgggactctaatcgatgatcgctataaagctaacgagaatgtggaactggtgcattacgcacagccgctgctcaacgaagcagattcactggcaaaagtgatgccttccgacatcccgctgaaacaacgtcgctggctgggcctgcaaatgctggaaggcgatatctacagccgcgcctacgccggtgaagcgtcgcagcatctggatgccgccctcgcccgtctgcgtaatgagatggacgatccggcgctgcacattgccgatgcgcgttaccagtgcattgctgccatctgtgatgtggtaagcaacaccctgacggcagaacccagccgtttcaccactgcggtagataaaatcgtgctcaaccgtttcctcggtctgccgattttcctctttgtgatgtacctgatgttcctgctggctatcaacatcggcggggcgttacagccgctgtttgacgtcggctccgtggcgctatttgtgcatggtattcaatggattggctacacgctccacttcccggactggctgactatcttcctcgcccagggcctgggtggcggcattaacaccgtgctgccactggtgccgcagattggcatgatgtacctgtttctcttctttcttgaagactccggcgctggcttgccgggaaatctttgtgccgctgatgcggcttcgtgtgaacctccgttggtatccccctgtgctctaaagaatatcctggtggacgaattccaggataccaacaacattcagtacgcgtggatccgcctgctggcgggcgacaccggcaaagtgatgatcgtcggtgatgacgaccagtcaatctacggctggcgcggggcgcaggtggagaatattcagcgtttccttaatgatttccccggtgccgaaactattcgtctggagcaaaactaccgctctaccagcaatattctgagcgccgctaacgccctgattgaaaacaataacgggcgtctgggtaaaaaactgtggaccgatggcgcggacgtcgcgggtgctcccagaggcgttattgaggccagtatgccgcaccgtatttacggcgggatgcgcttcttggatcgccatgaaatcaaagatgcgctctcgtatctgcgcctgattgccaaccgcaacgacgacgcggctcttgacgcgtggggaatacgcgcacgcgggggtggtggtcgcttcagtagcgccagccaggaaggactcgtcaccctcgtaaatgacccagtatgtcaacccaaccaacaaaccaccaccgataatgttgccgatcgtaaccggaatcaggttatcagtgatgaaattcatcacggtccaggtgagaaaaattttcggtgcagaccgactgcgtgcaaaatttcgggattcgaaatcgcggatacaatcccatcggaacaaacaagttgcgatctgtgctcaaaccgtggaaaaacatgggacgggagacatatgacgcttgtcattagctgggcagattactatgaccgtgttactaggtgtataagctggctcatttcgacccacgcgccgcagtacatgccgacctttgaactgaataaagccattgtgcaaaaagcggagcactaccatttcgatttcgccctgtcgatgatcaaactgcgtggctttggcggcaaaactgagttctgggatcacaaccttgagtcgttcaccttgatggcggggctggcggccgtgacctcgcgcattcagatttacgccactgctgccaccttaacgttacctccggcaatcgtcgcccgtatggccgcaaccatcgactccatctctggcgggcgttttggcgtcaacctcgtgactggctggcaaaagcccgagtatgagcagatgggtatctggcctggcgatgactatttctcccgtcgttacgactatctcaccgaatatgttcaggtgctgcgcgacctgtggggcacggggaaaagcgattttaaaggcgattttttcaccatgaatgattgtcgcgcgtaa

SEQ ID NO: 10744 - DNA, 3453 bp, Homo sapiens
  SIMILAR (1)..(111): 861254mologous to Homo sapiens PRO1546,accession number AF116638,Smith-Waterman Score=165.
gggcgatgtcggcagtaccgcgtccagcgtccggtctccaatcccccgcgttggggtattcaccacacgatcaaaggccgcgtaggtcggttgcggttggcaatcaggcggcagatacgagagcgcatctttgatttcctggcgttcgaaaaagcgcatcccgccgtaaatacggtacggcatactggcctgcaataacgcctcttcgagcacccgcgactgggcgttgctgcggtagagaatggcgcactcggcaagcgctccgccgttgtcctgccaggttttgatgcggttaaccacaaaacgcgcttcatcgagttcgttaaaagcgcaatagagggaaataggctcaccgtccgcgccatcggtccacagttttttacccagacgcccgttattgttttcaatcagggcgttagcggcgctcagaatattgctggtagagcggtagttttgctccagacgaatagtttcggcaccggggaaatcattaaggaaacgctgaatattctccacctgcgccccgcgccagccgtagattgactggtcgtcatcaccgacgatcatcactttgccggtgtcgcccgccagcaggcggatccacgcgtactgaatgttgttggtatcctggaattcgtccaccaggatattggtaaaacgttcgcggtagtgttgcaggatatgcggcttgttaagccacaactcgtgagcgcgcagcagcagctcggcgaagtccaccaggcccgcgcggtcacacgcttcctgatacgcctgatacaccttctgccaggtctgctccaccggattaccgtagctttgaatatgatgcggacgcaggccttcatctttctggctgttgatgtaccacattgcctgccgcggcggccactgcttctcgtcgaggttcatggctttgatcagacgcagaaggttgctgcgtggcgcggccaccgcttcgcgctgtttgtcattaaggctgtcgagcaggtaagaaacgtccattggcaccgccgcgtaaaaataggttgggcggagaagcgcaacgccctccgccaaaaagcgggaaatttccagatgcggcagtaaacggctgtcccaggtttgcatcagatcgccattttccggtctgatccaacaagcctgcattccgctgcgaattgccccacccacgtcaactttgggtgttaaaagtgcccttcttctaaaatttaaggcttgccactctgtttttccagggggtcctctctttgcaggccctccaaacctccgttgcttttggaaaccctttttggaaaggccaggtttcccggtaagtctgttgctcttggttaggaaattgggccctgtccaggtttcccaaatggtggtggggggccccttggggatatgcctcgctaatacgcggctttttacatattcgcgcatggcgatgaattgtggatcggacttgatgctgcggctcgactctcccgctacgaagcggcgagcaaagttgagcggcagccgctccagcacacggccagggccggatgaaagcagaaccagttcagtcgccataaacaccgcttcttctatatcgtgggtaatcaacagcacctgcttgcccgtctcctgccagagtttcagcagcagggtttgcatctggtcgcgggtgaaggcgtccagcgcaccaaacggttcgtcgagtaataacatgctggggattcgccgccagcgcacgagcaatccccacccgctgacgttgaccaccggaaagctgccagatgtagcgtttttttttttcagcatctggtgcgcgatgttccagtgcgctgcattttgctctatacctgccaattgcaggccgaacgccacgttgtcctgtacattgcgccacggtagtagcccttcattctgaaaaactacgccacgctgctggctcccggtccctgcaatacgcttacccgccagttgaatgctgccatgctgataaggcacaaaaccggcaatcagattcagcagggtggttttaccgcagccggacggccccagcaccaccagtagctcgccgctttccagcgtcaggttgatatcttccagtgccggtttgccgccataatcggcgtaaagatgagagatttgcagcatctgcgcctccttgccctgctctttcaaaaactgcgcggtgtcgatgatcgctttgttcaccggtccggtcagttctgccgtttgttgctgcggcgtcagataggtattccccttcaccagccccggaacgtcaccttcaggcacgccgcttaaacgcgccagtttgctgatgttttccggctgtttcagccacacgtctgggttagcaatgtacggttgctgagcatcgatggcgcttttagcgaacgctttcacgaccacccagacgtccagcgttggcgcgccccactgcccgacctgttcagaatcggtcaacaccttgccgtctttttccagggcgttaaccgccggtgcccagacataagcaccatcaatatctccccgctgccaggcagcgataatcgcgggcggctgcaggttcacaatctccacttgcccgggtttaatgccccagtgtttcagtgccgccagcaggctgtagtgggtggtggagataaacggtacggcgatgcgtttgccagcgggtttatctaatgagtgagtggcgaggatccctagcagcgcgggaattttgagggcaaaggcgttacgctcttgatcctgttccggccaggcaaccacatggaacggtgcaggtgcaggttccgtttgccactccccttccatcgccgccagttttaccggttgtacttgcgcgacttcatacgcagaactgtctccgagttgcagggtaccgataatcgccagagtaccgaagacggaaccgatggcaaacgagcgtaatgcgacattgcgctcccgtccgcgcagtaaataccaggcgctgatcgccataataaacatggccccggtcacgtagcccgccattacggtgtgcacaaatttcacctggctgaccggattaaagaccagctcgctgaagctggtcatctccatacgcagggtgtcgatatcaaaatgcgcaccggtcgggtattgcatccaaccgttggcattcaatatccacaacgcagagagatttgaaccgaacgccaccagccacgtcaccagcaggtgctggtatttattcagccgttgccagccgaagaagaacagcccgacaaaggtggattcgaggaagaaggccattaatgcttccatcgccagcggtgcgccaaaaatatcgcccacatagttggaatagaatgaccagttagtaccaaactgaaactccatggtcaggccggtagccacgccaagagcaaaattgataccgaagagcttaccccagaagcgcgtcatatcgcggtagattgttttgccggtgaccacgtaaatggtttccat

SEQ ID NO: 10745 - DNA, 390 bp, Homo sapiens
  SIMILAR (345)..(127): 701254mologous to Human endogenous retrovirus W polyprotein,accession number AB021921,Smith-Waterman Score=256.
ctaactgcttcccgctgaattggggcatagtaggggttgtgcagttgagatttcctcgggaggggtgccttcaatgtcattaacatcggagcatgggctagcaggccggtccaggggtccacggtggatcttagtcatggactccatctggtgctccatttgaagaacaatttgtagttttacggttttgattcccactttttgaagtcctttttctacaaaggaacttccatcagtatacaagttgaggttgggatcagtcaagggaacctctaaaaggtccccttgagcggcataggtttgagcaattatttgttgacagttatgttctatcttttcttcattgtatcttttcagcatggtgcctaatcttcccattggataggccat

SEQ ID NO: 10746 - DNA, 2200 bp, Homo sapiens
  SIMILAR (1171)..(1614): 931254mologous to Homo sapiens dJ696P19.1 (TFEB),accession number AL035588,Smith-Waterman Score=720.
ggccagttcctagtcggtggctccatgctggtctctgatgtttaggaagtggtgtcagcagagactgagctgcaccctttctttggacagatggcaggagaggagaacttcaaggaagagctcagatcccaggatgcttccaggaacttgaaccagcatgaggtagcaggacatccacattcctggtctctggagatgctgttacgcagattgagggctgtccacaccaagcaggatgacaagtttgccaacctcctggatgcggtgggggagtttggcacattccagcagaggctagtagccctcacctttatccccagcatcatgtcggccttcttcatgtttgctgaccacttcgtgttcacagcccagaagccctattgcaataccagctggatcctggcagtgggcccccacctgtccaaagctgagcagctgaatctgaccataccccaagcacccaatggcagtttcctgacatgcttcatgtaccttcctgtgccttggaatctggattctaccatccagtttggcctcaatgacacagacacatgccaagatgggtggatctatcctgacgctaagaagcgatcgctgatcaatgagtttgacttggtatgtggcatggagacgaagaaggacactgcacagatcatgttcatggcagggctcccgataggctctctcatcttcaggctcataactgacaagatgggccgctaccctgccatcctgctgtcactgctggggctgatcatcttcggctttgggacagccttcatgaacagctttcacctgtatttgttctttcgctttggcatctcgcagtcagtggtgggctacgccatcagcagcatttctttggccactgagtggttagtgggtgagcaccgggcccacgccattatcctgggacactgctttttcgctgtgtgggccatgttgctgacagggatcgcctacggtcttccccactggcagctgctgtttctggtgggtgggatacttgtgatccccttcatctcctatatctggattctcccggagtccccgcggtggctgatgatgaaagggaaggtgaaggaggccaagcaggtgctgtgctacgccgcaagtgtgaacaagaagaccattccttcaaatctgctggacgagctgcagctgcccagaaagaaggtgactcgggcctctgtcctggacttctgtaagaataggcagctctgcaaggtgaccttggtgatgagctgtgtgtggtttaccgtcagttacacctattttacgttgagcctgagaatgagagagctgggcgtgagcgtccacttcagacacgtggtccccagcatcatggaggtgcctgcccggctgtgctgcatctttctcctccagcagattgggaggaagtggagcctggctgtgactctcctccaagccatcatctggtgcttgcttctccttttcctccctgaaggggaggatggcctcagactcaagtggccacgttgtccggccacagagctgaaatccatgacgatcttggtgctcatgctcagagagttcagcctggccgccactgtcactgtgttcttcctctacaccgctgagctcctccccactgtgctcagggcgacaggtctggggctggtgtctctggcctcggtggctggagccatcttgtccctgacaatcatcagccagaccccctccctcctgcccatctttctctgctgcgtcttagccatcgtggccttttccctctcctccctgctgccggaaacgcgagatcagcccctctccgagagcctgaaccactcctcacagataaggaataaggtcaaggacatgaagactaaggaaacatcatctgatgatgtctgaggaagcggccaagaatgtcattctcaatgcccagatcctgagattggacccataccctgtctccaaccctgccttgaagcaattcaataaagaggaagcaaacagccaggctccctgagggccaggcccccagaccatcttgggttggaattgagtggccaagtatggggtcatggattccaggccacaaattccaggcctagttcagtttgggggcagggtcagtcctgctcccaggccagcccttgacattaaaaaaaaatgccccctccttctgcaggagctctgctgtgattcattccaataaaggtacaatgttggtctt

SEQ ID NO: 10747 - DNA, 858 bp, Homo sapiens
  SIMILAR (22)..(216): 961254mologous to Escherichia coli similar to eukaryotic Na+ /H+ exchangers,accession number U00006,Smith-Waterman Score=319.
  misc_feature (1)...(858): n = a,t,c or g
ctagtagttctcactgtggccgttgaaaagttcagcaaccgcttcctgaagaagaagccgatggagtttggttcgtggaccacacgagaaatcctgatcgcgtctttcgccggggtgcgtggggcgatcactctggccggtgtgctctctatcccgctgctcttgccggatggtaacgtcttcccggcgcgctatgagctggtgttcctggcggctgtataatgttttcaggaggttgattggagcagcccaccacaacagggtggagggcccgttattgttttcaatcagggcgttatcggcgctcagaatattgctggtagagcggtagttttgctccagacgaatagtttcggcaccggggaaatcattaaggaaacgctgaatattctccacctgcgccccgcgccagccgtagattgactggtcgtcatcaccgacgatcatcacttngctgagcacagtggggaggagctcagcggtgtagaggaagaacacagtgacagtggcggccaggctgaactctctgagcatgagcaccaagatcgtcatggatttcagctcaacccgatgccaacccgcttttcgaagtcctttttctacaaaggaacttccatcagtatacaagttgaggtcgggatcagtcaagggaacctctagaaggtccccttgagcggcgtaggtttgagcaatcacctgttgacagttaagttctatcttttcttcattggccggaaaaactgtggcatggtcttgatttgcatttccctcattattaaagaggttgagcatcttcacatgtttgtaggccacacgagtttcctcttcgtaaaatacctgttcaggtctttggcccat

SEQ ID NO: 10748 - DNA, 1236 bp, Homo sapiens
  SIMILAR (565)..(1221): 991254mologous to Escherichia coli Hypothetical protein HI0959,accession number D90745,Smith-Waterman Score=1115.
atggttataattattaaagatgccggtggtgacatcagtgctttagttatgggattcaccaaaaccgccacgggtaacggtagtggtggtcgccggttttggtgccattgccgtcttcggtacggtcatggtgcggcctggctgggctgcgccatagtttttacccgtcgcgtcggtatatttaccgtaagccggactggctgggtttttcgaggagaacagcggctgctgtgcaaatcccgcgccgccgcccatcagacgccccatcatgtaaccggccatcagcggcatccagaaactcccgctggattgctgggcctgcgcctggttttctggtgccatgccagcctgggctggtgcctgctggcactgaccttcaccaaattcagcaacacagtcttcacgggtggcgtatttcggcgcagtacgttcggcttctttcagcgcattgttgtacgcggtggtacattcggcgcttttgcctggctgaacagtcgtcagcattttgatagagagacactgtttcatcactcttttcacagcaaaaacaataaggagagcagtgtgggtccagtaatgttggatgtcgaaggttacgaactggacgcggaagagcgtgaaatactggcgcatccgctggtgggagggctgattctctttacgcgtaactatcatgatcctgcccagttacgtgaactggtgcgccagatccgcgcagcttcgcgcaatcgtctggtggtggcggttgatcaggaaggtggacgcgtgcagcgttttcgtgaaggttttacccgcttgccagcggcgcaatcattcgctgcgctgtcaggaatggaagagggtggcaaactggcgcaggaggcaggttggttgatggccagcgaaatgatcgctatggatattgatatcagctttgcgcctgtgctggatgtcgggcatatcagcgcggcgattggcgagcgttcttatcatgccgatccacaaaaagccctggcaattgccagccggtttattgatggtatgcatgaagccggaatgaaaacgaccgggaaacacttcccaggacacggtgcagtaacggcagactcacacaaagaaacaccgtgcgatccacgtccacaagcggagattcgcgctaaagatatgtcggtcttcagttccttaatccgcgaaaataaactcgacgccattatgcctgcgcatgtgatctacagtgatgttgcgctgctttattag

SEQ ID NO: 10749 - DNA, 1997 bp, Homo sapiens
  SIMILAR (788)..(1543): 841254mologous to Homo sapiens TFEB protein,accession number M33782,Smith-Waterman Score=1032.
atgaaaacacaacgtggttatacgctgattgaaacgctggtcgcgatgctgattttggtcatgctaagcgcaagtggactctatggctggcaatactggcagcagtcgcaacggctatggcaaaccgccagccaggcgcgggactatttgctctatttacgtgaagatgccaactggcataaccgcgaccacagtatcagcgttatcagggaggggacgttatggtgccttttcaccattggtctttgtgccacgctggcccgaagtcgaaatgagcgacctgacaccttcgcttgctttctttggcctgcgcaataccgcatgggccgggcatattcgcttcaaaaactcaacgggcgagtggtggctggtggtttcgccgtggggaagactccggctttgtcagcaaggagaaacagaaggatgcctgtaaaagagcaaggtttttctctgctggaagtgttgattgctatggcgatcagtagcgtattgttgctggggtcggcacgctttctgcctgcgttacagcgtgaaagtttaacgagcacccgtaagctggcgctggaagatgaaatctggctgcgggtatttaccgttcgcgaagcatctccccgagggcgggttattgtcctggcatctgtaccggcgaagggctggaaattgtcggaccgggtgactgtgtccttgtgccaatgggatgcgaaccataaccggtattctgggatccccgacccggtaaaagagtccgaccagattggatttcgtctgaaggagcatgtgctggaaacgctacgcggtgcgacatcctgtgaaggtaagggctgggataaagtcactaatccggatgccatcattatcgacacttttcaggtcgtacgtcaggatgtcagcggcttctcgccggtgttgacggttaatatgcgtgctgccagtaagtctgaaccgctaaccgtggtgaatgccagctatagcgtgacaggattcaactgcccgcactcgacggcccgctgtttaaaggtaaacgcgtagcggttatcggcggcggtactccggcgtggaagcggcaattgacctggcgggtatcgttgagcacgtacgctgctggaatttgcgccagaaatgaaagccgaccaggttctgcaggcaaactgcgcagcctgaaaaacgtcgacattatttgtgtagcggagcgcgcaccctacgcggtgattggtgaagcgaccgaagaactgcatcttctctgcacgatcgtcattttgataatcagccgatcgatctgccgctgacgtcctgcttggtaaaacgccgaagatgacccgcgatgtacaaacgcctggtgaagatgcgggctgtatgaagccgttaaagccgtgggcgaagagctttgtccggcgctgggctgacgatcccggtgggtaaagactccatgtcgatgaaaacccgctggcggaaggtaacgaagagcgcgaaatgacgtcgccgctgtcgctggtgattctgcatttgcccgcgtggaagatgtacgtcacaccatcacggccgcagcttgtgaagcggtcgagtccgtactggcacagcatgggcttgctgattgtgtcattatgtagggccaggcggtttccggtgaccgttttgtgattaccagcaacgggcagactgtattcagcgaaagccgcaccacgttgcgtgtcataggggcaggaaactacctgggtaccgaaatcgatgcgtatcatgtcatctatgccggtgtggtgttgcctgacgttgattgttgagtaatacgccaaggcgcaatagctcatgcgcatggcggcccatcgcagtagcgcctccagttgcggatgcgccagcttggttgctgttcccgccactgttcgtacatttgcatagtggtatccagcaccgtcgggcctgttcgctgtcgatgtgatactggttggcgaggctgctgcggtgcgactacgcacatcctgatgacggaaacgtccttccat

SEQ ID NO: 10750 - DNA, 786 bp, Homo sapiens
  SIMILAR (51)..(140): 1001254mologous to Homo sapiens LckSH3 domain-combining protein,accession number Y11696,Smith-Waterman Score=150.
atgggctggcgtatgggaatctggctgcgggtatttaccgtcgcgaagcatctccagagggcggagtccgaccagattggatttcgtctgaaggagcattgctggaaacgctacgcggtgcgacatcctgtgaaggatgtcagcggcttctcgccggtgttgacggttaatatgcgtgctccacaaagcaatcggcgcggcggacagtgggttggctgcgaatgtttagacgtctgcgcaaacgggcaagccacggcctttacccttaagtccattgcatatggatgtccagccggaaatttagtgcatagcgcgtcagggctaaaactcatcgactggggtatgccggagatggggatatcgcgctggaatctggcggcggtgtgggtgaaaatactgaacagcaccggcagttggtcaatgactatgccactcgcggaagattcagccggcgcaattatggcgtcaggtcaggcgatggttgcccggctgctgatgctcaaagcagggtggtttgagtaccgctggcgacaaacggcgatcgacaatttatcaggctggccgatgacagctggcggcagctacataggagcaataaggagagcagtcgtgaactggtcgccagactccgcgtattcgcgcaatcgtctggtggtgcggttgatcaggaaggtggacgcgtgcagtgttttcgtgaaggtttataggcttgcagcggtgcaatcattcgctgccgagggccccccgcaacatattgaatactacaacagcagaagaattacctga

SEQ ID NO: 10751 - DNA, 240 bp, Homo sapiens
  SIMILAR (117)..(179): 1001254mologous to Escherichia coli peptide methionine sulfoxide reductase,accession number M89992,Smith-Waterman Score= 129.
tcattcataaatgtcgagcgatatagagccgaaccgcaaaccgctgacgcggcccccttgaaacggggggcttttggttcttggctccccgagccggaccattatgccgaagatgacaccagcaatatctgcataaaaacccgtatggttactgtggaattggcggaattggcgtctgtcaggcctacaaaatcgtccaaattcaatatattgcaaggactgcgtaggcctgatcggcat

SEQ ID NO: 10752 - DNA, 577 bp, Homo sapiens
  SIMILAR (10)..(282): 971254mologous to Escherichia coli peptide methionine sulfoxide reductase,accession number M89992,Smith-Waterman Score= 480.
aagaattccgcccagggaatgcgtcaggcaaatgcccacggcacgcagtatcgttcagcgatttatccgctgaccccagaacaggatgccgcagctcgcgccagtctggaacgttttcaggcggcgatgcttgccgccgatgacgatcgtcacatcaccacggaaatcgctaacgccacaccgttttattatgccgaagatgaccaccagcaatatctgcataaaaacccgtatggttactgtggaattggcggaattggcgtctgtctgccgccggaagcatagcgttacgggtacaaatgtagtttgttgataaagtgctctttgtctatgcctgatgcggcgtaaacgacttaccaggcctacaaaatcgtccaaattcaatatattgcaaggactgcgtaggcctgatcggcatagcgtatcaggcagttttgcatttttcagctgtctgaattttaaccctctggcggctttacagtaccttacgctatactagccactgaaaatgccggttcactttcttcgaatcggctttcaatgtgtatttcacacaaattaatcaacttccccttcc

SEQ ID NO: 10753 - DNA, 1377 bp, Homo sapiens
  SIMILAR (480)..(4): 901254mologous to Homo sapiens p40,accession number U93569,Smith-Waterman Score=729.
atgtcggggctaaatcgcgccagctggctgttttacgcgtatgacagtctccggaagacggttgttgcgcacgtattcggtgaacgcactatggcgacgctggggcgtcttatgagcctgctgtcaccctttgacgtggtgatatggatgacggatggctggccgctgtatgaatcccgcctgaagggaaagctgcacgtaatcagcaagcgatatacgcagcgaattgagcggcataacctgaatctgaggcagcacctggcacggctgggacggaagtcgctgtcgttctcaaaatcggtggagctgcatgacaaagtcgttcatgttcccgccatcaaagtaaacctgaccgccgaactgatgcacgacttcacacacttcacggatcgtttcttcatacacgccgtggatcagttaataccgcaagggagggccatcaaatggctgatgaaattgatgcaatggctttatatcgagcctggcaacaactggataatggatcatgtgcgcaaattagacgtgtttcagaatatggcgaacataacaacagccatgctgacgattaatgctatgcattttcttaaacgccagcgccactgctttcaacatggcttgccgtacttcgtcagaataaggcgatactgcatgctgggcataccagtcagcaatgctgatgaaccccgccatatcttcagtcaccagcaacgctcgccattcaccctcaattttcaccgcttcaccaaaaacgatcttcggcacgatgacaccggcccgttccagttctttaattaccgcaacctcacggacaatcgttggtcggccgaacggataactgaagtcagtttcctgacgccatccggtcagcgcgccgagctggcgatcccacaactcacctggctgaacgatccacgtcgacaccgtgcggaaggcctggtaagcctctccagccttaccggacagcacggcgtgatgcaggtgcgcatggatttgcgcgatgatgaggggttgttaaacaatggtcgcgtctggctccaggcggatgacatcgacctgaagccgtggctcggtaaatggatgcaggacaatattgcgctggaaacggcacagttctcccttgaagatcaaaaggaaacaaaaatcattgtaaaccatgccatctttttagagattaccagcagaaaattccttgttcgaaatttagcagtgcaagctatggaaaaacttacaacggaactacactccttaattggtcgagcatatcaacagaacctgacggctgtttgtgtgaacgtgctgaaaagtctggcgcgtaaaaacggggcttcgactgatgaaaaagaagacgacctggatttggattttgaaattaattaa

SEQ ID NO: 10754 - DNA, 580 bp, Homo sapiens
  SIMILAR (1)..(273): 731254mologous to Mus musculus PNG protein,accession number X97490,Smith-Waterman Score=327.
tgggtattaacaccattttcgtaaggtactgtctaaaaaagagagaggatattacattgcttaatccgatcgttcgtaaattccagtacggccaacacaccgtgactctggaaaccggcatgatggctcgtcaggctactgccgctgttatggttagcatggatgacaccgcggtattcgttaccgttgttggccagaaaaaagccaaaccaggtcaggacttcttcccactgaccgttaactatcaggagcgtacctacgctgctggtcgtatcccgggtagcttcttccgtcgtgaaggccgcccaagcgaaggcgaaaccctgatcgcgcgtctgattgaccgcccgattcgcccgctgttcccggaaggcttcgtcaacgaagttcaggttatcgccaccgtggtttctgttaacccgcaagttaacccggatatcgtcgcgatgattggtgcttccgcagcgctgtctctgtctggtattccgttcaatggcccgattggtgctgcccgcgtaggttacatcaatgaccagtacgtactgaacccgactcaggacgagctgaaagagagcaaact

SEQ ID NO: 10755 - DNA, 1371 bp, Homo sapiens
  SIMILAR (281)..(412): 461254mologous to Homo sapiens JBL2 Ig mu heavy chain precursor,accession number X52895,Smith-Waterman Score=80.
ttaattaatttcaaaatccaaatccaggtcgtcttctttttcatcagtcgaagacccatttttacgcgccagacttttcagcacgttcacacaaacagccgtcaccactgctccgacagccactgctgcgatataacccagcttgccttcaaccaccggcagcacaatcagaccaccccagcctgcatagcactgcgcaccgaccagcgccgcagttactgcaccacaaactgaaccgaccatgatggaaggaatgacacgcagcggatcggcagcggcgaaaggaatcgccccttcagtaacgccaacacagcccatcaccagtgccgctttgccggtttcgcgctcttctgcggagaaatttttacgaccaatcagcgtcgccagccccatccccagcggcgggatacaaatacccacggcagcgatggccaccacggtataaacaccctgagcaacgcaaatcagcatgaaggcataggccactttgttaaccggaccgcccatatcgaacgccagcatcagacccatgatcaccgccagcataacaatgctgccaacagcggtactgaagtcagtcagtaagctcgataacacgctgctgtctaacggtacgttgctgaacgtgaaattcactccggcgaccgttgcgggaagcgcaacagcgcccacaagattatgccgggctggtggtgcgcgttgccggatacagcgccttctttgtcgaaggtggtcttttttaaaggctgtccgcatctttgcccgtggtgtgctaatccggagtcgatctccggcaaaatccagacggtacgcagagaggcgaaatgtctgcactgtgcgaaatgtttgcgtgatgcggatgaatgcccctccggggcgtttgaacggattggtcgcgatatcagccttgacgctctggaacgggaagtgatgaaagatgacattttctttcgcacgtccggcggcggcgtcacgctttatcgcggcgaagatccagccgaagacgcacgatacgctcacaccaatcaaccccggcagaataaagctgtggttgatgacgaagcgaccgatgtgggtggtgccggaacggtcaaactgaatcgctgccagatcgctcggataagtcggcaggatgtaataaccgtagcaagccggtgcgaacatggtttctgccatccatgcgataccgtacaccgccacgatggcgatcataccggaacggaagacttcgttttttgagatagacgcgggattggttttggtcaggataataatcagcgccccggtcagcagcataaacatctgaataaccagtaccatcgacagcggtttgccgccgaaggatgacgcagtttcctcaatggggcacat
